United States Patent Application Publication US 2009/0018031 A1 - sequence listing, part 6

SEQ ID NO: 2871 - DNA, 6000 bp, Homo sapiens
cttcggcagaagaagcgggcgatgctctgagaatccttgtgggccgctgtggctaggagctgctgtttcttgctagcccggcccttggcaagggagctgcccccagaggaactttttgccttcttctcaggggagggccccccatagtgagcgctgcctccagggacctcccctctgggcccagggaggggctcactcccatcctcatccaggaggccacagggccggctcgggggctcgtgctcgcctccccgctcgggctggggggcttgctccctgatccgagttgtctccatcagttccgtggccgtctggaacgggcaggagcctttggggaaaccagctcccacccgcttgggtttgagctgtaaatgtgagcaggaggagaggaggttcagcccactaggcccccttgagggcaccgctggctggagcagtaactcacattgggacggggctctcaggagtgtgggagggaagaggcaggcaggaccctggtggggagccaggccttggcaagaggtgcacccctgagggcagaggggaagtgaagcctttcctggtcacaggtctggaggccactgggccacagctcaccgagtacacatgggaggctggtggaatgtcatactcattgggctccgggggctcagcttgggcactgcagctcttggcactgcctcccatgtcatagggctgcccatccttggaggctctgtggatatcggccacctgggcagggataggcagggaggctgtggcacccgccagctcctcctgacatgccccacctagccctccttttctactaggcactacaagtgggtttctgtggccagtggccacaggcaactgaccactgggcaagttttaggcctcccatcctcacagggttggctagaaacatgtccagccagtggagaatggagctctacccccataaactgtctctggggtgggctggggagggtgagttctgggctgcctgagcccagagagctggcagacagcttctgcgtcagagtatggaggggcccctgcaacgaccctgggtccgcctgcaccaggcccaccttcttcagcacgctggccttgtagaggttggccaccttggcgttccggaatgtctcatgttccagctccacggccttggcccggaggtcagctctgtgggtgcaaggtaacaggcacaaggtatcaggtgggcctgggcttctccctgctgagctcttgcgggactccaggcctggtggggtaggccttgggcacagggattctgattagggctctctgagcaccctgtggcttactgtccctcagcagctgctggtagcacctaagttgtagccatgcctggccctggtggggttgtaggggcagtcccctggagtaggagaggtacaatctggggagaggtggcccaaacaggccagggttgacagggtcctgcagtctccaagggaacgagagcttggagtgctcctcagcccagtgatcgtggaactcactcatcagcggtacgtgttgactggcggttgctgctcagcgcctcctccagaagccgcaggcagtgctcccgtgcctggcacaggacagtgagactggtcgcatggcctcgcggctgggggagggccccggcgggtggctgaggagctgcccgtctcttaccttcacagtcagcctggggatcctcctgctagaagcctctttcaggggacagttctcatctgtggggggggggggtggtccttggtcctttcgctccaccttctgcgctctgaggtcccccacagcccggatgagaatcctccctccatgccccgggaagagcccacaagcctccaggaacatttctgtactgacctgggggtacaaattcttctatcttggggtctttgccctggaggacaacatgaaggacccatgaggcgtcctgccctgccgcaggacagtcccatccagcaccagagaaggggctgagaggtgcgagcagggggccaccaggggccccacacaggccactgagtgcctcccctcaccttgcgcagctgcatctgcttctgatagaagaggttccactcccgcttgtgggcctcatctctgccttcatccccgctgcctccagaaccttcgtcatacctagggacaggccaggcgtgagtggccctggcctgggctctgccctccccatgtgtgctgctgctagaacggcaatgtccctgatgtcctaccagctcaaggggggattgcggcatcgtgccacctctggtctggccctggcgccaagggaatgccaggcaattccagcgggttggagccctggcttctcggccccttacctgctgaagtccccgtagcccttgcggcctccctcatacagctcggggtcaaagccgttcccctgggagggcccgatgcaggtcttgctccagctgctgctgcgctccaaggcctccagccgcctccgcacggccgtggggttctggcagtggtcgcagcctttggcgcaggcaggcagcgcatccccgaagtacttggcaatggcggcatggcggcacctggagcaggcagcaccgcagaggtgaggggcggagagcccagtcggccagcgtctgttcacccgagcctgaatcgctagctgagcgagcactgccgcgtccggcaccatgccgggagccccacacccctcatctcatccaagctgcaccaggcatcgtttggctctccccactacacagatgaggacgataaggtgaaccaactttcccaaggtcacgtaacacatgggggtctcccgggaagcaggatgtgaaccccactctgtccagttactcctctgctcctcccctctgtcctctggcaatgggatgtagatgctggctctgccatgaagggtgtcttttgggtgacacacttcacctcctaaagcccatgcattcccgtcagtaagatggtgcagaaaggcacagccctcacggactgagcgaagatggctgaggtgatgtctgaagtgcattacagtacagtcatgccccatggaatgactgcacagccaatggtggtcccctacgattctaacactgtatttctactgtactttttctatgcttatgtgtgcttagatatgtgaataccactgtgttacaactgcatacggtactcaggacagtaacgtgatgtacaggtttgtggtctaggagcaacaagctgtagcgcatggcctgggtgtgtaggaggctgtgccgcttgatatttttttccttctcttccctggaattgctgtttgatttccctaagtatactctgtgaccgcacaatgacaagttaaatttctcaaaacgtatttgcattgctaaggcaggcacggctgtgtagtaatatgtcccatcatcaacccgtgagggtgtcacaggtggggcctttagccagggagacgcagcctcgcctggagtcctcctctcgtcttcctctgtctcaaccctgctgcagccctcctggggtgagcggcctctgcccatgctgggagcagggagcagcctctggctggcccacgaggctctgtcgcatctctgttccctctgcatgggggtggctgtcgacccttggggcagctgcagaggccgcaagaggggccatagctctctcaggctccttataaacagccattcctgccaccaggaacgtggcacagggtagggaagcccaagaggagatgctggaacacaggcagggctgtctggggtgccacatcccagggacaagaatagctggcattaactgctctaactagaactcctcccagtgtgagcactgctgcggctgcaagaagccctttgaggggctgcgaccccaaggcgcaggctcaaggatgcaaggctgattgcaacaccccggtaaggaagcagggcctggctgactttcttttagctgagtgaatgcagctctgaagcctgacctgggctgggacagccgaggcggccaccagagggcgctcctgcccccactctgctccaatgagtaaatgcaacaaatggttcatccccaggagtccgtgcgcccgcacagcggccgcctgtccagcctctgggaggctctggcatccgagtggtgtgaccacatggctggcttcctccccctgccctcctcaggccctgactcactggggttttgtgctcggactcaaagagctccattgacagcggggctggggtcggtttctctccacacagcctagcctgctgggaggcacaaccaggcaaatgtcacagggcccggcccctggactctggagccctgccctgacagctgggccaggagtgcggtcacagccccagcagaaggccctcacctcacaaggaacatgaggcgccttgccgggcgcgcaggccactcccaggtcactcaggattccaagttctcccccaagacgccttcagatgctgagcggcacaagggcctccccagggactggttgcaaagcctcctgctcagcttgagagggccaccagctccccactgtttactgttgttcctgagagaggccagagggagggaccagccagggagtggccagagggacagaaggggtggccttcctgagggcagggtgggtgccccagacctgagagcgctgcaggactcccctccacaggctcaggtggagcctccccagggtcctcctggccaggaaggcagagagccgacttctttcttcagctcccaacccaggcccagcccacggcgtgggagtcggggagagggagaggaggaggaaggaggaggagagagggagcttgtcttgtccctgagcagcgctctcagggcagaggtgaggcaccgggacatgaagttggaggacaagttcccaagcagggcttcctcgggctccccctcgcgacggtaatttgacacttggatctccaggacgaccaacaacaaaaaagccaggcagagacagcagctggctgtcagcagaggagctgggctgaggcgcccaggggagcagcggcgcccacgaaggaagtacgaggacagcacgtggaggctccgcgctggggcactgctgctcagcccccaacacctgagctcccaggtgagtggcaatggccacagaagaaggggggacagggagggagcagcaagggtcccctgcccccagggtgaagggccacagtctaccataaacacggagaggtcttcggggacatgctgggtcgcttccctgcagggaagtcagccagcctcctgcacacacctgcactctccctgctgctgggaccctgcactaggggagggctgggggctctgctcagagcgcctcctgctccgcctgctgtgcagcagaggggccccgagggcctgcttattctgcaagttcatttcagctcttttattcagggggcttaaaagagggatttggctgtccagcttgggagagaatggctgccggcctgctgagcctccctttttcccaggattagggcagagccctgtcgaggtcagcgcagggtctgcccagccagcatgcggcgcccccaggatgcagcaggactctgcccatctgtgtcctttcaggggcttggcccactcactgctggtgttctcagctcacggctcagcctgggtcctcctccctgggcccatctagaaccccataaactcctagatctccctctggtgatgagccttgaacaccaaaccaggaacctggaggactgactttcaactcaggctcaggtgggcagaaggtcacagaagtgaggctgggagggaccacgctggcaaccgggacctctgctgtgccaccgtgatgcacaggctgacatgacaccacccctaaggaagcaggacccggctgtttggttctttggggaacactgagagcagccctcctgggcagggcccgtgagccgaggctgcctactcctcctgccgccctgtcctcaagccagcgttaaagccaccaccccccatatgttttcctcaaagcaaacaagctgg

SEQ ID NO: 2872 - DNA, 6000 bp, Homo sapiens
gtaattatcgttgccttgtcccaggtctcagccggttctcgctgagatggctacgtcagtgaggccagtcactcccggtgccgctgccttggcagagctggtttagaaccaccgtgaaggtcatcgaacggggccctccaccctgcaattggcctgcggccatccttgaggccatgtggtctttgcatgagcacccaggatggtgaggaacctccgcctgctgaggcagcccacccactgcagaaggtcggactccctgctggcccccagttagtcccacttgtggtcacttagaccttgccccctcttctgcctcgtagcccttcaggagcaagatggcagccggcatgtaccttctggatttccttctctgccaggggcctgctctagtgttttcagctgctcctccttgaatgccacctccacttcttccttttgtgacatgaacaggttgcttcatgtctctgatatggaatgagatgcccgtgttttgaggctattgggaggactgaccatctagcagcacattgtagacagccataggggggtgcccggcacacgagaatgcccccccgggacgggtctcactggctttgggggctgtcacccccgtgcaccgtcactagcacccccaacaccttttgggtgtctgtcctagggtgtctgcggtgtgtgccctgaaggaaggtaggcaagctggaggtggggagctatgtttttgttgttggttttggttttctttgagatggagtttctctcttgttgcccaagctagagtgcaatggcatgatctcagctcactgcaacctctgcctcccagattcaagtgattctcctgcctcagcctcccgagtagctgggatcacgagtgtgcgccaccatgcccggctaatttttgtatttttagtagaaacaggatttcaccatgttagccagactggtctcgaactcctgacatcaggtgatccgccctcggcctcccaaagtgttgggattacaggtgtgagccactgcgcccggcctggggagctgtttttttaagtgatgatgagggtagcaggcagaagatggctccgtggaaaattagatgagttcttgtcaaaagccgtgggttccctgagttagatccacccagcttctcacacctcacctggagtgagtgcgtttctgtggaggtgaggatctcagttttcaaatgtactgagaggcatagggtcctagaatgctatagatcatccgctcccgcctccttccttctatacgtggggaagctgagacccgagagagcaagcaacttctctgaggttacacagcaggacagggccccagccagcacccccactggtgccccacgctgtctctccatggaggcctgtctccagcttagaccagcaagatagccaggagcagccccgctgagggtactgcccgtgcagtgggctcagtacaggagccagggcccgagagccccctggaagccagctggctgtgctcggccagccccagcccacatttgtggatctgaagctgcttttatcagcatatcaccaccaggccggggccacaccaggctctttgagactacctggagtccttgtcaccacaggtacaggtcttgtgagtctagccagcctgagtgtaggactgaaccctctggtcagactgaatgggacattctctctggccaggtggagcaggcttgcacaaggacagtggtcccctcttggttccgggacctccgtgccatcctcacgccccagctttccaggttccctcattcttagagggacgacaatgccgacagtgtcccttacgggacagtttgcgcgtggttcaggagctgggctgcctttctcccctccctctctgtctacacttggtctggcgttttcagcctgactggcactgtgcccacacggcctaatgtagcccagcagagacactccttcaaagagggagcgggcagggagagctttttcgcttgtgccacacccagagacccagggagagattgcagggggcacttttccttgtgagcgagagacctggggctgtgctcaccagaacagggaggaggaaggttggactgaggctgaatttactggtgcaggaaaagtggggtttgttgctgagaagctctggccagcctcctccaggggctgcaaagtgggagagctgcagactcatgccgggtggaccccggcctccagcggggaaaagtgtcagttcccagcagcagcaggctgcggctgtggacagtgtcatagctttgcgcccagggcttccctagggggctgactggaagctgaatttgccagccaggcatggccagcctcacccagccccagggtctgacccaggggtactcacggtatcctgtcacacagtgagcagaagtaggaccgttggacgtggctgttctgcccccagagagctggagaggaaccccgggaccccctttgttttgcagttgatatcttgtcatttggagcgtaaacccgcgactgaaccttcatggcgcaggtgggggagctgaggggtcctgttctctaaagaggaggaggcgcattccagccggtccccaggtggtcttcccagcgggctatttaaagccaggccaaggagtgcctgacacttggtgcccaatataaccagcagccgtcaggtgactgtgtggcatgtgccccagccgctgctcctaagggaaccttagtgttcccagctgtggcgaggggaacatgggagctctgaggctggccacctctcctcccctttcccttcctaggtttggcaggaggaaggcagggaagcccaggagggctactgatgatcccatatttttcccgtctttctatctcaggttcacccaactccttccaaaaccacacttcccacctgcgaaccagggcaaccagtccctcccaaccccacgcttggtagtgcccacctgcgaaccagggcaaccagagtccctcccaaccccacgctcagtagtgccttggttggaggcttctcagggtcctcaggggttcctgagtggctgccagagcaagtggtggctccctctggccttaagagggagtgtagcccagctgccaccaggccctcctgctgcccaggctgcccagccagccctgcttggagccttcagagggtgtgccctggctgcagtagcggtcagcacaggggaaacactcagggcagagaaggctggcagagccggagggatgggaagcattcctttatgtggcatctcctggcacacggagccttgcaacaggcaggcatcccgcaggccagacagctgccacttggtcccgaagcttccctgtttcctcctcgcagagctgatactccaaccccaggcgcctcacgaggaagggctggcagcaggcggcgtgtttgagactgataagcgaggtgtgttggcagcgcggggccccagagggctgcttgctctgccctgttgtttcgtcatggtgggttttagtcacccttgccctgttgggcattatctcgtttgaggtccacctagaaggaggcataactgacacttgtgggagatttgcagggtcctgtgcctgagcagccgggggggatgcccctatttgtggcactgagcctttgggtgactcccctttttgccctggctccaactggaagtagaaagtggtgcttgaacccctggcaggccctgctcctgtagccacccagggcgggaggaagcgctttctgctgctggtgttagaaacagtaggcgctctttctgcagctacagaagctggctgttcattcaccctccgtcctggttcagggactgtgttggagagaccctgtccactcgtgtcctgtggatgcaggacagggatccccacctgcctgcctggggcgtcttgtgagtgacagccactggggtctccaggctcaccgctgtgccccgaccccgacctggcctgactcttccctactgtgcgcctcccaacaccgcaggagcttgtctccccagacaccagccccagccgaagcccccagcctctgctgagctgagaacacttgggctagtccttggtttccacatttccctgggtcattgtttttgtttctcactagatgccagcttgtttgctttgaggaaaacatatggggggtggtggctttaacgctggcttgaggacagggcggcaggaggagtaggcagcctcggctcacgggccctgcccaggagggctgctctcagtgttccccaaagaaccaaacagccgggtcctgcttccttaggggtggtgtcatgtcagcctgtgcatcacggtggcacagcagaggtcccggttgccagcgtggtccctcccagcctcacttctgtgaccttctgcccacctgagcctgagttgaaagtcagtcctccaggttcctggtttggtgttcaaggctcatcaccagagggagatctaggagtttatggggttctagatgggcccagggaggaggacccaggctgagccgtgagctgagaacaccagcagtgagtgggccaagcccctgaaaggacacagatgggcagagtcctgctgcatcctgggggcgccgcatgctggctgggcagaccctgcgctgacctcgacagggctctgccctaatcctgggaaaaagggaggctcagcaggccggcagccattctctcccaagctggacagccaaatccctcttttaagccccctgaataaaagagctgaaatgaacttgcagaataagcaggccctcggggcccctctgctgcacagcaggcggagcaggaggcgctctgagcagagcccccagccctcccctagtgcagggtcccagcagcagggagagtgcaggtgtgtgcaggaggctggctgacttccctgcagggaagcgacccagcatgtccccgaagacctctccgtgtttatggtagactgtggcccttcaccctgggggcaggggacccttgctgctccctccctgtccccccttcttctgtggccattgccactcacctgggagctcaggtgttgggggctgagcagcagtgccccagcgcggagcctccacgtgctgtcctcgtacttccttcgtgggcgccgctgctcccctgggcgcctcagcccagctcctctgctgacagccagctgctgtctctgcctggcttttttgttgttggtcgtcctggagatccaagtgtcaaattaccgtcgcgagggggagcccgaggaagccctgcttgggaacttgtcctccaacttcatgtcccggtgcctcacctctgccctgagagcgctgctcagggacaagacaagctccctctctcctcctccttcctcctcctctccctctccccgactcccacgccgtgggctgggcctgggttgggagctgaagaaagaagtcggctctctgccttcctggccaggaggaccctggggaggctccacctgagcctgtggaggggagtcctgcagcgctctcaggtctggggcacccaccctgccctcaggaaggccaccccttctgtccctctggccactccctggctggtccctccctctggcctctctcaggaacaacagtaaacagtggggagctggtggccctctcaagctgagcaggaggctttgcaaccagtccctggggaggcccttgtgccgctcagcatctgaaggcgtcttgggggagaacttggaatcctgagtgacctgggagtggcctgcgcgcccggcaaggcgcctcatgttccttgtgaggtgagggccttctgctggggctgtgaccgcactcctggcccagctgtcagggcagggctccagagtccaggggccgggccctgtgacatttgcctggttgtgcctcccagcaggctaggctgtgtggagagaaaccgaccccagccccgctgtcaatggagctctttgagtccgagcacaaaaccccagtgagtcagggcctgaggagggcagggggaggaagccagccatgtgg

SEQ ID NO: 2873 - DNA, 6000 bp, Homo sapiens
atgcagaatgcaagtgggttgttggcctcagccaggcctctcgcctttctagtcaggagatatggcacaatctgaaaggctggaaatccaatgtgtctcaggatttgttcattcctgagttgtctccaggttctttctttataaagcttattttatcccagaaaatgtccacacagttgcacagtttgtcagtgggacagatcttgaccaaacatacgaactgagccacagtgttcaaacaccttgtttgcatccagccacccaccacagccaacaccaaatacctttgggtcatcagcctcaggtttttcagtctctgaatcgtcatcttcctacaagacaaagaatttagaggattaagcttaaaggagcgggcctgaggagtctcacatgcataactaggggccggagcaaacagcccatttacccagctggggtcatcccaccaagaatccctcccctaccatataactcagaaccagagaaaaataaggggaaaaagagatattctggaggggaaaaaaacaaaaaacaaaaaagcatcagcagctcaaagtcaagttactttagtggtgagacagtccacatcaatgaagatgcccgagttcaaagtcacatacataaaaatggagaaagcttgcaatatgttttaggaaagagtaagatcaggccacacaataaaacaggcatcgtgtttccactgaagtatcagttatttcaaatcaggattatgagccttctttccttttcatatacacatgtacatcagactcggacctactctaacagtgtccaacaccaagtgccaaggcttacacacagctgtatcgcagcacctcaaccggcatttgcacaaacatcaacacaggaaggcaggcatcaaactacctgagcaagtgacctgggaaaggcaggactaaagggcaatgcccaacctttcaggagtcccagttgagtgggctctgcctccacctaagtgctcacagaactgccagtgatccattctacccagtcctgttccttatccagatgaggtcagcctgacacaaaggatcacacacggtaaggcattctccaaagcgagcccgccattccactgaacgctaacgctgatgctatgaaggtcaaagatcaggagcagatgctggaccagctaccttattagctggctaaatccatgtcacctccactacccagaacactcccaatgcacagaagcctttaactaaatacccaggaaaaaatggtttcatttgaaactactattttcaacaaagctacatttcagcccaaacattacacagcactccatatattaatataaataccactcgagagacttgaacaaactagactcatgatttggagacttaactgtcctgtaaggtaccagtgagtccaaggctttaaatgcaatctccataatctccttaaaatgaaatcagtcatgccaaataaacagagatggagctcagacaaatacaatcacatttcagaatctctacaacaagatctgatgagaggattttactaaaatatgaaatgaagcttaaacatgatgaaaattctaagcaaagcaaatatgaaataacacttcaaaaacacattatgcaaacgtactaaagaaaagagttatgaatattaagccagaatgtgtgtacttcagaaaagtcagaaaacaacttgcaaaacttttctgaataatttcagtcaactctgaattatcaatattaatggatggggctaaaggcatgaaagtatctcccaaaatgcatcatgtacaaaacgcatttctgtttgttgtggaaataattttttttttttttaagatggagtctggctctgttgcccaggctggagtgcagtggcgtgatctcggctcactgcaacctccgcctcccgggttcaagcgattctcctgcctcagcctcccgagtaggtgggactacaggtgcgtaccaccatgccctgctaattattgtatttttagtagagatggggtttcaccatgttggccaagatggtcttgatctcctgaccttgtgatccgcccacctcagcctcccaaagtgctgggattacaggcatgagccaccgtgcttggctggaaagaattttaatgctaacatttacataccaacatgtaacaaaaatttcaaacaaataatatattttaagtgatttaattaaaacttgctaagcagtcagatttgacatctagactcaactctgcctgtcttatgctaagcaccaacttcaatttccttgcgttttctgcaaacttaaattctggctcatgttgctcaggtgattatgtgtctaaagactttcttgttaataatagcacaggttctcctttctccagcacctactgaacttcaggcaagatttgtgatcaagaactaagggcaccattataaaaagtgccaaataaaatgtcaagaaagaagttaagaaggccagggatggtggctcatacctgtaatcccagcactttgggagggtgaggcaggggaattgcttgaggccagaagtttgaaaccagactgggaaacatagtgaaacaacgtctctacaaaaaatttttttttaaattttaaaaatcggccaggagcagtggctcacgcctgtaatcccagcactttggaaggatgaggcgggtggatcacctgaggtcaggagttagagaccagaatggccaacatggtgaaaccgtctctgtgaaaaatacaaaaattagccaggcgtgatggcaggtgtctgtaatcccagctactcaggaggctgagggcaggagaattgcttgaacctgggaggtggaggttgcagtgagcagagatcgcaccactgcactccagcatgggcgacagagcaagattccgacaaaaaaaaataataataggttagctaggcatggtggcgcccacctgtagtcccagctactgggtaggctgaggtgggaggatcacttgcgcccaggagttcaagactgtagtgaactatctatgatcacaccactgcactccaatctggacagcagagtgagaccctatctcaaaaaaaaaaaagaaaagaaaaagcaggtgaaaacgaattttcctttcttatcttgttaataaactgagaagacttaaatgagccccaaccaagattaaaaataatgcagagttgactgtagatataaatgatacaccagttaggatgaatgcctgctataaatggagtaaatcatttaaacagggaaaaatcaacataaaacacccattgatatctgggttaaataaaataatccactatcttttcccccaaatttcaattcaaagattaataaaaaatgatccatgtgaaaatacattttcaaacagatctgatatccaatccagtttcttccactaatactaaaacaaaacgggagagcaagggatggagctaaccatgaaatggaacactgttggcacagttccaaaatctgacaaatgaaattgtgctttcagtagctctggatctgggagatttacctaccgactgtctactgttctcatcttcttcttcttcataaccatcttcatcaccccctagacgagaaaagtcatcctccccataggcatcagataccaatccgcctttctcctctgaaaggttaaaaaacaaacaaacaaacaaaaagcaagaaaaaaaaaacaagagttacaatgtaagaaaaaatgtccagagatttgagtggccaagactatctctgaagatacaaagggaacctaaatctcatgttaagttacaataggcccagattcggctctctgagaaggccagcatttactgaataaaatcattaaaaggtcagggaacaaaaccgagtactaaattctgtttctaatgctataaacactagataaacactaaagtgtttataggaaaccatcagagaactttctgactggaagagaccacacaaaatcacaaaacatggaagtacctaacctaatccaatccccttcactttccagatgaggaagctaaggtcctgatatgttgttaggtaacttgttctttattctcccaaaggaatctgtttccattatctaacattgtgcttctcaacctgaggaggagaacatcaccgttaggctttaaaaactcacaaaataagaaaaatcacctgggatccttaaaaagttcacaaatgcccacatcctaccccagttctaccgaattaggttctctcactttgggcatcagatacgtttgtttttaaaagctccaagatgtgtttagggcacattcctaactaaaagttataaagttaacgaacacaatctttaccatcttccacgtatgttttacttatcgctctccctcatcaaacaacgagcccaggggaaacaggcagtggctgagcagccgctccctcttcgtccatccctctgtctatcactatagccggcacggagtctttcagtaagtttaggcaaattaatcgaaataacgggaaggagattcttcattcttagtccacagtctctaatgctctatctcaccccggaccctggaccattcttcggggtccggtgcttggagcacaatgaccatcttgttccctcccgcccagcgagggtacagcattccgggcagacacccgattcccccttccagcttcgcacttgggccttaccagccgcgctgcccaccgcctcgattccagcctcgccatcagactcgggctctgaatcttccgcgtaaactgcgagagacgacagaacattcttcttccccgccatcttattcccacagcccgggcgtggctcactcctatgactcaagacgccgacttccgggcggaaaggcaggttctttcggatcccaggagacccccgcgccacactggaaaccaatcaaaacggcagtttcctgcgcctggctccgccctcatgccagcgctcgcgctacgtcatcactgcgcgacggatataagattgcgtgggttctgcctaaagctgaattcccagcgctttggcttctctgagttggggttgtgtataggggtcttcgaacagttccggaaccagccagcagcctttaattcttgggcggaccacggccggttctgatatcttagggtgaagagagggaggtgtcggccagccaagagagaaaattgcggatcttgggctcaggaagacgggagaaggggttcggggtcccggggtggaagaacggtcgtcgtggttgcgcttatagaagtaggagcaggtggtggatcttaggaaaacggttccccgttctccaagctgttctgaagacatttatgtttcttctcttgatctgatttctagctctgtgctataccgtggcctggaatagttcaatgttttcattttcattgagcgtaaaagtggagatgttaattactgaggaatgtattgcttgaggcagttcaccttcagctttattacttaaaaataatacattatttaagtgtaatatagcaaattgttacagaaaaataatctgtatttttaatgcaaaacagagggttctcgtggcaaccttttactacctttgccttaacctttggccactgttcttggctaagatgagcagccaccataccacctttccttttgaccctgagcggcgagtccggagtacgctgaagaaggtctttgggtttgactcttttaagacgcctttacaggagagtgcgaccatggctgtagtaaaaggtaacattaccaagctaccttcctttaaatttatgctggctataccataacgctgcggcagaacaccctcctcctcacccttcgtactgcctcacctttggtccataactggatttggaaatctttagagttgtcaaagcttgtagtttcgtttatttgttttaattagagatggggtcttggcatgttgctcaggctggtctccaaatcctgggctcaggcaatcctcccacctcggcctcccaaggtgctgggattacaagcatgagccaccacgccc

SEQ ID NO: 2874 - DNA, 6000 bp, Homo sapiens
agaaagctagaaaaaccaaaggtcttagactaatctccatctccatcacatcgcaccccactgctctaacagctgcttggcctccacctcaatgcctcacccctttatcagcctcctgtccaagagccttaaggcagaagtccttcaggttcccatagggatcagaaatcagttccttgaattgcacatcatagaagaggttggcccggaagcagggagtcttgaagatggcaactggtttcttcaggtgcagggcagcaaacacgtcctcttggacctgtggggtggctgtggcggtcagagccacacaaggggcatgtcccaggcgggagcgcagggcacccagacgcaagtagtcaggacgaaagtcatgcccccattgggaaacacaatgagcttcatccaccaccaagtaagacagcaggtggcgggacaccagggagttcagggtgggctggaaggaggatgaagctgccatctctggggtgatgtacagaatcttggtctggggcttttctcgctccaggtcagcaagcagctccttcctttcctgtgcagagagcttcgagttcagggaacttactcgtacctttagggttagcaagtggtccacttggtcctaagagaagagaaagaggctgtaactggccctcaggactcaggtaaacatcactgcaagtccctggaggatttcccagtcataaactgtcctcctcccaccctccaatatatattctctttgcatagaagtagtagaggttgaatatcctttatcaaatgcttgggaccaaaagtgttctagatttcagatattcctggatttaggaatatttgcagattgcatatacataatgagatctcttaaagatgagacccaagtctgaacatgaaattcattttttctttcacgtataccttatacatatagcctagatgtaattttatatatttttaataattttgacatgacgttgtgcacatgtacctagaacttaaagtataataaaaaatatatattaaaaataataataataattttgtgcatgaaaaaacagttttggctgagttttgaccgcaacccatcacatgaggtcagaaaggtgtggaactttccacttgtggaatcacgtcagcactaaaattttttggattttggagcatttcagatttcagatttttgctttagggatgctcaatctctatggaaggtgaagtggtttagagcacaggctctgaagtcagacagacttcagatttagatttcatcctggctcacttaatcgccacatgctcgctggctgtttcttaccctctgaacgatttatacaattctatctaatagcattgttgtataacttaaaatttacatctgagaggtgaaattaacgtatgtaagccgggcgcggtggctcacacctgtaattccagcgctttgagaggctgaggcgggcagatcacctgaggtcaggagttcgagatcagactgaccaatatggtgaaaccctgtctctactaaaaatacaaaattagccaggcatggtggcgcatgcctgtaatcccagctactcgggggactgaggcaggagaactgcttgaacccgggaggcggaggttgcggtgagccgagaacacgccattgcactcaagcccgggcaacaagagcgaaactccatctcaaaaaaaaaaaaaaaaaaagaaagaaagaaattaatgtatgtaaagcacttagcacgaagcctgggacctggtgaacattcaccaagttattactgtagttccctctctaccttccttcatggtggatggctcttacccacacagccacacttcctcaattctgattctatcagcccatctgcaggccttaaatagtcagaacacctgtagagcagatgttaataaggtcccagacagtttctcatctttttttctgtttcacatactgtgcccttaccaaaataagcaggacaccagggattccccatatcaacttagctatctatccatctgcaacttctgtctcaacatcacgagtgcacgtgtgtgtatacatgagactgagtgtatatgtgtgtacaaatacagtttcatactcctctgaacaaaaaaataacaaaggagggtgagggacctcagaggagtcattcataacctcccagagtgatatgcaccagtggagaacactacattggggaaatacagaaacccaatatagcgaatgagataggcaaatcatagaaaataagaggcaggggcgggtgtggtggctcacacctgtaatcccagcactttgggaggccgaggtgggcggatcatttgaggtcaggagtttgagaccagcctggccaacatggtgaaacctcatctctactaaaaatacaaaaattagccgggtatggtggcatacacctgtaatcccagctatatggggggctgaggcacaagaattgctggaagccgggaggtggaggctgcagtgagccaagatcgcaccaccgcacttcagcctaggcgacagagtaagactctgtctcaaaaaaaaaaaaaaaaaaggaaaaagaaaaagaaaagaaaataagaggcaaaagaccaatagagaagtgaaatttccagcctcaaaaaaccttccccgaatctttttgggctaccatcttcattgccctaagcctcacctgaatcaaagcaatgagaggagagactacaatggtgatgcctttggccaacagagcagggagctgatagcatagggattttcctgcccctgtgggcatgcacacaaagacgtccttgttacctgaaaaaatacaagacaacaatatctcagtgcttcctgccttttcattgaagttgttgaaaattaaatgagaatgtaggaaaagcacctagcagagtgtctggcacatgggagggtctcgatgtaatcctaattcccctcctgtcctttctatgaaaaaggcaaggatcctgggaaacttggatacatgcccaaaccatttctagtaatggttaaaaacaagatttaaaaagtctgggtcaagcgcagtggctcacgcctgtaatcccagcactttgggaggctaaggcaggcagatcacgagggcaagagtttgagaccagcctggccaacatggtgaaactctgtctctactaagaatacaaaaattacccaggcatggtggcacgtgcctgtaatcccagctactcaggaggctgaagcaggagaattgcttgaacccaggaggcggaggttgcagtgagccgagatcgcgccactgcactccagtgtgggcgacagagcaagactctgtttcaaaaaaaaaaaaaaaaaaaaagaagtctgagtctgctgtgatatggatgattgaactaaacagccatgaaagcagagtactgctagatgagtgggtacatctgtgtagacatgagaggacattacttagagggcttttgtttagacatgtatcattaatattacattgctgctcgcctcttggcaacttccatttgtcaccgtatctcaggtttataacattattactctttccttctctatctgggaccaaggccactcaacctgcaacaagggaattacctaggaggccagtgaccgagttaagttattcctaccaccctcactgttgctgttcgtttgtgtgtacaaacgaacaataatgagaatctgaagtgttttcaaagaccatgtgtaaatctagctatgaaatatagaccagctgggtggttctgccactaaaactacaagctttgggccgggcgtggtggctcatgcttgtaatcccagcaccttgggaggccgaggtgggaggattgcctgagcccaggatttggagaccagcctgagcaacatgccaagaccccatctctaattaaaacaaataaacgaaactacaagctttgacaactctaaagatttccaaatccagttatggaccaaaggtgaggcagtacgaagggtgaggaggagggtgttctgccgcagcgttatggtatagccagcataaatttaaaggaaggtagcttggtaatgttaccttttactacagccatggtcgcactctcctgtaaaggcgtcttaaaagagtcaaacccaaagaccttcttcagcgtactccggactcgccgctcagggtcaaaaggaaaggtggtatggtggctgctcatcttagccaagaacagtggccaaaggttaaggcaaaggtagtaaaaggttgccacgagaaccctctgttttgcattaaaaatacagattatttttctgtaacaatttgctatattacacttaaataatgtattatttttaagtaataaagctgaaggtgaactgcctcaagcaatacattcctcagtaattaacatctccacttttacgctcaatgaaaatgaaaacattgaactattccaggccacggtatagcacagagctagaaatcagatcaagagaagaaacataaatgtcttcagaacagcttggagaacggggaaccgttttcctaagatccaccacctgctcctacttctataagcgcaaccacgacgaccgttcttccaccccgggaccccgaaccccttctcccgtcttcctgagcccaagatccgcaattttctctcttggctggccgacacctccctctcttcaccctaagatatcagaaccggccgtggtccgcccaagaattaaaggctgctggctggttccggaactgttcgaagacccctatacacaaccccaactcagagaagccaaagcgctgggaattcagctttaggcagaacccacgcaatcttatatccgtcgcgcagtgatgacgtagcgcgagcgctggcatgagggcggagccaggcgcaggaaactgccgttttgattggtttccagtgtggcgcgggggtctcctgggatccgaaagaacctgcctttccgcccggaagtcggcgtcttgagtcataggagtgagccacgcccgggctgtgggaataagatggcggggaagaagaatgttctgtcgtctctcgcagtttacgcggaagattcagagcccgagtctgatggcgaggctggaatcgaggcggtgggcagcgcggctggtaaggcccaagtgcgaagctggaagggggaatcgggtgtctgcccggaatgctgtaccctcgctgggcgggagggaacaagatggtcattgtgctccaagcaccggaccccgaagaatggtccagggtccggggtgagatagagcattagagactgtggactaagaatgaagaatctccttcccgttatttcgattaatttgcctaaacttactgaaagactccgtgccggctatagtgatagacagagggatggacgaagagggagcggctgctcagccactgcctgtttcccctgggctcgttgtttgatgagggagagcgataagtaaaacatacgtggaagatggtaaagattgtgttcgttaactttataacttttagttaggaatgtgccctaaacacatcttggagcttttaaaaacaaacgtatctgatgcccaaagtgagagaacctaattcggtagaactggggtaggatgtgggcatttgtgaactttttaaggatcccaggtgatttttcttattttgtgagtttttaaagcctaacggtgatgttctcctcctcaggttgagaagcacaatgttagataatggaaacagattcctttgggagaataaagaacaagttacctaacaacatatcaggaccttagcttcctcatctggaaagtgaaggggattggattaggttaggtacttccatgttttgtgattttgtgtggtctcttccagtcagaaagttctctgatggtttcctataaacactttagtgtttatctagtgtttatagcattagaaacagaatttagtactcggttttgttccctgaccttttaatgattttattcagtaaatgctggccttctcagagagccgaatctgggcctattgtaactt

SEQ ID NO: 2875 - DNA, 6000 bp, Homo sapiens
caacataagccagtgacctggtgcccctcaaaagctaccagtgtttccagctacaccgactgaaatggcgtgggtgacagttaggtctagggacttgggtagaccacatccaagttcctgcatttgattctgagtgcagacggaaagatggattgtgtgaacggagggcatgaccagagggccactgaccagtgaagaagctggacgtcatcgcagcctcttgggacagtgtggtcaaggagcaggcagctgtttccagcagcagaagggctgacaagcagaaggcagggaagatccgttctgttttgctacctgaaggcagaactgatcgatgggagtcacagacaagtaggagtcagctccctgcggagcagaacacactagccattgctcagcgtccagcacacaacaggctccaccaggcctgtggagcagcacacaccagccatcgctcagcatctggcatggaatgggctccgccagaggcctgcggagcagcacacaccagccatggctcagcatctggcacagaacgggctccgccatcgtttgtcagggatgctaaggacagtgttcttcacggtgggaaaagcaggccagtggttctccagcccagctctgcttcagaatcacaggaaagcttattttaaaaagcagattcttatgctatactctgggagagtttttcccccagtaagtggggtagggctctggaatctgtttttttttttttttttttgacagagtcctgctctgttgctcaggctggagtgcactgacgcgatctcggctcactgcaagctccgcctcccaggttcacgccattctcctgcctcagcctcccgagtagctgggactacaggtgcccgccaccatgcccggctgattttttttgtatttttagtagacacagggtttcaccgtgttagccaggatggtctcgatcgcctgacctcgtgatccagccgcctcagcctcccaaagtgctgggattacaggcatgaaccactgcgcccggcctgttttttttcctaacaggtttactgagatacaattaacataccataaagttcacttgtttaaaacatataatgcgatggttttggtatttacagagttgtgcaatatcactacaatctaactttagaacattttccttaacccctaaataaacctcatcctcatcagcagtcacttcccatccatcccaccccaactccaaggcccaaggatccactttctgtctctgtggatgtgcctacggaatctgtttctcaacacacttctgggtgattctgctcctgcaggtccacggtcgggcattcaggaaccagtggaccagactgttccaagatcctttcctagtctaagctttcatagccggaacaatgaataccgacgaagtagcaggtgctttgcttggtgctggggttgtaaaagaaatatggtacaccctactcttgagaacctacagtcagtgggaaaaatggaatcataaatgactaactttaatacaatgtgagaagcgctctaacagcatgtgcattcaaaagaggcccaggatgcagatgaggtgattaatttgcagccaggagaagttggagggggaagggaatgctgtgttaactgctttccatgcatttcatgtactgctcatcacaattctgtgagctggatattaataccactatcatcctcaagtcagaaaaaaggagacagaggcctagagggcaaagtggggagtggcagagttgggtgtgagcatgagtagtcaggaccctaagactgtgtccccactccctatgctagcctacacaatggccaggggacctcttagagtaggggctgctgaatatcccaatcttagcacacagtaggcactcagtacatttttgcttgatttggactgaaaagggcctcccaagtaaagcacaaagccatggaagcaggaagacgtttgtcaccttcgggagtcagcagaggagcaatgcgagtgacgccaagaggcttccggagctgttgactcttatgtgaatcatgagcccactgtccattcacacacgtatctcttgaaggaagagtccagcgtcttcctcatgctatccatggtgggcaaagcaacatggtttctaccatcatggagtttatattccagtagggaagacaggccagttccatcccagcaagacaagaggaagcagagggttgctacggtctaaatgctggtgtcctccccaaattcctatgttgaaattataacccataggtgatggtattacgaggtggggcctctagggaggtgagtggatcaccatgtgagaacacggttaagaagctggccctgtgcaacctgaaagagcgccgtcaccacaacctgattgcgctggcaccctgatcttgagcctccagcctccagaactgtgagaaataaattcctgctgtgggtaggccacccagtctaaggtattctattacagcagcccaaacggactaagacatggtgctgagggacaagtcctcgtcttgtgggatgagagggagcttagtggaggacgtcatgtctaaactgagcccaaagagatgagtagtagttagccagatggaaacccttccagaagaaacattactgcaaaggtcaggccgccaaatacagcgtagcaaacacgtgagggactcacagtgggctgtaggaggtgggaagaactgagaatagtggtgagggctgagcctccagcgtcatattaaattacgcaggggacaggtcatgacgggccttgaagccatgccaaccagagtgaactttattcaccatgaggtcatgagaagggcacttcaatgttctaagaggacttgtgggctgggtgtggtggttcccacctgtaatctcagcacttggggaggccaaggtaggaggatcccttgagcccaggagctggagaccaccctgggcaacatagtgagatcctgtctctacaaaaaataaaaaaataagccgggtgtagtggctcacacctgtggtcctagctactcaggctaaggtgggaggatcacttgagtccaggaggttgagatcagatcttgacagtgagccaagattatgccactgcacttcagcctgggcacagagtgggggaaggggaaaggaaggaaagagagacagagagaggaaggaagggaggaaggaaggaaggaaggaagggagggagggagggagggaggggacttgttgcttttgaggaaaatacttgctttttaggaaaattggtctgctggcagtatggaaaagaaaccactgaggaggaacatttgagccagggcacccatgaaaatgctgctcaggaacccacaggagtgatggtggcacagccagggaaggagcagaggggaaacagacaaggggacagattccagcgacatttaagaggcagaataaaagcgagctagtgtgcaactggacgcgagaggaacggaggggcccaggaggatgcagatctccagcttgggcaactgggagcgtggtggacaggtcactgagatgaagaacccaagataacaatcagacttgaagataaagctcatgagctgattcttaatagtcacagaattcccttaatttttgcctttttttcccttccaagactccccagactttttttttttttttttttttttgagatggagtttcgctcttgttgccgaggctggagtgcaatggcgtgatgttggctcaccgcaacctccgcctcccgggttcaagcgattctcccgcctcagccttccgagtagctgggattacaggtatatgccaccacacccgtctaattttgtatttttagtagagaccgggtttctccatgttggtcaggctggtctcgaactcccgacctcaggtgattcccccgcctcagcctcccaaagtgctgggattgcaggcgtgagccaccgcgcccggccaactccccagactattaatgacatcctacaaaacgagaagccgggttctacgcttgcactgctccctgtcccggagaccgcacgcccgagcccaccgaggggcccgcctcgagctcggcgtcctcccaggttacctcgagctcagggaagctgagcaccaccagggaagcacaagcgcggacactgtcccctttcacgaaggacacgtcaacgcccccgaccctctgcagacccgagaaggcggggtctcgctgccacgcctcggtgtcccggtctacgacgtgggccttcagccgagcttgctccctaggaggacagaagcgtcaaacttggtcggggtcacacctcagactctgcctcctccacccgcgcggctgcagcggacagagcgcctctgccgggtcttctcccgcttcaagggaaagcaagggacataccgccgaggccacagtccctaggagcccaggcggcggagacccgcgcaagcgcaggccagacaaactggccggaagcgagaaccgcgcccaccccgcggactacaattcctgagatccctccgcttccgcgccggaaactgggctttgctttggagtctcgggcggtggcagctccgattccacagcctgaagactatgagctcggagggtccgcgaagggccgcccggcctcggcccccgcctcctgcgcgtcgcctgacagcattaccgtttccacagtgacagcgtttcctccggcggccctcccgccgcctccagggccatggcttcgtcccgggcaccccttccgcacgtcacttccggaagcgactcgctctgacgccgtccgccctcgttgccatggagacgcttgcgctttcccgggccgcacttcccacccgggtcttcagaagcccgtggccgctgggtgagcccctgcgtgaacgcacacgcacgcacacggcttcaggttgccccgcggcgccgcgcgcgatatcggctcggatcccgggaggccgtccgcccctttttcagcggatagctgaggccaggtaagtgaccgcgcgaggacccgggaactccgtgacgcccgtcccgcctctgctgtccccgccgcaagcgctgcgctctgcacggcgagaggggcctcttgccctgttgagagccggcgggcacggcacttctgcgcttggaaaagggtggtccagcactgcaggtcccactccttggcccggtcagcgtccgcctttgctgaaccccgaaaggattcaccaggtccaggacagcccggcagttgcctcaggagcacttactgagcgcctgtcgttgacgcccccacctcgatggcagctcaggggtgccctcaagcttttgagggcaggtgtcgtgtatttaaattcttcacagtttagcgggctggactcacgggggtgctgcagacttggacggggtttcatctgggtcggaccttgctgggcagaaagcttctcctaccagacaaagtacggcgaccttggggggtcttggttcttacctcgtgttcctcattgaatgagtgttggttcagtgctctcgctgtgccaggtgttgtgcgaagtactgtgagggagaatatgtatttatttgtggggagccgactttaaaccggtggttgggaaaggcctgagaggcgatattgaagacacctgaagggtgagtgaaagagcacggcgggtgagtggagcagctttctcgtgcaggtcccggggtgggaaagaggttggtgtatttgaagcactgaaaggcagccactgaagctgaagtgtagcagtttaacccatggttttatattctcctgggaggattcagaagggtgtatgtgtgtatgtatatataatagcctgaatataaacgtcaagggtgttaggttttgaagggaaggtgaaggttaaagaatgacgcacagtgagattgccggcgcgcgggcggctctacagcaacacaggtgtattgcaaacacctgtcgggggccagcttaatgccagagcccaccagcgattacaggctggggtactcataggcctgggcagga

SEQ ID NO: 2876 - DNA, 6000 bp, Homo sapiens
atctctcaaaacaactagacggggtttccaaagcctggcccccgtgtctaagggccctggcagcaacggccctgttagcacaagaagcagataaactaacccttggacaaaacctgaatataaaggccccccacgctgtggtaactttaatgactaccaaaggtcatcactggttaacaaatgctagattaaccaagtaccaaagcttgctacgtgaaaatccccacataaccactgcagtttgcaacacgctaaaccccgccaccttgctcctgatatgagagagcccagttgaacataactgtgtagaggtgttggactcagtttattctagcaggcgcaacctccgagaccatccttgaacatcagtaggctgtgagtggtacgtggacggaagcagcttcgccagcccctgcaaagtgactctgaggaagacgacaagccctgctccagtcacaactggaagctgactggtccacacacggccgaagcatgagaaaactcatcgtgggactcattttccttaaaatttggacttgtacagtaaggacttcaactgaccttcctcagactgaggactgttcccagtgtatacatcaagtcactgaggtaggacaaaaagttgccacagtcctattattttatgattattgtaagtgtaccaggactctaaaaaaaaaaaaagtttgtataatgctattctatgcaaggtatgtagcccaagaaatgaccaacctgatgtgtgttatgacctgagtctcccatgaccacagcttttgaaataagattaaggactgaggactggtagggactcataaacgatacgagtaaagtgttagccaaaatgaaagaaaaaggggtgcccaaacaagtcactttaaagtttgatgcctgtgctgtcattaatagtaataagttaaaaatagaatgtggttcccttaattagaaaagaggccatatgacaaaaaataagtacatttgtcataaattaaaactgtgtggaaataaatgtaaatactggtcttgtgtcatttaggctacttaaataaaaaataaaaaggatcctgtccaccttcaaaaaggaaaaagtggcccttcctgtaccagtggtcagtgtaaccccttagaactagtaataaccaacccccttgatcctcgctggaaaaaaggggagcatgtaaccctaggaatcaatggggctgaactggatccttgagtaaatatcatggtttgaggagaaatttataaacgctctcctgagacagtatttcaaaccttctatgatcaactgaatgtgcctgcaccagaaattccaggaaaaacaagacatttgtttttgcaattagccgagcatgtggcccagtctctcaatgtcacttcatgttatgtgtgtggacgaactgtaatgggagatcaatggccacgggaagcccgagaattagtacctacagacccagttcctgatgaattcccggctcaaaagaatcaccctgataacttctgggtcctaaaagcctcaatcattagacaatactgtatatagcaagagtggggaaggacttcacctttcctgtgggaagactcagctgcttaggcaaaaactgtataatactactacaaaaacagccacctagtggagttcaaaccacactaagaaaaatccatttagtaaattcccaaagttgcaaactgtgtgaacccacccggagtcccacagggactggacagcccccactggattatactggatatgtaggcatagagtttacaccaaattacccgaccagtgggcaggtagtcatgttattggcactattaaaccatctttcttcctactgcccataaagacaggcgaactcctgggcttccctgtctgtgcttcccgcaaaaagagaagcatagctataaaaaattcaaaagataatacatggccccctgaaagaatcatacaatattatgggcctggtacttaggcacaagatggctcctagggatacccgacccccatttacatgctcaaccgaatcatacggttacaagctgtcttagaaataatcactaataagaccggcagagccttgactattctggcctggcaagaaactcagatgagaaatgctatctatcaaaatagattggctctcgactacttgctagcagctgaaggagaggtctgtaaaaaatttaaccttactaattgctgtctacacatagatgatcgagggcaattagttgaagacacagttagaaatatgacaaaactggcacatgtgcccgtgcaagtgtggcatggatttggtcctggggccatgtttggaaaatggttcccagcactaaaaagatttaaaactcttatattaggagttacaatagcaatagaaacctgcgttctgctcccttgtttgctacccatacttcttcaaatgataaaaagcttcatcgctaccttagttcaccaaaatgcttcagcacaactgtactatatgaatcactatcgatctgtcttgcaagaaaacataggtagtaaaaataaaagtgacaactcccactactgagtgagattctcagagagggagaataagggagaccacccctcatattgttttacgcccaatttctgcctccaaagagagaagtaaaaactaaaaggcagaaatgaaatccacaagcagacagcctgcaccacaccctgggcctggtagttaaagatcgacgcctgacctaatcagtgatgctatctatagattacagacgttatatagaaaagcaccgtgaaaatccctgtcctgttctgttccgttctaattacgggtgcatgcagcccccagtcacgtaccccctgcttgctcaatcaatcacgaccctctcacgcagacccctgaagagttgtgagcccttaaaagggacaggaattgctcactcggggagctcggttgttggagacgtgagtcttgccgaagctcccagctgaataaagcccttctttaactcggtgtctgaggggttttgtctgcggcttgtcctgctacactctggtgggaaagacaccgcagcaggggagcagggtgcgcagggtgcagtgggtgacgctcattcgctgaaaactgaccctgctttcaaagccttgtcagttcccaaagctgtatgaagcctttcctgagcctcaacctctagagtctaatttcatcctctgtattttcccctttgttagtccaaactgcgtcattttgtaagcccctttccattttgtagaccttggtcaaagtgaaacattccacgggggttcgagccatgagaaacagcctgcctcttaacatattctgctgggacaaagcgccaggaacaccacattctgccggaaccacctcatcctgggaacacgttaacatcttcccggacagcaagccatactgcctagatccctcctgcccaggcctatgagtaccccagcctgtaatcgctggtgggctctggcattaagctggcccccgacaggtgtttgcaatacacctgtgttgctgtagagccgcccgcgcgccggcaatctcactgtgcgtcattctttaaccttcaccttcccttcaaaacctaacacccttgacgtttatattcaggctattatatatacatacacacatacacccttctgaatcctcccaggagaatataaaaccatgggttaaactgctacacttcagcttcagtggctgcctttcagtgcttcaaatacaccaacctctttcccaccccgggacctgcacgagaaagctgctccactcacccgccgtgctctttcactcacccttcaggtgtcttcaatatcgcctctcaggcctttcccaaccaccggtttaaagtcggctccccacaaataaatacatattctccctcacagtacttcgcacaacacctggcacagcgagagcactgaaccaacactcattcaatgaggaacacgaggtaagaaccaagaccccccaaggtcgccgtactttgtctggtaggagaagctttctgcccagcaaggtccgacccagatgaaaccccgtccaagtctgcagcacccccgtgagtccagcccgctaaactgtgaagaatttaaatacacgacacctgccctcaaaagcttgagggcacccctgagctgccatcgaggtgggggcgtcaacgacaggcgctcagtaagtgctcctgaggcaactgccgggctgtcctggacctggtgaatcctttcggggttcagcaaaggcggacgctgaccgggccaaggagtgggacctgcagtgctggaccacccttttccaagcgcagaagtgccgtgcccgccggctctcaacagggcaagaggcccctctcgccgtgcagagcgcagcgcttgcggcggggacagcagaggcgggacgggcgtcacggagttcccgggtcctcgcgcggtcacttacctggcctcagctatccgctgaaaaaggggcggacggcctcccgggatccgagccgatatcgcgcgcggcgccgcggggcaacctgaagccgtgtgcgtgcgtgtgcgttcacgcaggggctcacccagcggccacgggcttctgaagacccgggtgggaagtgcggcccgggaaagcgcaagcgtctccatggcaacgagggcggacggcgtcagagcgagtcgcttccggaagtgacgtgcggaaggggtgcccgggacgaagccatggccctggaggcggcgggagggccgccggaggaaacgctgtcactgtggaaacggtaatgctgtcaggcgacgcgcaggaggcgggggccgaggccgggcggcccttcgcggaccctccgagctcatagtcttcaggctgtggaatcggagctgccaccgcccgagactccaaagcaaagcccagtttccggcgcggaagcggagggatctcaggaattgtagtccgcggggtgggcgcggttctcgcttccggccagtttgtctggcctgcgcttgcgcgggtctccgccgcctgggctcctagggactgtggcctcggcggtatgtcccttgctttcccttgaagcgggagaagacccggcagaggcgctctgtccgctgcagccgcgcgggtggaggaggcagagtctgaggtgtgaccccgaccaagtttgacgcttctgtcctcctagggagcaagctcggctgaaggcccacgtcgtagaccgggacaccgaggcgtggcagcgagaccccgccttctcgggtctgcagagggtcgggggcgttgacgtgtccttcgtgaaaggggacagtgtccgcgcttgtgcttccctggtggtgctcagcttccctgagctcgaggtaacctgggaggacgccgagctcgaggcgggcccctcggtgggctcgggcgtgcggtctccgggacagggagcagtgcaagcgtagaacccggcttctcgttttgtaggatgtcattaatagtctggggagttggccgggcgcggtggctcacgcctgcaatcccagcactttgggaggctgaggcgggggaatcacctgaggtcgggagttcgagaccagcctgaccaacatggagaaacccggtctctactaaaaatacaaaattagacgggtgtggtggcatatacctgtaatcccagctactcggaaggctgaggcgggagaatcgcttgaacccgggaggcggaggttgcggtgagccaacatcacgccattgcactccagcctcggcaacaagagcgaaactccatctcaaaaaaaaaaaaaaaaaaaaaaagtctggggagtcttggaagggaaaaaaaggcaaaaattaagggaattctgtgactattaagaatcagctcatgagctttatcttcaagtctgattgttatcttgggttcttcatctcagtgacctgtccaccacgctcccagttgcccaagctggagatctgcatcctcctgggcccctccgttcctctcgcgtccagttgcacactagctcgcttttattctgcc

SEQ ID NO: 2877 - DNA, 6000 bp, Homo sapiens
tgtgcgtgattcctcccgcatctcacgttcctcccctgtgagccccttgacctcgctcccatgtccctttgtgtccctccggccggatctgagtgttggtggccatcggccacagccaggtcctgactgtccaggcagcccagggtcctctctggccacagcctctcatagaaagccccgagtgagaggcagcagacgggggcggcccactccgtttctctccctgtcctcagctaacacctccccccggcccgtctccggcatggagagagagcggaaagtgagtatgcggctgcaccgcggggcccccgtcaacatctcctcgtccgacctcacaggccgacaagatacctctcgcatgtccacctcacaggtaggtgcagagctcccgggcgggcgctgggcctcgggctaccccgtccgagtcaagagcgggctgtggtttctccagggcttcttctttcctttcttccccccatttttgagagtttttaatctcgccagggtgtggcgtcttggttgcagatgaggcttctcgggagggcctgggagacatgctgggccgtcatggggcttgtctcctggttgcaggtggccagtctcaggtctcaggtccctgaggccagcaaaccgtgggggctttctcctgctgtttgagtgccccgctgcccgcagccgtccccaggcagctgacaccgctcgcctgcttgcgccccattgtgggtgcccccagcccgagggagccttcctcattcttcctcattcttgccactggccagggatggaggcccgtagggacctccacgggcttcttgtgagaccctccctggtggcatgccctgcaacgaggctttccttcttttgacggcctcacctgtcttcccttggacgagaagtaccctgttgcgcagcccaggcctagccacggccaccgcctcttcagcatcctgcagcggtctctcctctcctcgctctggcttttgttgtcttttgcgtttgctaacgtgctctttgaactagaacagctttctccatatggatccattatatttcttcaaatagttttctgggttgttcgccaacaggggcagggttagtggggcagggctgtttcaccagcaggcatcctggggggtgcccagatcccccacgggtcttccggatgagcaggaactcagttcagaaatgccctggagcctggctctgggcttgtggggaggtgtttgttgggatcacaggatggagccaggcctgctgccgtgagcggggctgggtgtagctggctagccaggaacatgccggagtggggagcactcttgaccacttgccgtcttttaatgattggggttttactgcacgtttctaattcactaataatttcactagaaacagacctttttgtataacttcttcccaaagagaccaaagatgcagggattttggcttcgtggttattttgactttgtggttatatgaattgggctcgaggggtctgggctgcgtcacgagaatgggtcccttacgtgcacacaaccctgctgtcacctccagacacagcacagaaagggtttaactggcttctttccacgagcctggcacttgcgcatcagttcctgtgagcagttcccgggagggtctgcccgtgccctcgtgtcttgatgtgcggctggctctgtagcccctgaaccatggtacaggagcccagagtgctccccatgctgggtgctgaccggacttggacagcctcgccccagcgcttggctgacaaagactagggaaggggcctgagtgctttttgtttcttttaaagaaagtaaagtgtccagtggtttgggatctttgtgggcagtgaaggtgtcctgagcgtgctgagtagccacagccctgagtccagctgccttttctcggtacacggccttggcggcacctgggtgtggctgttgtagccaccagcccccaaggtggccgtgagcagtgtctccttccatggtgagctgtggcaggaacccgcagctggctcttaggccctcgttttccatatgaggaaatacaacgtgggctctaacagcagggaggagtctccagagagagctggtttgggggtgtgttctctccaaaagaagcctcttggcctctgctcctggacaccctggggggccttcctgagaggcatgttgagggctccccacctccagggcgggccccctcctttgtcaccatctcacaggaaggctttggccgtgtgtccttcctgccagactctgccagcaccagcacacgtggtggctgtgagcagcagctcccgttttgaatcccaagggggaatacaggaggctcaattgctctgagcgcctcacctgtttgctcgggtgagctggagacacagtcaccgtgggcagtgactcatccccggccagtcttcctcctcgggccgtcgctcttccctgttctttctgctcctctcaggagaccttgcgccctgtggagatgggaggaggcagcaggaaggtctcccagggcttgctggccgtggctgggtgtggatgggtggaagaccacgtggcagcctgcctgtaggtcacagaggcccccatagttgtagggccccgccccagcccggactccgcctgggtctgttccctcttcgccccctctcttttcgggctgttggtgttcggccagggctctttggctacagtagcctgggccctaaaggccatctagttgctgagtctgtttggggtttttacttggtgagaagaaggccttgtcattccaacagtcgatgactcgctttgatcaactcctgcccaggactaggcctgagccctgtcgtcgtaccggcgaggatgtgcgtctcccctgccttcaggctgtgccctgagacccagttgtggggctgcccagcacctgccatcctgctgggatcaggttttcttagtgcttgagaagactcaggagggcctgtcccatgccattgttggccttaagagcaagtgattccagaagaggagtgggcaccactctcatccagaggcccgtcctgagaggcaagtgaggctgtgctctgtgcctgggctcccccaggtggcacctgtcggtctgtggacctggttgaggcaaggatgcccatctggacatggagccgacacaggtagtcagggggccagcgggacgcttaccaacagctgtcttttccccacctcagaatagcattcctttcgaacaccacggcaagtagctgctcgtctcccatcggaaggcagcactgggtgagtgtgcgcgtggcgggcgccaggcagcagcgccaggtgggtgggagccaccatgccccacccatgggagcttgcaggtgggctgggcttgcatgccaggtgctggaggtagagtgaggcttcttctgctctgttcttcttgtggggtgcagagcggcggcagtccgctgcccagtcttggggggaggctgtccacagagagctttggaacagagtgaccccaggagaccatcctgttggcctgtggcctccccgtgactgcgttccgtgtgccgttgctctcctcctgtcctgggtgcccacccgtgaggcaggagtggcaaggcgggtgccccgagcacttgagttgccttgtctgcggtcggccgtgcctggaggggcgtctgtgtcctgctcagctgggtggctccacgcttggtgttgggggctcctaagctcttgctgcgccacactctgggcagtctctgccatgccagcttttctagtcgcctctctcttcctgtctcatttatctctgtccttgttttgtgtttcttttcacacttggtctctgcccagccgtcttgtccacgcagcttcgtctgtattaactcctccagccgcagcccactcactccccgccgtcggtgcatggccggcgtccacgctgtgctccctcctcggcggccacgcgcgctcggcggctccttccagcaggggcttgcgcttctgtcgggtctgtgccgctgggagacccgctgcagttttcacactgtgcacactctggaaatgtgttgacaggaactgcttttcatgtcttccctgagaggggtacccattttcaaacaccaggttcctttccaggaagggaggcaggagcacccgtctccgctccactcggatccttcgaccctgccgagcccggctccgcgggcaccttgcttgcatgcctcttcctccttcccgtcttcctgtcactcgttctgctgagcacgtgtcccagccacagaggcccctgtgcgtggcgggggacgcaggcgtctagactggggctaggcggtggcggtgcgtcccctccctgcccagcaccgtcactgtggtatctgcctggccggctcccccagccccatgctgaccttctcctgtgctttggctccgacagattcctggtcgggtggcttccagtggtcttcagtctgtcgtgcaccgatgagaactctccttattgctgtgaagggcagacaatgcatggctgatctactctgttaccaatggctttactagtgacacgtcccccggtctaggatcgaaatgttaacaccgggagctctccaggccactcacccagcgacgctcgtgggggaaacatactaaacggacagactccaagagctgccaccgctggggctgcactgcggccccccacgtgaactcggttgtaacggggctgggaagaaaagcagagagagaattgcagagaatcagactccttttccagggcctcagctccctccagtggtggccgccctgtactccctgacgattccactgtaactaccaatcttctacttggttaagacagttttgtatcattttgctaaaaattattggcttaaatctgtgtaaagaaaatctgtctttttattgtttcttgtctgtttttgcagtcttacaaaaaaaatgttgactaaggaattctgagacaggctggcttggagttagtgtatgaggtggagtcgggcagggagaaggtgcaggtggatctcaagggtgtgtgctgtgtttgttttgcagtgttttattgtccgctttggagaggagatttctcatcaaaagtccgtggtgtgtgtgtgtgcccgtgtgtggtgggacctcttcaacctgattttggcgtctcaccctccctcctcccgtaattgacatgcctgctgtcaggaactcttgaggccctcggagagcagttagggaccgcaggctgccgcggggcaggggtgcagtgggtgttaccaggcaaagcactgcgcgcttcttccccaggaggtgggcaggcagctgagagcttggaagcagaggctttgagaccctagcaggacaattgggagtcccaggattcaaggtggaagatgcgtttctggtcccttgggagaggactgtgaaccgagaggtggttactgtagtgtttgttgccttgctgcctttgcactcagtccattttctcagcactcaatgctcctgtgcggattggcactccgtctgtatgaatgcctgtgcttaaaaccaggagcggggctgtccttgccacgtgccaagactagctcagaaaagccggcaggccagaaggacccaccctgaggtgccaaggagcaggtgactctcccaaccggacccagaaccttcacggccagaaagtagagtctgcgctgtgaccttctgttgggcgcgtgtctgttggtcagaagtgaagcagcgtgcgtggggccgagtcccaccagaaggcaggtggcctccgtgagctggtgctgccccaggctccatgctgctgtgccctgaggttcccaggatgccttctcgcctctcactccgcagcacttgggcggtagccagtggccatgtgctcccaaccccaatgcgcagggcagtctgtgttcgtgggcacttcggctggaccccatcacgatggacgatgttccctttggactctagggcttcgaaggtgtgcaccttggttctcccttctcctccccag

SEQ ID NO: 2878 - DNA, 6000 bp, Homo sapiens
gtgtgcatgcacacacgaacacatgcacgtacacacacgtgcacatatgcaaacatatacgtacatgatgtgcatgcccgtgtagtgtctgtgcataaatgcacaaacacatgcagacacatgcacacatccatttctaacatgtccatacactcacaatacacacgtctgcatgcaagtgtgcgcaggtgccgacttacacagagtgctgcttgacatggtacccctccccttccccgccctgtctgagatctgggatctgtttcattcgttgttcacgaggaggccttcctggccccttcctggctgggctcagggtgttagactcggaatcctcccacactcacagacgcctttctttgccctgccaggcagatggtgtctgtgccaggcacgagtcctgggagccgtctcagctgtctgaagatgtttttctgcagcttccggttacatgtaagccgctatctcagtctgttcatgctgctgtaacaaaacaccatggactaggtacttataaagaacagaaatttatttctcacagttctgggggctggaaagtccaagatgaaggtgctggcatgttcagcgtctggtcagggcctggtgtctcctcccgagatgacagcttgttacagcatcctccagaggggaggaacatggtgtcctcacacagcagagagacaaaaggggaaaagggaccaaactccctccatcaagccctttcacaaggcactgagccattcacgagggcggggcctcacgatccaagcccctctccaaagtgccccctccactgacgcactaggcaggtcagtctctaacacacgcttttgggaggtcacgggcaggggacagcagagtcccaagccagtctgattctttccttttgttgttgttgtttgtttgtttttgagacacagtctcgctcttgttgcctgggctggagtgcagtggcaggatctctgctcactgcaacctctgtctcatgaactccagcaattctcttgcctggcctcctgggtagctgggactacaggtgcacgtcactacgcctggctaatgtttgcatttttagtagagacagggtttcacatgctggccaggctggtctcaaactcctgacctcaggtgatccacccaccttggcctctcaaagtgttgggattccaggcataaaccaccgcgcccagcctgattctttccctttgttagcagattctttctaaatgggtatctgtaaactttcctctttctctgtttctatagtttgggtgttggtccccttcaaacctcaggttgaaatctgagccccagtgttggaggtgtctgggtcatgggggcagattcctcacgaacagtttggtgctgtcctcttagtaatgagtgagttttcactcctactagttccagcaagaggtgcttttaaaaacacctgcacggccggcacggtgcctcatgcctataatctcagcactttgggaggctaaggcgggcggatcacgaggtcagaagttcaagatcagcctgaccaacatggtgaaaccccgtctctacaaaaatacaaaaattagccgggcatagtggcgcatgcctctaatcccagctactcagcaggctgaggcaggagaatcgcttgaacccgggaggcggaggttgcagtgagccggcattgcgccactgcgctccagcctgggcaacagagcgagactccatcttaaaaaaaaaaaaaaaggcctgtacttccctactcctccagctccctctcgcacacggtctgcacacactccagctgcccttcaccttctgccatgagtggaggcagcggcagcaaggccctcactagaggcagacgcccgatcttgaacttttgagacctcagcatcgtgagctgtgttaggctgtggttgccttgctataaagaaatacttaggactgggcaattttaaaagaaaagagggccggcatggtagctcatgcgtgtgatcccagcactctggaaggccaaggtggatggatcacttgagctcagaagtttgagaccagtctgggccagtaagaccccatgtctacaaaaaatatgaaaaattagccaggtatggtggcgtgtgcctgtagtcccagctactcaggagggtgaggtgggaggatcacctgagcccaggaggcagaggttgcagtgagccgagatcacgccactgcactccagcctgggcaacagagcgagaccctgtgtcaaaataaataaataaataaataaataaataatgaaaagaggtttacttggctcctggttctgcaggctttacaggaggcatggtgctggcctctgctcagcttctggggaggcctccggaagcttccaatcatggtgaaaggcaatgggggagcgggcacgtcacatggccagagcaggagcgagcgagcgagtgagcgagagagagaggtgccccacactttttaaataaccagatctcaggagaactcactatctcaaggacagcaccaaggggatggtactaaacattcctgagaaatccacccccatgacccagccacctccagccttggggtttacaattcaacatgaggtttagtgtggacaaatatacaaattacctcatgattcttcataaatttcccagcctcaggtgtttcttgatagcaacagtaaaggagctaagacactgtggcgttcagttgtatcaggacagacctgggtgtgggctggccctcatacgtcctgccgggagctctgggggctttccagtctgcaggtcgggacgtccttctactctgagatgttctagtatcatcaaaccgccccacagaccatgcctggagactctgcctcacacatccgttcccagcggtcaccagccccgcatccctccctcgtcaccgcatctgtgcgtctcctctgtgacggaggctgttccttggcaatgactatcctcagcttcagccccctgctgacagttttctagctcagaacctggccatgtctgcaccctccctgtcttctcggaaggggtgctgtcattccctgggctacacacctgctttgtcctcctctctctgaccccagggctccagggtaccactgtcctcttcctttgtcagtttgttgtggctggggctggtggtgggggagccacagcaatcagcctgcctcaccttgcccagcccgcatgttcccagggctcctgccatccccactacaccacagcccagtccgtgtgcacgggttatagagtcaagacacaaacacacaaaagccaggcagacgggcacagtacctgccgcagctgcatgaagcttggggcactatgggtgagaagagctagaaatgttggggccatcagagcccaggaggaccagccgagggaggagcagctgacaggtgggcaggtgcccctagtcagggacagcaggactccccaggaagaaggatcacagccacccgtgggagagctggactctgttcatcaacagaaaagccgtgagcgattccgccaacaaggtcagttttactagtctggcagccccccacccccggcttctgtaactcagaaactgggcagttccgactgcccatccctcattagtgactgatggtggtctggccggcggcatctcctgtctccaggccctgctatgtaatttcgggaatggacgcccgtctccccgacctgacctccagctgtttggagctgaggggtggagaggaaagactggggggtggagaaaggcgagcaccactgtggggcctgtgggggctgctttcctcttctgcagtgacctggacgggctgaggctgctgtctcactcacacggcggtgcccacaccacagccctggtatgctaatgcgtcaaaacacaccttcacctgtttcacattcttgagtttcagcgaggatgcgacaggtctcgagacacatggacgtgggaccatggggacgggttcttcaaggtccccatgcacctgcagcctgggggggcttgtctgaagggctttcttcccagtgatgggaatcaaaggccccgatctttgaagctggccatcagcctgaacgtccactccttgtttcctttgcaaggaggaacattcagatccaacacagataagaatgttgactccgtctccaggccgcagggactggagggaggcaggtggtctggcctcattttgtgaaaggtggtggctttgtcctcaatcttcaggctggacatcaggacctcccagggcgcgggcctgctctgtctctggccttaggtgtcaggaggtaaggccgcagacgctgacgtactgggatgccccaagcccgggaactggcagcccagtgagggggtctcacctgtgtcccctgagcctggcctgtcactctgtccacgcctcagctacctgtcccctcctgcaaagggcaccgcctgtcgcgaggaactcacctggcttcctcgacatctcgggggacacacgaaaagcccccgcgagagcagcaggagcctgcacgtggaaggggctggcggcccgaggtcccggggtaacaggagggcagaggggctgggcacggcgcagggtcgggaggaggcctggagcgctcgccccgcccggccccgcccctggagcgccgcggccccgccccgccgggttgctaggggaagtgacgtcacagcgcgatggcggcggctcctttaggcagctgaaaggggatttaggcccggaagatccgagtccatccgcggcggggagagggcaagcgggaccggtaggggccggagcagcggcggcggcgctcggactgtcccatccgccccgtattgaggcgctgggagcggcggggcgacaggaaagcgatggtgaaagcggggccgtgaggggggcggagccgggagccggacccgcagtagcggcagcagcggcgccgcctcccagagttcagacccaggaagcggccgggagggcaggagcgaatcgggccgccgccgccatggagctgagagtcgggaacaggtaccggctgggccggaagatcggcagcggctccttcggagacatctatctcggtgaggccccgccgcccccgcccgccgcccgaagacccgggccctgcggctgccaagaccaagcgcgatcgcggaaggaagtggtggcccccgcggggtctccgcgcaagtcccggcaccgccggatcgtggccagaacccaacggccactaggctagcgcggccaggggtggggagggcagtggggagcggacgtgggggaggggcaggaccaggtcgggggagcagggtctggagaggggagggttggggaaggaggggataggggagctgacccggggtggggcatggtctctggggagccgacctgggtaggggcagggtcgtggggagcggactcgggaagggctgggtggggcgtggggaggcgggcctgggggaggggcagggcgggggtgggggcagcgggccgtgggaggggagggggtagggctggggccgcgaagcgggcgtcggcttcctctacgcctaaggtcaccgcagtaaacaaaggccacgctctttcttccgcagcccggtccggggctgtctggctgccccctcagaggctgccccggtgtcttgcattcgtgggggaaaatgtcagaaagacccaaatgccgtgtggagcgggggagtggcccggctaggagtggggcttgccctcccgctgggggttctctctgaacggttccccttggccttggagcggtgactgagtgcaaatgagcaagggttaagtttaggtgaatgtagagaaagtcacacaggattaagatgctggcaagatgagaggcagatgaggtagttgtactcatgaggtgtcctttagactgtaacagtctcaaggtagatttcaaaaacaatgggattagaaggttttgggttgtgtcatatttacaatggaaaaatatgcacgtgaacacaagtgtgatgaaaggttggcttaaatcttca

SEQ ID NO: 2879 - DNA, 6000 bp, Homo sapiens
ctactgtaaaagtttgtgttttatagagtagttgtgagaactacattaatccataatgtgtggctcatgatactcattgatagatggtagtagcaacaataaaaaataatattatcaagtaactgattcataattgactctcaaaaacgttaattttctgctttcctttacctaagtttacctacatgtttgaatttgtaaagggaaggtttttctagaccaataattttcaaatatttttgctctcatacttcctcaaaggaaactgaaaaagttgcaacatacttgcatgtcatttttctatataagttgaaagaatagcaaattgttattttcccacgcatcgtaaagattagcaggtcatccctctttaaaatgtaccaaatggaatctaaatatcatcgcaatttgacccagcatcatccatttaaacaaatatacaagtttttctttaacaatgagaaattttatctcattacattttctccctaaactcttatttcaatctacattcctaagaattttatcctaatgtagtatatttttatgcttaaatatcttttgttgatcaacacaattttgatcatttttaaattttaaaaattaagaacatcctgtgacatcaaattctaggtatgaaatatttattctagattgggtgatcattataattattttttgtacataattgatcaaaataacataaatatactacaaatttctatgactactaaacatataaaagtaaaattttaaacaaatatatctcttaatgagaaggaagagctttttatactccaataagttaacgtatccactaataattattatttcttcctagaacaagacaggattaagcatcatgaccgtccctattgggggatgtttttatagatgcaagcactgtggcacctactggtataaatgcacctgctgattggaatgttctttccccagatcttcccctgctggtttcttcccagtattcaggtctcagctcaaatgtgacttcctcaatgaggcctcctggtgatcagatctaaagcaccctctacacaatcactgtttagtgctatacccattaatttactatcatcacacttgtcactatctgcagatgtcttgtttggttacttttgtagtgtttgtcactgccagaatatcagttctatgaagaaaagggccttgtctgtcttgctgtttgtagacatgaggaaggcaccatgatataaatgtgtgttaatgaatgaatgaatgaaatttgtctgagagaaccattcattctaaccaacatttatggagtaactactttgaaaagaaccattctgtctttactatcaagccaagatactcaaggaaggcagcagaagtggaagctccatgtgggcagaggagcctagtcttgagatgtgatttagctggtatttgggtgaaacaaataaaccagcctcaaaataacacaaggggccgggtgcagtggctcacgcctgtatcccagcactttgggaggctcgaggcaggcagattacttcaggtgaggagttcgagaccagcctggctaacatggtgaacctccatctctactaaaaatacaaaaactagctgggcatggtgatgggtgcctgtaatcccagttactcgggaggctgaggcaggagaattgcttgagcctgggaggcagaggttgcagtgagctgagattctgccactgcactccagcctgggtgacagagcgagactccgtcgaaaagaaaaaaagaaagaaagaaaaaaaacacacaaggatgtgcaactgatgcagggcaggtgagcccagaattgggcttagctcaggagggttcttggttttgctcaggaaagaatttaagagctacctggtagaagaaaagctctactgatatggcaacagctccctgagtgcccctgtagagcagagctaccctataggcagtgtgctgacagcagtagcttaaaggcaggtctgcagtgatatttataacctactttcaattacatgcaaattaaggggcagattatgcagaaatgtctagaaaaagggtggtaacttccggttgtcggctcactgccatggaaaggggcagtaagctctggatgttgccatgacaatcgtaaactgacatggcacactggtgggcacgtcttatggaaaactacttctgccccatccttgttttgactactcctcaatttggtcccatgtcagagccctgcctccagagtcaagccctgtctacctcacaattattatgtatcaggtttttaaaaaataacacaagtaaggctgggcatggtggctcacgcctttaatcccagcactttgggaggccgaggtgggcagatcacttcagatcagaagtctgagacaagcctgaccaacatggtgaaaccctgtctctcctaaaaatgcaaaaaaaaaaaaaaagaaaaaaaaattagctgggcatggtggcaggcgcctatagttccagctacttgggaggctgaggcagaattgcttgaacccatgcagcggagtttgcagtgagctgagcaccactgcactgcagcctgagggacagagcaagattccacctcaaaaaaaaaaaaaaaaaaaaaaaaggaaaaagaataacacaaggaaattaaacacagataacgtgcatctggataatctggaatattttcagcctgggatcttcctcgtgctcggaaacgtgtagggaaacgtgtagggacagttttcagctggtgtggggtgggggaatgccaacatatggttggctttccacagtcctgctaaagccctgcaatgtgcagaacaaaccggtccagctaagaaaagtcccacccaaaatgctgagagcacctctgtactcaatcaaccgttgaggtaaaaggatgcttgcaagtacaacacatgtatcagtgcattttaaactcattataaaatcgttctgtaaaccaaaaataaaattctacgcccagaaccatctgaaaagaccactcctctgggtcaaaggcattccaaatttaaccacaaaaactagttcaggccatgatgggaaggggagccagacatgcctcattattccctcctccgtttggaatttaggcacagctgaccagcattgacatcaacacaggcctcaagacaggtagaacacactctttaagtctgacaagaaacatttacaatctatctctctaaagcctgctacctggaggtttaatctgcatgatgaatccatggtctccacaaccccttatcttaacccagatattcctttctattcattcaaatcttttttttttttttccccatacggctctgtcacccagactggagtgcagtggcgctttctcagctactgcaagcaacctccgcctcctgggttcaagcgattctcctacctcagcctcctgagtacctggggttacaggcgtgtgccacctcgccccactaatttttgtattttcagtagagagggtttcactatgttggccaggatggtctcaatctcctgacctcgtgatctgcccgcctcgacctcccaagtgctgggattacaggcgtgagccaccgcgcccagccctctattgattccagatctttagataacaattctttcaaccaaatgtataaaaaatcaagttgtagcccaaccaccttggggacatgttctcaggatctgctgagggctctatcaccggccattggtcactcatatttggctcagaataaatttcttcagatattttacagagtttaactcttttcatcaacagttcccactccccagtgttaatgttataaacaattcagtaaaactgggaaatgtggtctattaaaaacttggggccgagtgcggtggctcacgcctgtaatcccagcactttgggaggccaatgtgggtggatcacctgaggtcaggagtttgagaccagcctggctaacatggcgaaaccccgtctctactaaacatgaaaaaaaaaaattagccgggcgtggtggcggcgcctgtagtcccagctacgcgagaggctgaggcagcagaattgcttgaacccaggaggcggaggttgcagtgagccgagatcgcaccattgcactccagcctgggtgagagagcgagactctgtctcaaaaaaaaaaaaaaaagaccgccagggctcaaacaaaaaacctcggaaaagccctggcggtcttttttttttttttttttttttttttgggacagtcttgctctgtcgcccaggctggagtacaatggtcggatcttggctcactgcaacctctgcctcccaggttcaagcaattcttctgcctcagcctcccaagtagccaccacgcccagctaatttttgtacttttagtagagacgggggtttcaccatgttgtccaggctggtcttgaactcctgacctcaggtgatccacccgcctcggccccccaaagtactaggattacaggcgtgagccaccgcgtccagcgccctggcggtttttaatcaagtagaaaagctgcattataccacttgcttcggttgcttcagtgagaacgaagaaatggaaatgcaaatcccttattagttgtaggaaacagatctcaaacagcagttttgttgacaagaccgcaggaaaacgtgggaactgtgctgctggcttagagaaggcgcggtcgaccagacggttcccaaagggcgcagtccttcccagccaccgcacctgcatccaggttcccgggtttcctaagactctcagctgtggccctgggctccgttctgtgccacacccgtggctcctgcgtttccccctggcgcacgctctctagagcgggggccgccgcgaccccgccgagcaggaagaggcggagcgcgggacggccgcgggaaaaggcgcgcggaaggggtcctgccaccgcgccacttggcctgcctccgtcccgccgcgccacttggcctgcctccgtcccgccgcgccacttcgcctgcctccgtcccccgcccgccgcgccatgcctgtggccggctcggagctgccgcgccggcccttgccccccgccgcacaggagcgggacgccgagccgcgtccgccgcacggggagctgcagtacctggggcagatccaacacatcctccgctgcggcgtcaggaaggacgaccgcacgggcaccggcaccctgtcggtattcggcatgcaggcgcgctacagcctgagaggtgacgccgcgggcccctgcgggacgggtggcgggaaggagggaggcgcggctggggagagcgctcgggagctgccgggcgctgcggaccccgtttagtcctaacctcaatcctgcgagggaggggacgcatcgtcctcctcgccttacagacgccgaaacggagggtcccattagggacgtgactggcgcgggcaacacacacagcagcgacagccgggaggtaagccgcgtcccagcggctccgcggccgggctcgcagtcgccccagtgatgccgtggcccccgaggcgggcgtcatcgggcagcgtttgcccagtgctggagggttagggagagctgcctgggcttgaccgcgcgccggtctcaaagtcctggctttggcccctcctccgttttcccctgtggaccattccgcttcgcagcgttttcaaaaactggagcgaaagtgatgtgggcggggcaaaggcggcgggaagaggagagcactgaagctggcgcgggaacttggtttcctggtggcctcccatccaatccccacgaaccagctttcctcttaaaccttgaaaagagaaattcgggagttcgagtataagttcttagtcgtcctttcctctttcctttccgacaggagcaccccaggcaaaaaatgtctcgcgggtcattggcgccaggctttcaggggacagtggggcggggcggggtgggcacaggacgttaggcagccgttggccctccctaaggccacaccgtcctgccgtcctggatcctgcgccagctg

SEQ ID NO: 2880 - DNA, 6000 bp, Homo sapiens
acttttatactgttggtgggactgtaaactagttcaaccattgtggaagtcagtgtggcgattcctcagggatctagaactagaaataccatttgacccagccctcccattactgggtatatacccaaaggactattaaatcatgctgctataaagacacatgcacacgtatgtttattgtggcactattcacaatagcaaagacttggaaccaacccaaatgtccaacaatgatagactggattaagaaaatgtggcacatatacaccatggaatactatgcagccataaaaaatgatgagttcatgtcctttgtagggacgtggatgaaattggaaatcatcattctcagtaaactatcgcaagaacaaaaaaccaaacactgcatattctcactcataggtgggaattgaacaacgagaacatatggacacaggaaggggaacatcacactctggggactgttgtggggtgggaggaggggggagggatagcattgggagatatacctgatgctagatcatgagttagtgggtgcagcgcaccagcatggcacatgtatacatatgtaactaacctgcacattgtgcacatgtaccctaaaacttaaagtataataattaaaaaaaaaaaaaaaaaagagtgtgaaacggccttcatgaggcttaattgtggcttaacctggcaccacccctcacaaggtcaaagctatacatcagctcctgtgacattgactcatcccccagaccttatctaaaacaacggagcaaacacatgctaggaagggcacccgggaaatggaaggcattgttctatctcctcacctgattccatatctctgtattctgccccaaaatgcctccactggaagccataaactgggcccaagtccccttcttctctggtggagaatcccaggctgtccaaaaagtctcgggatccattggcatcccagattttcactcccttggaagacagctctttagcatttgtggatccctggaagagatggggagagcagagcaggcatccaggtaaatcctaagccatctcagttgatccccccgagacaccacttacaagggcctctggcccctgctgacttgctaggaggtgggcacttgacaccacccatatggaacccatccttttttttgttttttgagagtttcgctcttgttgcccaggctggagtgcaatggcgcgatcgtggctcacggcaccctccacctcccaggttcaagcgattcccctgcctcagcctcccgagtagctgggattacaggcatgcgccactacacccagctaattttgtatttttagtagagacagtgtttctccatgttggtcaggctggcctcgaactcctgacctcaggtgatccgcccacttcggcctcccgaagtgctgggattacaggcgtgagccaccacacccagctgcccatcctatctttaagtaggctggtcccagcccagattcctgagggctttaggacagtctgatcccttctttggaaccaccctcccagatcttttcttccattcccctcaactaagctttttaggctaaacacctccaagtgcttttaagtattccaccgatctgacagttttatgtttcttaatgaaatgtgttgtctatatgtaataccccaaaatgaatttaatgcctacatgcaatctgttcaatgtatcttctacctggcatacaggatattcctaatgatcagactaatcagtattttacagtgcaggtgcctcaactcctgtatttgatcgagtcaccaatggagtaactccaactatcaaggtgagtctgacattcctggcaaggattccttagaatcctgaattgaagcattaagttgaaacaggggaatgcattttatttctgagtatcttgcttcctccctttctattgttgagtttgtcccgattttctttgattgagaaagaatcaaagaaatttccaacaaatcaaagaaatttctccaattgagaaatttccaacaaatcatttctcaatcttttacatattgcttcaaaagtctctccttttcatccattcagaccaggctctagccagtttaagaatgttgtcttctgaggtttctgatgatatgtttcaaatccaaggttcattgttagtcaagataggccaatacagaacaaaataccccaagaatacagagctaaggcagacctggggctggatccaaattgaagccctttctaaaatgggataagagggcttgggtctggcttgccccaagaccatacaagccataccaagtgctctatagaagggatcccagcttctagtatggcccagacctgagcccagacctcagccaccttccaaaaagcactggtcagaaagaacatcgctggttctagaccaggacacggaacacagagaagcttggtctgggctgctgcctgtcttcacagcactctggccccggcctgaggtacctactcagccctctggaaggggttcaccttgttactgaagagactcttctagaatttatatgaacatgggaacacaggtggtatctacatttagtgatcaatatatgttgactcctactatgtggcaggctgtgtttgaggccctggcgatacaacagtgaacacgagaaacaaatcctctgccctcataaagcttacagcacatttcacttttactacctgctgtcccccttctaacaggggaagggaaaggctgacatacatcagatggtgatgttcgtctatggagaaacaccaaggaggttgggggagagtcacagttttaaatcaggaggtctaggaaggcttgcccgagtggagtagagactcaaaggaagaagccaagtgtgggggaagaaggttccagggagtggggatgtcccggtgtgctcaaaaactcacaagaacagcagggctggtgcagagagcagcagctaaggtcagagctgaaaaacggacaccataaggaccgtggctcttactgagtgaaatggagccactaagggcttgagggtgaggaatgatatgctttgacctttggtggtgtctttttttgtttttgacatgggttctccctctgtcgcccaggctggagtacagtgccacgatctcagctcactacaacctccgcctcgtgagcaattctcatgcctcagcctcctgagtagctaggattacagacatgcaccagcacacctggctaattttttgtgttattagtagagactggggtgtcgccatgttggccaggctggtctcaaattcctaacctcaggtgatctgactcagcctcccaaagtggtgggattacaggcgtgagccaccacacctggctgctttgagttttgaaaggatctcactggctgctgtgttgagaacagactactgacttctaatagcagcgacttctttaccttgataaaccacagcaactcctccaaaacacccttccagaacacacgtttggttgtcagcagagggaattcatctgaaaaacaatttgccatacggtttcaagatgggaagacagatcatgccatccaactttcttcagggaagaaaactgccctgggacgtgaggccctggagcatccagaaagcctagactcccgcaaagtgggccagagatcacggtggagctcccaggctgcaagtcccatcagtggcccgattcaggctgagacagcacttctgtgccccggtgaccagtggacacaggaattccacacagtgagatggtggcgagggcagggatgaacatgtggcaaaagggaggagctatcatccactgcccactagtgctaatcctgtcacaaaggtgtgaagacaacaccaagcatgtgtcccaggaacaaaaagggaggcatcagaagtgtcgagccacagagaaatgaaagtgtaaaaacttatctttaaatgcagtcctcgttcatccgcactcgcttgtggtacagtttatattcagacaacagagagatttttgcaagcacctgcttttatcagaattgcctactaagcattattttctccatttttaacatatagggaagctatatgagaagtaacttgctcaatgtctaagcagaaaggtgggttaaaaatgaggtctatggctcatcaaaggcccctgggcttggagctgcagaaaagtggatccctctcctcagacaaaactccccacgctgtcccacgccaatcagccacagcagctgctatgtattcgtctctagatgggtccgtgggccggagggcttttccgctagctacagtgaatctgcttcaccacgaatgggtttccccattcaaaaccacctccacccctgtgtcaaggctgcgctccatttatctgagcggtcaaggtcagcccctggctcacacaccttcgagtcccctcccccgcgcagctggcgcaggatccaggacggcaggacggtgtggccttagggagggccaacggctgcctaacgtcctgtgcccaccccgccccgccccactgtcccctgaaagcctggcgccaatgacccgcgagacattttttgcctggggtgctcctgtcggaaaggaaagaggaaaggacgactaagaacttatactcgaactcccgaatttctcttttcaaggtttaagaggaaagctggttcgtggggattggatgggaggccaccaggaaaccaagttcccgcgccagcttcagtgctctcctcttcccgccgcctttgccccgcccacatcactttcgctccagtttttgaaaacgctgcgaagcggaatggtccacaggggaaaacggaggaggggccaaagccaggactttgagaccggcgcgcggtcaagcccaggcagctctccctaaccctccagcactgggcaaacgctgcccgatgacgcccgcctcgggggccacggcatcactggggcgactgcgagcccggccgcggagccgctgggacgcggcttacctcccggctgtcgctgctgtgtgtgttgcccgcgccagtcacgtccctaatgggaccctccgtttcggcgtctgtaaggcgaggaggacgatgcgtcccctccctcgcaggattgaggttaggactaaacggggtccgcagcgcccggcagctcccgagcgctctccccagccgcgcctccctccttcccgccacccgtcccgcaggggcccgcggcgtcacctctcaggctgtagcgcgcctgcatgccgaataccgacagggtgccggtgcccgtgcggtcgtccttcctgacgccgcagcggaggatgtgttggatctgccccaggtactgcagctccccgtgcggcggacgcggctcggcgtcccgctcctgtgcggcggggggcaagggccggcgcggcagctccgagccggccacaggcatggcgcggcgggcgggggacggaggcaggcgaagtggcgcggcgggacggaggcaggccaagtggcgcggcgggacggaggcaggccaagtggcgcggtggcaggaccccttccgcgcgccttttcccgcggccgtcccgcgctccgcctcttcctgctcggcggggtcgcggcggcccccgctctagagagcgtgcgccagggggaaacgcaggagccacgggtgtggcacagaacggagcccagggccacagctgagagtcttaggaaacccgggaacctggatgcaggtgcggtggctgggaaggactgcgccctttgggaaccgtctggtcgaccgcgccttctctaagccagcagcacagttcccacgttttcctgcggtcttgtcaacaaaactgctgtttgagatctgtttcctacaactaataagggatttgcatttccatttcttcgttctcactgaagcaaccgaagcaagtggtataatgcagcttttctacttgattaaaaaccgccagggcgctggacgcggtggctcacgcctgtaatcctagtactttggggggccgaggcgggtggatcacctgaggtcagga

SEQ ID NO: 2881 - DNA, 6000 bp, Homo sapiens
ggcagacctcctggtcaggcttcaaatcccaccttccacacctgttcctgggagatgaagtttgtacccatggtcatctgtccctctgccactccattcagatgtgtccacgtctccatggcccctccatccaagagaaagcaacacacatgtgcaaccaggaaacatacaaaagtgccttgcagccttgtggatccttaccggccagatagccatgggctgtggaatggaacataaatatcacacaatgcagttttccttggcagcaaaaatgagcaaacaaataacatacataataaaatgaataatttcacaggcacaatgaagagtgaacaaaaccaggcacaaatgagaacaccctgcgtgattctatttatacaaagttcaagaatacgcaaaatgaacctgttgtaatggaaggcaaaacagtgtgatctcccaatgagataccatctcacaccagttagaatggcaatcattaaaaagtcaggaaacaacaggtgctggagaggatgtggagaaataggaacacttttacactgttggtgggactgtaaactagttcaaccattgtggaagtcagtgtggtgattcctcagggatctagaactagaaataccatttgacccagccatcccattactgggatatacccaaaggattataaatcatgctgctataaagacacatgtacacgtatgtttattgcagcactaattcacaatagcaaagacttggaaccaacccaaatgtccaacaatgatagactggattaagaaaatgtggcacatatacaccatggaatactaagccataaaaaatgatgagctcatgtcctttgtagggagggacatggatgaaattggaaatcatcattctcagtaaactatcgcaaggacaaaaaccaaacaccgcatgttctcactcataggtgggaattgaacaatgagaacacatggacacaggaaggggaacatcacactctggggactgtggtggggtggggggaggggggagggatagcattaggagatatacctaatgctaaatgacgagttaatgggtgcagcacaccagcatggcacatgtatacatatgtaactaacctgcacattgtgcacaggtaccctaaaacttaaagtataataataataaaataaaataaaataaacagtgtgatctccagtgtggggtgggtggtacggccttgaaggggcaaagggagcctaatgggcactgcaaatattctgtcttgatccaagcagtttatgaacataaacattcacacaaagatctgtgcattttcgcagatgcacattattctgcagtacaattgttcttaattttttaaagcccagcatgaaccaactggtagcccaagggcaaggagcagcccgtggggcagcctcctgagcacagggctggacagagagggcgggggaatggacctggtggagagctaaccagtgagatgctcagaaaatgcttgctgagtgggacagcaatcatttacaccttagtataaataactatagaaagttttttcaaacagggaggctggaagctatacggaaataggaggacacttggctttggcaaatagcagagcaaattgaaataaattatttgccttactgaccattctgctgaagatgccctggctatgtgtttaacggtgtttggattagtcctcttccagtgcttgatggttcacaatgtatttcaaaagcattacctcactcgactctcactgcaccccactgaaacttggtaaaaagtgcatgtcatcagggatcagtaggaataaagaaactgaagctcaaaaaggaaagttcccacagtgacagaatttgaaagtagcaaggccaaagttcagggatgattgtttcctccaccaaaaaaaaacaaaaacagaaattggattagaaactggagtttctttgaaccctaagcaccgatgtttataacgtattgcggtaagtgggaatcaatttctgtttcaggcacgcgctcttggctaggagtagggagtggagccgttcattgctgtcgtggtcagtcccactcacgctgctggagctgaccaggccggcccttccctcatggcatttgagtctcacacaccctgtgagacagacaggccgctgccctgtgacagatgaagatctgaggcttggggtagttatgtgactggcccaaggtcacccagctagaggaggcaaaaccaggctaggaacctaggtctctgcactccagagcatgggctgtgcccagcacatgctgagactcggggagtggggaggcatccatactttggagaaagagcagagcccactgtggcatcaccccacagatactgctgggagccgagggaaggcaatgctgaggtccctccctgagggtgtgggtgtcaggtggagcccactgttcacagctgcacaggctctgtgacaacaaacatttggtgaattgaactaaaaagctgggttcccaatcctggttgcccgggcacagagtagttgttgaacatggatgaatgaaacctgtcgagtgagagtggaatgaatttgtgtgctggagacgagaatatgctggaaggctgggcatgactcgcactgttgtcttctccatcatctgttgggtttgcagccaagtcccctggagctcagtctgccctctgccctctcccacctctccccaccaccctcctagcgcagcactccaggattcccactcagcagcagggcagtgaccgacttttactcccagcctgaagatctgcatgagaaccaatgcacaccagggctatgctgcctccgtgaccaaggggtccccagggcctggtctcaccaccatctccgcttccaccacagacttgctcccgtccaggattcctcatctctccagtctcccaagctcaaaaccccagggtgatctcctgctgggtcccttctgccatcgccatggcctggaaatgtttgctagtccccaccccacccccatgtccacactcagtgcccaggtctttatttttattttgttagaagtgataatgtcactatggttatgtatgagatcatgtccttgtttctccagagatgcaagctaaaggatttaatttggaagggttcaaattcaaatataaagaacaaagaaatatgtcaaaatgttaacagtggttgaatccaggggctgggtgtaagtgtgctcattgtactgttctctcttatctatctatctatctatctatctatctatctatctatctatcttatatatagatagatagatatatacacacaaacagatttttttctttctttagagagaaagtctcactctgttgcccatattggagtgcagtgacatgatcacagctcactgcaacctcaaactcctgggctcaggtgatcctccctcctcagcctcctgagtagctagcactacaggtgctcgccgtcatgcttggctaattatcgttatttttgtgtagagatagtagtctcacagtgttacccaggctggtctcaaattcctggcttcaagccatcctcctgttttggcctcccaaagtactgggattacagatgtaagccagtaccctcagccctgttctttctatgtatctctatatttgaactttttcacaataaaaaggttagaggtaagttgacctgaattgattggacccattttctcatccatcacattggggctgtgagtgggaggggcagtgaatgacctcctaaagctgtgtccgctcagtgcctctgggggaagctgccccctgtgagcctggagctgggtgttcccagcaggcggagtccttgactctggaaggcaattgcctttggcttcaacagtcctgcaagtcacaaggcttgttgaccacggtgaccctttctgagagccagcggaggaagagggcgggcatagggtcaggtcttaagagatcaggtcagtctgctcaaaccaggtgggctcaggaggagccggcgagggtcccgctgcagctcccgaaacgctgtttccaggcggcagtcagcagttgggcacgagaggatatcctagcaagcctccatcccagaaagttacacctcttactgcccgagtcccacccctcaacactgagcccacctcttcagtcctgtagtgaggggttctgggaaccccttgtaactgcccgccttcctcggaggtctcagaggccctaattgcgtcttccgatgggaacaaccatgagagcagggtgtggacggaagtcccccagccccagcggggttcactctttgcctcctcactctgcgagggtcccttactacagctaaaaggcaattcatgcagtccaaaggctcctttcccctcccgttctgcatgcccttctcactgtccccaaatgctcatgacatggccttgagagcagcgcagcgggcaggaagcccaggcgcctcggagaacctgaagggctgcaggtcccggtgtctgcggcagcttccgcatccctgcagggaaccagcggctcgctgagcctggggctgggctctgggggactccagagctggaggcaagtggcgctcacatccgtctcctcacctgccccacccgtggcctgggtttaaaatccacatacccgtctttccgcggccaaagtgatgctgccaggattggttatgaccccaactgccccgacccccagaagtgcaaaacgaacaggctggcaagtgaccaaaagagacccggggagcatctgggcttccaaggtcctcggtacggcccaaggcagcgaaggacgcgcggctccaggctgcgggagccaggacgaccgggggctcccagagcgcgaagtcgcgatcctcggcggtggagagctcgtgccaaaacgtcctcccctgcgccagtcaggccttcgcggggctggcaggcgggcgggggcggggccgccgcactttaagaggctgtgcaggcagacagacctccaggcccgctaggggatccgcgccatggaggccgcccgggactatgcaggagccctcatcaggcgagtgccccgcgtccccctgattgccgtgcgcttccaatcgccttgcgttcggtggcctcatattcccctgtgcgcctctagtaccgtaccccgctcccttcagccccctgctccccgcattctcttgcgctccgcgaccccgcgcacacacccatccgccccactggtgcccaagccgtccagccgcgcccgcgggcagagcccaatcccgtcccgcgcctcctcaccctcttgcagctgggcacaggtaccaggtgtggctcttgcgaggtgcgcgggcgtctgcaaaccaggtgacagctggcgagtggctgcatgcatctctggccgctgctgcagtcgcgggcgcagaagagggtccggtcccaggaaccccgagcaaagcttccgcgatgcgaggggaccgggcttctgggggtcctggaaatcacaacgggagctgggcgcgggaggggcccaggcttggcccctcctggaagcgcgggctctggtctccgaggggaggccccaaccgtccggcggagccctccaggttggtggtgctgggagaagcgctcctccttgcctccgggtccaagggcggagacgctgcctggggagcaggggggacaaggggcgggtggaccctgaggagtcttccctgcgcttcgcacccgctcgtggtcgaacaggcagcattggctattttcctgcttgggttaatattcatatcccaacagacccaagccaattcttggtaaaatcctaagtcattgcgtggcagcaactgtaaagtaaggtctaagagggagatcgtgtttctctgaagatcaagtacctggaaaaggatagagaaccatttgcgggcttgaaggtgcaggcgttcagcggcgccgggtcccactgtgtgtgctacgtgtggcgggcagagagactacatgtgtgaaagggagcggtccggctacgaaacgcaatctatg

SEQ ID NO: 2882 - DNA, 6000 bp, Homo sapiens
ctgttgtaatggaaggcaaaacagtgtgatctcccaatgagataccatctcacaccagttagaatggcaatcattaaaaagtcaggaaacaacaggtgctggagaggatgtggagaaataggaacacttttacactgttggtgggactgtaaactagttcaaccattgtggaagtcagtgtggtgattcctcagggatctagaactagaaataccatttgacccagccatcccattactgggatatacccaaaggattataaatcatgctgctataaagacacatgtacacgtatgtttattgcagcactaattcacaatagcaaagacttggaaccaacccaaatgtccaacaatgatagactggattaagaaaatgtggcacatatacaccatggaatactaagccataaaaaatgatgagctcatgtcctttgtagggagggacatggatgaaattggaaatcatcattctcagtaaactatcgcaaggacaaaaaccaaacaccgcatgttctcactcataggtgggaattgaacaatgagaacacatggacacaggaaggggaacatcacactctggggactgtggtggggtggggggaggggggagggatagcattaggagatatacctaatgctaaatgacgagttaatgggtgcagcacaccagcatggcacatgtatacatatgtaactaacctgcacattgtgcacaggtaccctaaaacttaaagtataataataataaaataaaataaaataaacagtgtgatctccagtgtggggtgggtggtacggccttgaaggggcaaagggagcctaatgggcactgcaaatattctgtcttgatccaagcagtttatgaacataaacattcacacaaagatctgtgcattttcgcagatgcacattattctgcagtacaattgttcttaattttttaaagcccagcatgaaccaactggtagcccaagggcaaggagcagcccgtggggcagcctcctgagcacagggctggacagagagggcgggggaatggacctggtggagagctaaccagtgagatgctcagaaaatgcttgctgagtgggacagcaatcatttacaccttagtataaataactatagaaagttttttcaaacagggaggctggaagctatacggaaataggaggacacttggctttggcaaatagcagagcaaattgaaataaattatttgccttactgaccattctgctgaagatgccctggctatgtgtttaacggtgtttggattagtcctcttccagtgcttgatggttcacaatgtatttcaaaagcattacctcactcgactctcactgcaccccactgaaacttggtaaaaagtgcatgtcatcagggatcagtaggaataaagaaactgaagctcaaaaaggaaagttcccacagtgacagaatttgaaagtagcaaggccaaagttcagggatgattgtttcctccaccaaaaaaaaacaaaaacagaaattggattagaaactggagtttctttgaaccctaagcaccgatgtttataacgtattgcggtaagtgggaatcaatttctgtttcaggcacgcgctcttggctaggagtagggagtggagccgttcattgctgtcgtggtcagtcccactcacgctgctggagctgaccaggccggcccttccctcatggcatttgagtctcacacaccctgtgagacagacaggccgctgccctgtgacagatgaagatctgaggcttggggtagttatgtgactggcccaaggtcacccagctagaggaggcaaaaccaggctaggaacctaggtctctgcactccagagcatgggctgtgcccagcacatgctgagactcggggagtggggaggcatccatactttggagaaagagcagagcccactgtggcatcaccccacagatactgctgggagccgagggaaggcaatgctgaggtccctccctgagggtgtgggtgtcaggtggagcccactgttcacagctgcacaggctctgtgacaacaaacatttggtgaattgaactaaaaagctgggttcccaatcctggttgcccgggcacagagtagttgttgaacatggatgaatgaaacctgtcgagtgagagtggaatgaatttgtgtgctggagacgagaatatgctggaaggctgggcatgactcgcactgttgtcttctccatcatctgttgggtttgcagccaagtcccctggagctcagtctgccctctgccctctcccacctctccccaccaccctcctagcgcagcactccaggattcccactcagcagcagggcagtgaccgacttttactcccagcctgaagatctgcatgagaaccaatgcacaccagggctatgctgcctccgtgaccaaggggtccccagggcctggtctcaccaccatctccgcttccaccacagacttgctcccgtccaggattcctcatctctccagtctcccaagctcaaaaccccagggtgatctcctgctgggtcccttctgccatcgccatggcctggaaatgtttgctagtccccaccccacccccatgtccacactcagtgcccaggtctttatttttattttgttagaagtgataatgtcactatggttatgtatgagatcatgtccttgtttctccagagatgcaagctaaaggatttaatttggaagggttcaaattcaaatataaagaacaaagaaatatgtcaaaatgttaacagtggttgaatccaggggctgggtgtaagtgtgctcattgtactgttctctcttatctatctatctatctatctatctatctatctatctatctatcttatatatagatagatagatatatacacacaaacagatttttttctttctttagagagaaagtctcactctgttgcccatattggagtgcagtgacatgatcacagctcactgcaacctcaaactcctgggctcaggtgatcctccctcctcagcctcctgagtagctagcactacaggtgctcgccgtcatgcttggctaattatcgttatttttgtgtagagatagtagtctcacagtgttacccaggctggtctcaaattcctggcttcaagccatcctcctgttttggcctcccaaagtactgggattacagatgtaagccagtaccctcagccctgttctttctatgtatctctatatttgaactttttcacaataaaaaggttagaggtaagttgacctgaattgattggacccattttctcatccatcacattggggctgtgagtgggaggggcagtgaatgacctcctaaagctgtgtccgctcagtgcctctgggggaagctgccccctgtgagcctggagctgggtgttcccagcaggcggagtccttgactctggaaggcaattgcctttggcttcaacagtcctgcaagtcacaaggcttgttgaccacggtgaccctttctgagagccagcggaggaagagggcgggcatagggtcaggtcttaagagatcaggtcagtctgctcaaaccaggtgggctcaggaggagccggcgagggtcccgctgcagctcccgaaacgctgtttccaggcggcagtcagcagttgggcacgagaggatatcctagcaagcctccatcccagaaagttacacctcttactgcccgagtcccacccctcaacactgagcccacctcttcagtcctgtagtgaggggttctgggaaccccttgtaactgcccgccttcctcggaggtctcagaggccctaattgcgtcttccgatgggaacaaccatgagagcagggtgtggacggaagtcccccagccccagcggggttcactctttgcctcctcactctgcgagggtcccttactacagctaaaaggcaattcatgcagtccaaaggctcctttcccctcccgttctgcatgcccttctcactgtccccaaatgctcatgacatggccttgagagcagcgcagcgggcaggaagcccaggcgcctcggagaacctgaagggctgcaggtcccggtgtctgcggcagcttccgcatccctgcagggaaccagcggctcgctgagcctggggctgggctctgggggactccagagctggaggcaagtggcgctcacatccgtctcctcacctgccccacccgtggcctgggtttaaaatccacatacccgtctttccgcggccaaagtgatgctgccaggattggttatgaccccaactgccccgacccccagaagtgcaaaacgaacaggctggcaagtgaccaaaagagacccggggagcatctgggcttccaaggtcctcggtacggcccaaggcagcgaaggacgcgcggctccaggctgcgggagccaggacgaccgggggctcccagagcgcgaagtcgcgatcctcggcggtggagagctcgtgccaaaacgtcctcccctgcgccagtcaggccttcgcggggctggcaggcgggcgggggcggggccgccgcactttaagaggctgtgcaggcagacagacctccaggcccgctaggggatccgcgccatggaggccgcccgggactatgcaggagccctcatcaggcgagtgccccgcgtccccctgattgccgtgcgcttccaatcgccttgcgttcggtggcctcatattcccctgtgcgcctctagtaccgtaccccgctcccttcagccccctgctccccgcattctcttgcgctccgcgaccccgcgcacacacccatccgccccactggtgcccaagccgtccagccgcgcccgcgggcagagcccaatcccgtcccgcgcctcctcaccctcttgcagctgggcacaggtaccaggtgtggctcttgcgaggtgcgcgggcgtctgcaaaccaggtgacagctggcgagtggctgcatgcatctctggccgctgctgcagtcgcgggcgcagaagagggtccggtcccaggaaccccgagcaaagcttccgcgatgcgaggggaccgggcttctgggggtcctggaaatcacaacgggagctgggcgcgggaggggcccaggcttggcccctcctggaagcgcgggctctggtctccgaggggaggccccaaccgtccggcggagccctccaggttggtggtgctgggagaagcgctcctccttgcctccgggtccaagggcggagacgctgcctggggagcaggggggacaaggggcgggtggaccctgaggagtcttccctgcgcttcgcacccgctcgtggtcgaacaggcagcattggctattttcctgcttgggttaatattcatatcccaacagacccaagccaattcttggtaaaatcctaagtcattgcgtggcagcaactgtaaagtaaggtctaagagggagatcgtgtttctctgaagatcaagtacctggaaaaggatagagaaccatttgcgggcttgaaggtgcaggcgttcagcggcgccgggtcccactgtgtgtgctacgtgtggcgggcagagagactacatgtgtgaaagggagcggtccggctacgaaacgcaatctatgagcttccaatcccgggttcttaaatgggagctgttgtagacactgcaggttagaagcatctttctctttaaaaataagcccacagtacaagtcggggcggtggcagggggacgctgagaaacacctgcttcgtgtatggtcattaacacgcttaggcctaaaggtcagggccctgtatcttttgcgttcttccagaaccatccacaccacagtcccacttccaggaggggaggtcttagcagtttggaatgcgtccttccaaccacttttccagtgaattcacaacacacccactgttcctccggagcatgggggaaggaggtgtgggctgactcgcactaaccaatcctggttggcctctgagcaggattcaggctgagcctgtccctgcctctgactattata

SEQ ID NO: 2883 - DNA, 6000 bp, Homo sapiens
tcaagtgattctgctgcctcagcctcctgagtagctggtattatgggccatgcccagctaatttttggatttatagtagagatggggtttcactgtgttggcaaggctggtcctgaactcctgacctcaagtgatcagcccaccttggcctcccaaagtgctgggattgtaggtgtgagccaccacgccaagccgtggatatttttcttaaatttcttttccagcaaatgcataccatttgttttttagtatcagaatgtaaattcccacagtgagaagcaactaaataatacttattttcatcttttatacccttttttcttttcttttcttttcttttgtgtgtgtgtgtgtttctttttttttttgagacagagtctcactctgttgcccaggctggagtgcagtggtacaatcacagctcactgcagcctcaacctcccaggctcaagcattcctcccacctcagcctccctagtagttgggattacagccatgtcccaccaggcctggttaatttttttttttattacttttttttagagacgaagtctcactatgctggtctgaaactcctgggctcaagccattctcctgccttggcctcacaaagtgttgggattacaggcatgagccaccaaacctggtcctatctataattaaaagcacgtaactgaagaccaattcttcattacaactggagaccctaatctgaagaggctagttgggagcaaggtggtgtagacactactggtatcccaaccacggaccaattgacactttgggatgaataattctttgtcataaaggtttgtctttgcactgcaggatgttcagcaatatccctggcccctacccattagatgccagtagcacagagctccaacacagagatgtgaccacctaaaatatctccagacactgccaaatattcactagggaacaaaatcagcttgcttgagaacgattgcgttaggccaaagacctcacaaaatcaaatcctctgtgcctttgccaattcaaattgctcctttaactccatggtcaactctacccacttagccacccaccaacataaaatacagacacaaacaccctcacattcttcatatgaaataccttgaacattgtctagtgttcttcctctgagccatatgtggccaatttggctaagaggagagaagtaaccactgatgcctatttcctaccctccactgacatgggagttcatgcttatccttttaaatgtatttaagttcataatgtgctgactttctttctttgtttctttttggagatggagtctcgctctgttgcccaggctggagtgcagtggcataatcatacatgactgaagcttcaaactcctggcttcaagcaatcctcctgcctcagcctcctgagtagctgggattacagatgtgagccaccgtgttggcatgtcttgacttctgaagctctaaaatgcctccagcttctttatccactagccacgctctgtaaatccatgctcctccataaattttgtttgaccataatattatttaattaactatgtctattctgccttgaaattgttttcttcatttggcacttaaatatacagttatgacccaagctcaagacagctatttcctgaagttattctagattagatcctattaattaaaactgggagtagggatttttagaatcaaaccccaaaatccttttttcctaaaacattccaaaacaatgagacacgttagcttatataaattttattttcgtgcctcttaatacctttgagggatgtttattctccccactaccagccgtctggtgtttgaagcagtgaggaaaatggtcagagctaattgatttcctatatggagaaaacattattaatgaattcttcactgtggaaaattctgaaaagtggatctgccattactagattcatagccttgagcaagcatgttaatctctcctaggctatttcatctttggtaaaatgaggatgctgacatctaccctctagggctattatattgaatgaaatgacctgtttcaagcttttagccctgtgcttgatatacaggtgttttatgagtgtcctttttagtgctgcttctcttctttatttccagcacttgctaaatactttctggggtccagggcaaaatgaaaatatggggcttccttgttaaaaaattaagaatttcaagacaagagcagaatatgaaatcaagtgttgagccctatgtgactgcctacgtcacatactcatcaagccagccctgcttgctcccctaggatttccaagggtctacttttctatcctttcacgaaattaaaagccactcttcaaattaaacaacggatggggaaataaatgcaactaactaaagagggcttgattacgtgcattgttttttaacactgtctcacttaagcaacatgttgaatgttagtgagcctagggctcttctagagagaccgttttcatctgccatagtattttagtgtttatatcattttctatctggaagaatgaaaagaaaaacaaactttggttgtctattagtaatcagaccactgaatgttgtccaagaagcacttagtggacaaagagacactcaattcaaaagctctctatgtaggctgggtcgcggtggctcatgcctgtagtcctaacactttgggaggccaaggcgggcggatcacttgaggtcaggagttggaaaccagcctggccaacatggtgaaaccctgtctctactgaaaatacaaaaattagctgggtatggtggcacacgcctgtaatcacagctactcaggtggctgaggcaggagaattgtttgaacccaggaggcagaggttgcagtgagcccagatcgcaccactgcactccaacctgggagacagactgagactctgtctcaaaataaataaataaataactaaataaaatgaaaaaccaccaaacaactatctagacttatcaaacagctttcacaaagatagcagcctagctctctgaacaggtaatttataacctagatagcagactttgaaagaactggtccagacatctaagaattaaatatgcaaagaggaagattttgtttccaaaccactgagacccagctctgcttgttattcccttttcttcatggatgcatcaacatatcctttaaagcaggggtccccagtccccaggccatggaccagaaccagtccctggcctgttaagaaccatgccgcatagcaggaggtgagtagcgggcccgggagtgcagcttcatctgtattcacagccactctccactactggcatgactgcctgagcactgcttcttgtcagatcagcagcggcattagattctcacaggagcctgaacgctactgtgaactcgcatgcgagggatctaggttgcatgcttcttatgagaatctaatgcctgatgatctatcactatctcccatcaccccagatgggacagtctagttgcaggaaaacacgctcagggctcccactgattctacctcattatctattaaaatgtaataataatagaaataaagtgcacaacaaatgtaacgcacttggatcatcccaaaaccatccccctcccttctgtctgtggaaaaattgtcttccatgaaaccagcccctggtgccaaaaaggttgggaatggctgctttaaagggtttctcaaggttctaatattttatttgataagaagtagaatcatataaaaaaccaaacatatgtgttaatttgggtatttatacagatatagtgtatatacatacatacaggcatggaggaatttccaaatttcctctattgtaaaacatacacatacacacaccaacacacacatgcacacatggtatcctaatagaaggcaaggagaatagacatttactgagcacttcctatgtgccacatgttttatatacattaggatattacagtatatggtagcttttatccattcattcaatctcaatacttttttttttttttaagagtagagcaactgaggctcacagcagttatgtaacctgcccaaagtcacacagcatgatggagggtctggattggagattttgtctgactacaacactcatgtatcaaatcctattcagttttgatgttaaaaattctgtggttgaattcgtcacagtgtctttaaataaaacaacaacaaacaaaacacagcaaaccttaacatagttgctaatcatatgagtttacaaggccacctgtgtctttactatcagttacactccttcccaccccatcacattaatcactcaggtctagggatttgcaagtttgctaacagccgaatggaacaaagacaaaacgctaaaatttgtgatgtgggcctaactccaaagccttcaagaaaaaaaaaaaaaggccaggcgcagtggctcatgcctgtgatctcaacactttgggaggcctaggagggtggatcacctgaggacaggagttcgaaaccagcctgaccaacatggtgaaacctcgtctctactaaatacaaaaaaattagctgggcgtgatggcgcatgcctgttaatcccagctacttgggaggctgaggcaggagaatcgcttgaatccgggaggcagaggttgcagtgagccggtattgcgtcactgttgcccactccagcctgagcaacaagaacgaaactccgtctcaaaaaaaaaaaaaatagccatttgtgctttcaatctctccgcttccggcctccacccggcgggaaaaaactcccgcacgtgggcctccacgattccttggcatgcgtgtcactctgggcaacaggctggtcggccacgactgcgcaggcgagaggcacagagcgactggagactgtagtcccccggtttccctggagaccaggcggaagcggccggaagtagcgctgcggttggcagcggcgggatggagaagctgggggtggagccggaggaggaaggcggcggcgacgacgacgaggaagacgccgaggcctgggccatggaactggcggacgtgggggcggcagccagctcgcagggtgcgccgcagccagaggagccagcggcctccttgggtgtaaatgagaagggtggggcaggcggacgctcggggcggcggccactggggcgcgaccgtccccgccccactcggctcctctaagagagggctgcctccctctgccttgtgttacgcggcgggtacctctagaggaatggcttcacccagcaggagtagggtggggcgcgtccacactacaaatacgtgtcgagggtttatctgcgccgtcctttcctctgtgaggggcgaggtggggcgggaatccctcagccagcccgacgaaaactgcagaggcttctgggccttttaactttggagaagttgaggaccttgtcgctcatttggcagaaggtgggacccggatctcagtcctggcaggaagggatggctcagaacctaggcggagtcaggtccgctgtggtcacgtctccggtgacccacttccagctctggtctttaccttgtaccgcccacctcagggcctggatgtaaaggcaccggttctcatttcctgctggttttgtttcattcattaatttagagacaaggtctccctgcagcctcgaacccctgggctcaagtgatcctccgccccagcctctccgtcccgagtagctgggacagcaggcacgtgccaccacacctggctgattttcagatttttttagatcaggtgtagctgtgttgtccaggctggtctcaaactccagccacaagcgatccttccacctcagcttcgaaaagtattgggattacagtagttagccatcgtgcctggccttttaaattttggaactttaggtttacctgaaagttgcagagctagatccccctagtgttaacataaactcagtacatttgtcaaaactaggaaattaacattggtataatactattaattgaactacacgctttat

SEQ ID NO: 2884 - DNA, 6000 bp, Homo sapiens
ctctcatgagctcatctgaccctaatcacttcaaagcccccccgcaacaccgtgcccagcctgcagtacgtttttttattttttatttttatttacttatttttttgagatggagtcttgctctgtcacccaggctggagtgcagtagcgcgatctcggttcactgcaagctccacctcctgggttcacaccattctcctgcctcagcctcctgagtagctggcactacaggcgcccgccaccacgcccggctaattttttgtatttttagtagagacagggtttcactgtgttagctgggatggtctcgatctcctgacctcgtgatctgcccacctcagcctcccaaagtgctgggattacaggcgtgagccaccacacccggccacattttttttttaactctgaatgaatgcaaaaacctctatgctggataaaattttaaaaatttattttgtttaaagccaaatacggtgactcacgcctgtaattccaacactttgggaggccgaggcaggcagatcatttgaggtcaggagttcgagatcagcctggccaacatggcaaaaccctgtctctactaaaaatacaaaaaattagctaggtgtggtggagggcgcctgtagtcctagctacttgagaagctgaggcaggagagtcacttgaacccaggaggtggaggttgcagtgagctgagattgcgccactgcactccagtctgggtgacagagcgagattctgtctaaaaaaaaaaaaaaaaaaaaagattatgacaggattactcatactgattattcctctcacctcaggctccaagatggcctcggcgacactgttattgatctcattttttattttattttatttttagacacagggtctccctctgttgcccaggctggagtgcagcgacacaatcatagctcactgcagcctcaaactcccaggctcaagtgatcctcccacctcagcctctcacgtagctgggactacaggtgcgcaccaccacggtcggctaatttttaaaatttttgtagagatggggtctccctatgttgcccaggctggtctcaaactcctgggctcaagcaatcctcctgcctcggcctccaaaagtgctgggattacagaggtgagttctggcgcccagcccaaagataatagcacacatttcctgagtgcttacctgattctgggaatttcctccttcaatgcctgtgatgaagcctttgtgtgactgttcccatcttacagagaaagaaactgaggctggagctcattttctttttttttttttttttgagaaagagtctcactcttgttgtccaggctggagtgcagtggcacgatctcggctcattgcaacctccacctcccgagttcaagcgattctcctgcctcagcctcctgagtagctgggactacaggcatgcgccaccatgcctggctaatttttatatttttagtagagatggagtttcaccatgctggccaggctggtcttgaactcctgacctcgggtgatccacccgcctcggcctcccaacatgctgggattacaggcatgagccaccacgcctggcccggctggagctcattttctgagctcaaaggcacagagctcagagtctcttgaagatattccaagatactccagatattctaagatgcctggagccagggctggaaaaaggaggcacaggtgggcttggggtctagaaagagaagcctggagggtggaggaccatgggggtccaggcagtcagtctgggagaaaacaaggccaagtcagtgttgacagaggagtagggttttcctgctgaagaccagaggaagacagcatcccaggcggaggaaacagctgacaaaggctgggcctctcgcagaggaggttgttatggctggcacgggggacacacggaagaaggacttggacacatattctctgaggccctgctttgctcgccttattttatttattttatttgctttatttttgacacagtgtctcgctctgtctcccaggctggaatgcagtggtgcaatctcggctcactgcaacctccacctcccgggttcaagcgattctcctgcctcagcctcccgagtagctgggattataggcatgtgccaccatgcccaggtaatttttgtattttttgtagagacggggtttcaccatgttggccaggttggttttgaactcctgaccccagatgatccacctgcctcagcctcccaaagtgctgggattacaggcatgagccaccgtgcccagcccttattttatttatttatttgagacggggtctcactctgttgcccaggctggaatgcaactgtgcaatcccggctcactgcagccaggaacccctgggctcaagtgatcctcctgtctcagcctccggagtagctgggtgcacacaacacaccccattctttctttcttttttttttttttaaagactgagtctcactctgtcactcaggctggagtgcagtggcacgatctcggctcactgcaatctcggcttactgcaacctctgcctcccaagttcaagcaattctcctgcctcagcccccagagtagctgggattacaggcatgtgccaccacgcccgactgattttgtatttttagtagagatggggtttctccaggttggtcaggctggtcttgaattcccagcctcaggtgatcctcctgcctcagactccccaagtgctgggattacaggagtgagctaccgtgcccggcctttttgtttgtttgtttgtttgtttgtttgttttggggaggatggagtctctctctgtcaccatgccatgtgcagtggcatgatctcggctcactgcaacctccacctcctgggttcaagtgatactcctgcctcagcctcctgagtaagctgggattacaggcgcgtgccaccacgcccagctaatttttgtgtttttagtagagacagggtttcaccatgttggtcaggctggtctcgaactgacctcacgatctgcccgcctcagcctcctaatgtgctgggattacccagcctgcaatactttttaaaaatcaaaatcaatgcccaagtatccatgaggaacaaaatatcaaaattgtaaataaagacagaatctgactttgcacttatcccacccacctccctgatcttccttatcttcagctcatgttggccatgttggtcaggttggtctcgaactcctgacctcagttgatccgcccgcctcggactcccaaagtgctgggattacaggcgtaagccaccgcgcccggccgatttaacttttaaattgaaattataaaatataaatatgtatgttgcatgcgtaaaacattgcataaagttacataaaacgttgcaaccgccacggtccccttatcccccgcctccagcccagtgccccgcccgtccgtccctctcttccggcgctgagggcgcagaaactcggcgcggccaccagatggcgccaccgcgcctcgcagccccgggacatttcgtgccccagcggtgggcggcgcggaggaggtgggatgcgtcagccggacccgcgggccggggagccgggcaactggggaaagtgagccgccgggcggaggccagaccccaggctggcgggggaggggactcagatgtgagtcacccgggagcccccagtcgaccgtgggagacgttgtcatgcggggcctgccagcctcgctcctgaacagccttcccggggcggcggagtcctgcaggcggccgtgcctggcgcacacgcgtggctccaacacgaactagcctatggcctcaccaagcctcagtttccccttttgcataatgcacataagcatcccccctgcttcccaggtcttggattaaatcatccatgaatccggaggggtggggggtaccaggtccgcaccacgcactcaatgcaggtcagcgcccaccccggagtgagaaataaaagtagccgtcatccttgcacgtgggccctgggtggcggcgtgcagccggagcctgcaccattcccctcaacaatggctttctccagggcctggaggcctccgcacgggcaaaggctggaacgccaggcagccggcgggggcggggccgcgccacctgcacctcccacgcgcaccccaccctgatactcgcggggtcggcgaggaggcgcccactttcttctccagagcgccccgggctttgcaacctcccactttcggggccctcgaggaggcctcccgcgaccaccaggtgacagctgatgtgtattgggctcttactgtcagccgtattttatgccatgctctgcaaaccagcgaggccggcgctgcagacccattactcagacgggaacagagaggccgggagaagcgaaatcacccaggggctggggtcgtcgcagccaggagagactccggccctcaccaccacctgggcgagatcacgctgcaaacggggccccttcccggtgcagcccctccacccccagcagaacttgggaaaggcgcggtccgggactctccgcggatcgggaggggattccaggcccccccgaaagtccgggccgcctcgcgcgctggaaatcccgcgcgcgccccgaaccgcggctcggctgccgggaaatcaggagaaaaaaacttctgcttttttttcttttctggcattcgcggtcacctacccggcccccgcgcgccctcctcccggttctcgcccccacgtggggcgcccccgcacgccgctcctccccctcccctccgtcggccaaccgcagagctagctgcactcgcccttgtctttccaccaataggaggggcgaatgactccactgaggccacgcccaatgttcaagtctataaaagtcggtgccggaggctcccagctcagatcgccgaagcgtcggactaccgttggtttccgcaacttcctggattatcctcgccaaggactttgcaatatatttttccgccttttctggaaggatttcgctgcttcccgaaggtcttggacgagcgctctagctctgtgggaaggttttgggctctctggctcggattttgcaatttctccctggggactgccgtggagccgcatccactgtggattataattgcaacatgacgctggaagagctcgtggcgtgcgacaacgcggcgcagaagtaagtagccggggctgccgccgcctgaggtcagccgggacgggatgggtcgggttgggccgggccgggagcggaacgtagcacccggtggtccgcccgtcactgatccctctttcctggtctcaggatgcagacggtgaccgccgcggtggaggagcttttggtggccgctcagcgccaggatcgcctcacagtgggggtgtacgagtcggccaagttgatgaatgtgtgagtcagacccccttcccgggctgggcgcgggtgggacgggacctcccctccgctctggacgctttccgcacgcttgtcttgcatggagctgggacttccccaagtgccccccgctgtggatgcagagcttctctgccgttttgtggatcgggggctgccgtatcctgatgtatcgtctgcaaacacccctcccgccgtgggcctgtctccccctaccccatactttgaaccgtgtgccctcccctccccccaccgtcaccagcttgcagaggcaatcccctgcacccttgcagtttctcttttgctcttgcacgctccttttttgcaaactccccctgcacggtggcccctcccctgtccccggctgacccatccctaccctttggccccctcagggacccagacagcgtggtcctctgcctcttggccattgacgaggaggaggaggatgacatcgccctgcaaatccacttcacgctcatccagtccttctgctgtgacaacgacatcaacatcgtgcgggtgtcgggcatgcagcgcctggcgcagctcctgggagagccggccgagacccagggcaccaccgaggcccgagacctgcat

SEQ ID NO: 2885 - DNA, 6000 bp, Homo sapiens
accatcatctggggtgtagagatagaccctaagtatctatatccctaaacaaccactagggttgttactttttttatttattttttgagacagggtctcactttgctgcccaggctgaagtgcagtggcacgatcatagttcactgcagccttgaactgctgggctcaagtggtcctcctgcctcagcctcccaagtagctgggactgcaggtgcacatcaccacacctggctaactttttcatattttgtagagatgggatctccctatatcgcccaggctggtcttgaactcctgaactcaagggaacccctgcctcagccttcaaagtgctgggattacaggcatgagccacagcacctggcagggtccttacttttttctttccaggggcaaaggtacctgctgggtgttactggggactcgtttctctttgctcccactgggcatctccgaactgtgggcagagaaccctgtttgccaccttggcccaagcatttgctaagatcattgctcattcctcggtggactctatctacacaaattccacacaacctcaccctgcagtacacggaccaataggattcaacaatctgaggcttcttgtctttttttttttttcaagacggagtctcgctctgtcacccaggctggagtgcagtggtgcaatctcggctcactgcaacctctgcctgccggattcaagagattctcctgtctcaccctccttagtagctggggttacaggcaaaaatacaaaatttttgtattgttagtagagatggggttttgccatgttgcccaggctgctctcaaactcctggcttcaagtgatccgcccgcctcggcctcccaaactgctgggattccaggcatgagccaccgcgcccggccaaatttgaggcttcttgcattcgaaattgcaaagtgaaaattttaaatgtgcccagttttctggagagtggatccacagctttcaccagattcatgagcagtgggccctggagtttccaaaaaaaaccctttatctgtccatatcaaatgcacttaggctgggatgcagcattctacttctgggaattcatcctataaaactaatcccactggtgagcaaagatattcactggctatttattgtagtaatggtaacagaaaattccggtaaacaatagagatatctatcaactgacaactggttaaataaattatggtatatgtcatggaatgaaatacaatgtacccattaaaaagagccaagtaggccaggcaggtggcttacgtcgataatcccagcatgttgggaagccgaagcaggcggattacttgaggccaggagttcgagaccaccctggggcacatggagaaaccctgtctctgctaaaattacaaaaagtagccgggcgtggtggcgcatgcctgtagtcccagctactggggaggctgaggcaggagaattgcttgaacacaggaggcggagcttgcagtgagccgagattgcaccactgccctccagctggggcgacagagcatgactccctctcaaaaaaaaaaaaaaaaaaaaaaatccaagaagtgtggagtatggtctagagcagtagtcctgggggacaggaaaggaagggaggaaggaaagaagagaagggagggagggagagaggcaaggagggagggaggaaggaaggaaagaaggaaggaaggaacgaagggagggaaggaggactgattctaaggggacacacggtgatgtctcaagatatttttggttgtcacgacttgggggtgctcctggcccggagtgggtggaggccaggggcgctgctcagcaccccgcagtgcccaggacggccccaccacggagaacaatccagccccagatgtcaacagtgccgacggagggggagaaatcccgctccagtgtgatctccaagcaatgaaaaacacagcacacaggattctgtggcatatgctatcacagggtacgtgtttttaaaggaaaggcacacacgtatcttaggaaagggacatacggagtcgatgacagtcgcttgtctctggggagaagggctggctgcccgaggagcagagaggggaaactgacttcttcctctaccttttcaactttgtaccttgcccatccagaggattttgaacgtaactgctctagacgcaacttttccctggctctgggttatctggcaagagtcctgtgtcgacagcctcgggactcctctcttccccttctctccccgcaccccgcctttgcagcggagagaaggaggggagaggtccgcgtccctgggcagcccagggtgcctctcccctcctcccaggggctctgtccccgcttctggagcccgcatggcgggcagggcctgggccacctcgtcgcccccgtccgtcccttggtcttcccacctggcaggggacacgcgccaacgtccccacctcggtccccccggccccctcccgggccaggtcgggcctggctccctcatccgggcagcccggggcccggtactcggctcccgcctgggcctgcgctcacctggctcgccttgtagaactgcttcttcagccccgccaccgacatgctgccgcccgccgccgagcctcccgcccggaccgcgccagcgacaggctcccgggcgccgccgaccctctgcgcgcctcagcagtccccgtcggcgccgcctccgccacccgcttgccagctccgcgcccgccccggcgccgcctcagccgctcgcgcgcccgcgcggccaggatattacatggcaaccgcacgcttccggtgccggcccccgcgcgcgcccccggcccccgcgcgcgcccccggccccgtctgcgcacgcgcgccctctgccggctgaagagcgcacgtgcacattgtctaccgcgggagaggccgcctctgtcagtgagttgagcggggcgagcctagaggggccgtagcagttgcagcgccccctggagtcgtggaggtgaccctaacgtcttggaaaacgcgcttagtttaaacctggccagggaggttgggaagtagaaggggcccctgcttacgattcttcagattcctgtttactcatcttagctaaatccagttcgtctaagtgttcagccccctcccatttttatttatttatttattttttttttgagacggagtcttgctttgtctcccaggctggagtgcagtggcgtgatctcggctcactgcaacctccgcctcccgggttcaagcgattctcctgcctcagcctcccaagtagctgagattacaggcgcgcaccaccatgctaggctaatttttgtatttttagtagagacagtgtttcgccatgttggccaggctggtctcgaactcctgacctcaggtgatccaacccccaacccccccaccaaatccagcctcccaaagtactggtctcacaggtatgagccaccgtgcccggccacctctcttcctctctctctctgtcctgtgttcatccattcagttgcccacgtgacacatctagacatctaggtctgtcttcatgccttgaccatactttccaccagtcctcccctccaattcttccttgtcatggcagccagaaagatgcttctagaatgcaattcagggccaggggcggtggctcacgcctgtaatcccagcactttgggaggcctaggtgggcggatcacgaggtcaggagattgagaccatcctggctaacacggtgaaaccctgtctctactaaaaaatagaaaaaattagccggacgtggtggcgggcgcctgtggtcccagctactagggactccgtctcaagaaaaaagaaagaaagaaaggaaggaaggaaggaaggaaggaaggaaggaaggaagaaagaaagaaagaaaacctgtttctacactcacaggctgacactgaagttctctgttttgtgtgaggcttttaatctgcttgatctacacagttcaatcaaatatttatacattcactcaaacatttattgacctggtaaatatgatcagttactaacaggtcctggggttccagtgaggaatgagtcctaccctcgccagaactaatgacaaaaggcagaaattaattcattagtcaaataacaaactaataaatagacacagctgtaattgctttaaggaaaagaacagtgttgtaggcacttgatattgtcagggttggggaagaaaaggcttcctggggtgacgatctaagatctgaaaagtataaattagccaggaaaagagctgcgaaaagattgttctaggcagagaaaacagcatgtgccaatttcctgaggattaaaccagaaacgatccatttcgtccatttcgttcactcattctacatgttatttactgaatgtcaaatacttccgaagcgctccccagacttcgttttattgttcttgtagaaagcaatttataattttaattgctgttgctatatttagccgatgtcccattaggataaactcaaaactccaggttcctcatctaaatcccactttcaagttgtcatctgcgccttgcgtaaaatgttctggtgacgtaagagcctgggcctccctcctcttagggactatcccacgcgatcagccagtcgcagcgcagagcaatgagcttgacacctccttcctccaatcgcagggcagctcctcccagccaatgacaggcctccgaggggaagcccagtccctcgcggatatgtcaatgggcgagccctgggaggaatggaagtcacggatctcgcgaggatgcccccggcgcccctcaattcccgaggcgggccgtcacgtgacccgggctcgcccaattggcgcgcggactgcgggggtcgccgcggttcccgccaaatacgagcgcggcggccgcggcggcagcagcggcgcgggcgggagggcgaagagcagcggccgcctgaggggagcccgcgcctccgccgcctgagaggaggtcgagctgccgccggggcgatgctggaggagctggagtgcggggcgcccggcgccaggggagccgccacaggtcggttcgggcccgcgccgaggggaagggggggcgcggcgcgcggcctggacgggccgaggcggcgatgggaggcggacgggcctccgggcgccaagcctggtcctgcgggccgggcgttcaccccctggggccttctcatccccagcgagggcctggcgtccccaagggcacccttgttgacgttattgttgtagccgcgaccatattgtttgtttccggcgcttttgcgtcagttcgtccctccaggactctctggggcggtgggtcggaggggccgagaggggaaactgaggcccagggaagcgaaagggcttgccctgcaggttactggatgcgtttgtgtcccttgaccatgttggaccttgcagcgggtggggaaactgaggcccaaggtcgcacgggctcggggaccagtaccgatgccgctgagggtcggggtaagcccgggtaagaagaggcccagatggtagagatggccaggagggtgggactcccgagttcttgctccttcctgatatgcaccgtgacttcctcctccgtgtgccttggaatggggtctttggagcccaccacaggcctcctgaaacgtgggagggtgaaccaaggaagaccagactgtccctctcccttgctggactctgcattacataacgctttggcagcacttggcattacgctttggcacatagtaggtgctcagtaaataacgtgaacgaatgaagggctagaatggacgccagtccagtttctcagcctcagcagtgttgatatttgttgccgtcctgggcacggcactgcagggtgttaagcatcatccctggcctccgccttttgcaggccagtagcagcccctctcaccatgccttagtaacagccagaaataccattgccctgtgtcccctatggggcagattccgccttggctgaaaatcatggctgtagttccttctagcctgtggga

SEQ ID NO: 2886 - DNA, 6000 bp, Homo sapiens
caggctgatcttgaactcctgacctcatgatccacccgcctcacttggcctcccaaagtgctgggattacaggcatgagctaccacgcctggctgacatttctctttatgcctgcatctcccccattggatgggaagtccctccagggtgagaccttgtctaagtgaactttgtgcccatcaatgtctgcgtgacccaggcaggatctggctcagccaggagtgggtgtggggggtggaatcaataaaagtttgttgaatgacttaatgacctctgagaatgtatcattttgcaaaagggaaactgaagccctttgcactctaacaattattcctggcacctgatttgcacatggtctggtgcctgagagggagggacattgaatcataggaggggctaggaagtacccattctctagcctggcaggccttatttcttgtcttggctgtatcttgcattattttatgtgatagcttttgtgggcattggcctcttatttccctaagtcaagctcatccaacccctgacccacgggccacatttggcccaggatggaatatggctcaacacaaattcgtaaactttcttttttttttttttttttttttttttgagacagagtcttgctcagtcgcccaggctggagtgcagtggtgtgatctcggctcactgcaagctctgcctcccaggttcacgccattctcctgcctcagcctcccgagtagctgggactacaggcatgtgccaccatgcccggctaatttttttttgtatttttagtagagatggggtttcaccatgttagccaggatggtctccatctcctgacctcgtgatccacctgcctcagcctcccaaagtgctgggattacaggtgtgagccaccacacccggccacaaatttgtagtttcttaaaacattatgagatttttttgcaattttttttttagctcatcaggtattgttagtgttagtgtattttattatttatttatttatttatttatttttgagatggagttttgctcttgttgcccaggctggagttcagtggtgcaatctcggctcactgtaacctccgcctcctgggttcaagcaattcttctgcctctgcctcccgagtagctgggattataggcacgtgccaccacatctggctaatttttgtatttttagtagagacggggtttcaccgtgttagccaggctagtcttgatctcctgacctcagtgatccgcctgccttggcctcccaaagttctgggattacaggcgtgagccactgtgcccggccagtgttagtgtattttatgtgtggcccaagacaattcttcttccaatgtggcccagggaagccaaaagattggacacccctgctctaagtgacttgtgagctttttttctgagacgcctggaatagtttgttactcatgtttttaaatgattaacttgagcaattattactattttttgagacagagtctccttctgtcacccaggctagagtgcagtggcgcaagcatggctcactgttgccttgatcttctgggctcaagaggtcctcctgcatcagtgtcctgagtagctgggactacaggtgcacaccaccatgcctggctaatttatttttattttttgtagagaagggttctcactacgttgcccaagctggtctcaaactcccgggcgcaagagatcagccttcctcggcctctcaaagtgctgggattgcaggtgtgagccactgcacccagctggacaattaacctgagctaatttgaaaaattttgatgttctcaagatgactagggaactggagccctcaatcaacagtcctcagtatcttttctgcagggagggctagatacctcctctgtgacacttaacttccattatccaaggtgcttaggctgtgcccctcaccacgtgtacatgaagaatgcatgcccagccaatcacagtggctcatgcctgtaatcccagcactttgggaagtccaggcgggcagatcacctaaggtcaggagtttgagaccagcctggccaatgtggtgaaaccccatctctactaaaaataaaaaattagccggacatggtggtgcggacctctagttcctgctactggggaggctgaggcagaagaattgcttgaacccaggaggtggaggttgcggagagccaagatcataccactgcactgcaggctgggcaccaaagcaagactccatctcaaaaagaaaaagaaaaaaagaaaaagaaaaatgtattccctctttcagccacgttgagttttcgcaacagcgctacaaacagatgatgtgttctgatagaaataggctaggttcctgcagcaggtgctgtcattttggaagagctcaagccgtctcacaccctcaggtgggcctgctcatacctgtggtgtgggttctacctggctgatggctgagggtctagaattgtgtgcagtagcgttgatcgtgtactgaggttgcaaacagtgaacagcaccatctggacatcgtggattagaatgcaggagcttcccaaggctgctatgacaaaggaccacaaactcagtggctgcaaaacacacatttatttatttgttgatagagccttgctctgtcacccaggtgggagtacactggctcgatcttggctcactgcaacctccgtctcctgggttcaagtgattctcctgcctcaatctcctgagtagctgggattataggcacacaccaccctgcccagctaatttttttttttgagacacagtctcgctctgttgtccaggctgaagtgcagtggcacgatctctgctcactggaacctccgcttcccaggttcaagcaattctctgcctcagcttcccgagtagctgggattacaggcgccggccaccacacctggctaatttttgtatttttagtagagatggggtttcaccatgttgaccaggctagtctggcgactcctgacctccagttatctgcctgcctcggcctcccaaagtactgggattacacgtgtgagccaccacgcccggcccacacatttatcatcttacagtttgggaggtcagaagtctgaaataaattttaggggcagggcgggttctaggagtctttcttgctttttctagccaccagaggctgcccatcttccttgcctcttggcctgatctttttttttttttttttttttttttgagactgagttttgcttttgttgcccaggctggagtgcaatggcgcgatcttggctcaccacaacctctgcctcctgggttcaagcgattctcctgcctcagcctcccgagtagctgggattacagacatgtgccaccacgccaggctaattttgtgtttttagtagaaacggggtttctccatgttagtcaggctggtctcgaactcctgacctcaggtgatctgcctgcctcggcctcccaaagtgctgggattacaggtgtgagccaacgcgcccggcccttggcctgatcattgtaaagcctgcttccactttcccatctcctttgactttgaccttttgtatccctttttcacttattaggaccttttaaggacattgtgcccacctggatcacccaggagacgctccccaactcaaaatcattaactgaatcacacctgcaaagttgcaaagtccttttagctgtgtaaggcactgtattcacagatcctgggggcgaggacgtgggggtctagagacgcatatcttcgggggccatgatctgtctcctatattagggacatagcagaagtcccactgaccagatagaggagacttaatagagtgacgaagaaactgtaaaaagctaagtgggaactcaacatttttctgctcacagctctcaagggaaagaccaaagtcctccccggtggccttcaaggtattatatatcacccctctgacctcaactccccctcccctttgctcagtgggccccaaccacaccagccccttcctgctccctggacacctctaagccttttccggcctctgggtttgactttccctcctagacccatctgtccttggagtctcatctccgattccagctcaaatgtcatcttctctgagaggcccaccgcagtggccccagtgagagagtatcctctctccccgcctcccaccacatggctgctggtcactctcctataaggaatcatctgaaattatctgctttagttattcatttcttgcctgtctcccccagataggaattttccctccctgagaccaccaactgggtctgccatgtacaccgctgggttctgcagctctgagcaacctgtccggctgctttgtaggtgcccagcacaggtcactcctgtgcccgccaggactggtcagagtggaacagacagggcggagggggcagggcagccctgcccgcctggacagcctggagaaggcgggaaaacgaggcgggaaaagacagcaaacaagccctgcgggtgggtagagtggggagccctggcaggccctgacgccaggcagtggggcttggggcgatcgggcgagccatcagggtgcaggtggtctcctaggggccccccacattccctcgcagtatttacacattgattccggccttcttagacctactggtcaatgcgtgcgagtggggggctgcgaacggacttggacttaagagttcagggggtctgtaccctgggggtccccaaggctcctggggtgtccacgtgcggggggtgaccaggccctgccacgcagcccctttgcacgctgggcgcgcccagcagagcgcgcagggctgggcggagccgtggcccactaggcggaggcgccgtggacagaggcgggggcgccccccaccctctttctcgcttcccgccactgcgtcggccaatcaggaggcaggcgcccgcccccggcacggcctcctgcggccccgcaactcccaaatgccgagttttcgcgggaaaaaaatcagagcagctggcagcgcggcgggcagcgtttgccgagcgggcgctccgggtcgcacgcaagtccgcgcggggtccgggccacgcacgcggtttcatcgccatccccagccgggccacgcgcgcaggcagacaagctgttcgcggcgaccggagaggtgagcgggcgggccgggtcggggtgccagcccgggccgggcgcacggggctcgggaactttgcaaaactttcccgcgcggccagcccgggcgcacgcatgtcccgcactctgtcccgggatccagggcctccccttccacctaaccctcgggaatcgttccccggcacacatccggctggagccgggaccagcgctgcgtccccggagcccggcggggggtcgagcgcgccgggtgggggagggcctggcgagccgccggggaggatgtcaggctccgcgcctgcgcgcggggcgccccgcgattcaattgtcgcgcccgagcccgatttcgcgcgccctgagttccccgggagcatctgggccaatggggagcgagcggggcggggcggccgggtgctgcggagccaataagaggcggctcaagtgaaggggggcgggacttgacgagcgggggccccctctgtagtcccggcggcgggggtgggcgtgggctcgctggcgcgacccgcgcgggccagtgggagtgcgggagggacgccgagggtccagggtttggaggggcgcgagctgccgggggttggaggtcgaggtgagtcgcggggcgcgcgcgctcgcgggtggccgggacggggcggccggttaccatggccaccgcggggcgggcccggtcgcgcacgcgcgcggggggggccggcaaggagggggggcgtgggcaccgaggggtcccggggtccgcggatctcgggtggggtttttccctctcagtggcacttggttgagttcccccgggacttctgaagttccggcccgcgctggacttctgggattccctcttccgtaaataggaatccgaggaatgaatgaa

SEQ ID NO: 2887 - DNA, 6000 bp, Homo sapiens
tccgcaccctgcagtgcccaggacggtcccagccagaggatgacctggccccaaacatccacagtgcagagcgggacaggccctgtgctaagagattgatttcgctttcattgtgagcctggcacagggctcactccgcccttcaaatccacaacctcattgaattcgcactgcgctgcagcgtggtgggtattagccctatctaaaataagatgatgtgggagctggcgagtcgcgggccagggatgctgaaaagattatgtacagtgcagagcgttgtacccgagcaggttaaaggtgccgcaaaagacagctattgttattttgatgtgcagccaaaaaaaaaaaaaagattgaggggtgggggccgcagatgcctctcccgttgcctaggctgggccgtctgcccaaagtcactgccctcgatcagctccctgcgttcccgcccatcaagtgacatcactgtcaccctattcagcccaagtgagaccaccacgagatcctccatattccgagacagacccaactctgttctgctctggggtctccatcaacttcactgcagaccttgggctgctaggccaggtttctttaaacagggaaaaaaaaagactgtgaacactctagaacattctataaggacaactgcccatttgtgcccaccgggaactgtgttgctttctatcacgttagcctgggtgcctgcagacttcacgctctgggaggtgctgctgtgtgcctctgtcccgccttcccgccactgtccaaacctccctgctgccagctcactttcccagccatgcaagtggggaaactgcatcacctctctgtggcccggaagacagaagcaacgacacgatctcttaaaagctactgcatgggggccggatgcgacggttcacacctctaatcccagcactttgggaggccaaggtgggggaggggggtgtgaatcacctgaggtcgggagttcgagaccagcctgaccaacatggagaaaccccatctctactaaaaatacaaaaaaaattagctgcgcatggtggcgcacacctgtaatcccagctactcgggaggctgaggcagaagaatcgctggaacccaggaggtggaggttgaggtaagccgagatcacgcaattgcactccaccttgggcaataagagcgaaactgtctccaaaaaaaaaaaaaaaaaaaaaagctactgcatgggaaacagccacagggtaagggaactaagaggcggttatgaaggttacacaggaacactgaatcttttcataactaccagagctgacctgggagacgaaattcagtgttgagagcccagtctcagaaaccaaaatcccaggttccaatcccagctccctgttcagtccgggtgagttccggcaaggctagggccaggtgtcatcactgcggacatcctgacaattaaaagcacaatgtacgtggctgggtgcagtggttcacacctgtaatcccagcactttgggagacggaggtaggtggatcacctgaggtcaggagttcaagaccagcctggccaacatggtgaaactccgtctctactaaaaatacaaaaaattaatcaggcgtggtggtgggtgactgtaatcccagctacttgggaggctaaggcaggaggatcgcttgaacttgggagatgaaggttgcagtgagcccagatcgagccactgcactccagcctgggcaacaagaatgaaactccatctcaaaaaaaaaaaaaaaaaagcacaatgtacatgtctaattaacatacgtgttcctgtcattgtcacactaaacttagaaatgtgacagacactattgtatgactcaagtattatgttacaaatgaggggagataggggttttgggttgcatggatgtagacatttgtcaaaattattcagtctgtctaacatctgtttcactatagacaaagcttttaggtccggcactgtagctcacgcctgtaaccccaaaactttgagaggccaaggcaggagggtcacttgagcccaggagaccaccctgggcaatataataagaccccatctctacaaaagatacaaaaactagccaggcatggtggtgcatgcctatagtcctagctacttgggaggctgaggctggaggattgcttgagcccaggaagctgaggctatagtgagctgtgatcgtgccactgcaacacagcctgggcagagtgagatcctgtctcaaataggaacaacaacaaaaaaaatcaatgaaaacagaaccaaaaacaaatactgagctctaggtactgacggtgtgctgcagtaataagggaaaggtggactggtgtctgcaacttactttgaaatgcatcccaaaaagatggattggcgggcagagagaaagacagagcgcttcaagataaacctaataagtcagaataccgatggtgaaatctacatggcaggtgtgtctaggtgttttcccattcctgcatggttgaaatgcaaaagttaaaatgctagctcggtggctggcatagagtggatactcagcattatctcctctcctgaacttgggagcatgagagtccaacccgccactgacctacgctgtgaacttagaaggtccttgcaggcttcagaaactctttgtgaaatgaagccttctgtgctgacccaataggctgagtggcaaatcaaaatcagtttggatgccacaaagggagcacgcatcataggaggagggaggaagagagcgccaggcggagctcctctgtcgagcccggccctgcctcttctctgcacacacgcggcttgcaccgtcaactccccaagttctccagatcgcctcctcccggggcagggcgggttaactcagattcttaagactcaagtcatcacgtctcttacgggaagagggctaatgaaggtctcctatggcatgcaagccagagaaattaatcatcaggtctcatctggagtgagcaggcatgatcctcccagcccccaaaaacccctggccgggcgcagtgtttattttccaacctagacaccagatggcagcagtacccggttcaaaatccaacaacaacacagtggggtacacgcagctcaactgacgacttttaatccagttccagtagtctacgcccgtccccacggtccaaccaactccagcagatgggacctacaccttcgatcacactgtctcatcctgccgggaaaccccactcccagtaggtcccacagtcccccacaaaaacaccaaccaaagtagcacctccacccccaggtgccaatggagggagcgccccaaacgtggcagctatgaaatcaaagggggacattttaaatgcaacgaggggctggagacagaacagagaaagagacgagggtcggtggacccctcggggaccacacgccccaggtcagcagcagccgcagcacagcaggctcagggtggcggaaattcctgattagcaagcgccatctccagactctgaataagctaatccaaatttttagaaacaaacactcgcagggtctgatgcttaaccggtacaggctgagagcaattggtggtggatgtttaaaaaagaaaacctggtcccctccgtcctagctaccagatggtcctgggccctttctcgaaaattcctcagccttccatcggccacctccaaaacttctttctctagccattattttgaggcggagctttgaaaaaagaagtttaaaagcccagaccctatagattcgagggccagccgccagcccagcgtgtcaatctgtgagtcctccctttgttccttcctctcgcaggcatttgaggtttctgtggacttctccttccgggagagatgaagtgggaccggacgaggttgttggggggggaggtgggagggagaaagtatcggctggtggctgcagaggcgcgaggcctggaccaggcatagaacaaaggtgctggcggcgggtgtacctgtttgcccctgtagaacagcctctgcaggcctggctccacgtggaacagctcctggatcttccgcctcagctcctccaccttggtcagcctggacagcgagtccaccgtgtgggtctgcctcccgtccatggtccgaacctggatccacatggtgtcggcgctgaggggagggacagcaaaaacccccatcagttttaccagcacctctgagccatgccatgctctaaggagtcggggttgcttttgtccggcctgtggacaccaggaaactcccaggatgcccttccagtcctcctgtacagccagaccctggccaggaccagacacaacaaattaagcacttaaggcattaacgactagccaagtgttgaagattgaggaggaaggagaatgaaaagagggaattgaaagaaaagcagaaggtccaacccatccctccttccccacgaccagaggagaaaggaggcccgggccaagtggccgagttggttcgtttattcattcattcattgattcattcattcctcggattcctatttacggaagagggaatcccagaagtccagcgcgggccggaacttcagaagtcccgggggaactcaaccaagtgccactgagagggaaaaaccccacccgagatccgcggaccccgggacccctcggtgcccacgccccccctccttgccggccccccccgcgcgcgtgcgcgaccgggcccgccccgcggtggccatggtaaccggccgccccgtcccggccacccgcgagcgcgcgcgccccgcgactcacctcgacctccaacccccggcagctcgcgcccctccaaaccctggaccctcggcgtccctcccgcactcccactggcccgcgcgggtcgcgccagcgagcccacgcccacccccgccgccgggactacagagggggcccccgctcgtcaagtcccgccccccttcacttgagccgcctcttattggctccgcagcacccggccgccccgccccgctcgctccccattggcccagatgctcccggggaactcagggcgcgcgaaatcgggctcgggcgcgacaattgaatcgcggggcgccccgcgcgcaggcgcggagcctgacatcctccccggcggctcgccaggccctcccccacccggcgcgctcgaccccccgccgggctccggggacgcagcgctggtcccggctccagccggatgtgtgccggggaacgattcccgagggttaggtggaaggggaggccctggatcccgggacagagtgcgggacatgcgtgcgcccgggctggccgcgcgggaaagttttgcaaagttcccgagccccgtgcgcccggcccgggctggcaccccgacccggcccgcccgctcacctctccggtcgccgcgaacagcttgtctgcctgcgcgcgtggcccggctggggatggcgatgaaaccgcgtgcgtggcccggaccccgcgcggacttgcgtgcgacccggagcgcccgctcggcaaacgctgcccgccgcgctgccagctgctctgatttttttcccgcgaaaactcggcatttgggagttgcggggccgcaggaggccgtgccgggggcgggcgcctgcctcctgattggccgacgcagtggcgggaagcgagaaagagggtggggggcgcccccgcctctgtccacggcgcctccgcctagtgggccacggctccgcccagccctgcgcgctctgctgggcgcgcccagcgtgcaaaggggctgcgtggcagggcctggtcaccccccgcacgtggacaccccaggagccttggggacccccagggtacagaccccctgaactcttaagtccaagtccgttcgcagccccccactcgcacgcattgaccagtaggtctaagaaggccggaatcaatgtgtaaatactgcgagggaatgtggggggcccctaggagaccacctgcaccctgatggctcgcccgatcgccccaagccccactgcctggcgtcagggcctgccagggctccccactcta

SEQ ID NO: 2888 - DNA, 6000 bp, Homo sapiens
tttttttttttttttttgagacagagtcttgctcagtcgcccaggctggagtgcagtggtgtgatctcggctcactgcaagctctgcctcccaggttcacgccattctcctgcctcagcctcccgagtagctgggactacaggcatgtgccaccatgcccggctaatttttttttgtatttttagtagagatggggtttcaccatgttagccaggatggtctccatctcctgacctcgtgatccacctgcctcagcctcccaaagtgctgggattacaggtgtgagccaccacacccggccacaaatttgtagtttcttaaaacattatgagatttttttgcaattttttttttagctcatcaggtattgttagtgttagtgtattttattatttatttatttatttatttatttttgagatggagttttgctcttgttgcccaggctggagttcagtggtgcaatctcggctcactgtaacctccgcctcctgggttcaagcaattcttctgcctctgcctcccgagtagctgggattataggcacgtgccaccacatctggctaatttttgtatttttagtagagacggggtttcaccgtgttagccaggctagtcttgatctcctgacctcagtgatccgcctgccttggcctcccaaagttctgggattacaggcgtgagccactgtgcccggccagtgttagtgtattttatgtgtggcccaagacaattcttcttccaatgtggcccagggaagccaaaagattggacacccctgctctaagtgacttgtgagctttttttctgagacgcctggaatagtttgttactcatgtttttaaatgattaacttgagcaattattactattttttgagacagagtctccttctgtcacccaggctagagtgcagtggcgcaagcatggctcactgttgccttgatcttctgggctcaagaggtcctcctgcatcagtgtcctgagtagctgggactacaggtgcacaccaccatgcctggctaatttatttttattttttgtagagaagggttctcactacgttgcccaagctggtctcaaactcccgggcgcaagagatcagccttcctcggcctctcaaagtgctgggattgcaggtgtgagccactgcacccagctggacaattaacctgagctaatttgaaaaattttgatgttctcaagatgactagggaactggagccctcaatcaacagtcctcagtatcttttctgcagggagggctagatacctcctctgtgacacttaacttccattatccaaggtgcttaggctgtgcccctcaccacgtgtacatgaagaatgcatgcccagccaatcacagtggctcatgcctgtaatcccagcactttgggaagtccaggcgggcagatcacctaaggtcaggagtttgagaccagcctggccaatgtggtgaaaccccatctctactaaaaataaaaaattagccggacatggtggtgcggacctctagttcctgctactggggaggctgaggcagaagaattgcttgaacccaggaggtggaggttgcggagagccaagatcataccactgcactgcaggctgggcaccaaagcaagactccatctcaaaaagaaaaagaaaaaaagaaaaagaaaaatgtattccctctttcagccacgttgagttttcgcaacagcgctacaaacagatgatgtgttctgatagaaataggctaggttcctgcagcaggtgctgtcattttggaagagctcaagccgtctcacaccctcaggtgggcctgctcatacctgtggtgtgggttctacctggctgatggctgagggtctagaattgtgtgcagtagcgttgatcgtgtactgaggttgcaaacagtgaacagcaccatctggacatcgtggattagaatgcaggagcttcccaaggctgctatgacaaaggaccacaaactcagtggctgcaaaacacacatttatttatttgttgatagagccttgctctgtcacccaggtgggagtacactggctcgatcttggctcactgcaacctccgtctcctgggttcaagtgattctcctgcctcaatctcctgagtagctgggattataggcacacaccaccctgcccagctaatttttttttttgagacacagtctcgctctgttgtccaggctgaagtgcagtggcacgatctctgctcactggaacctccgcttcccaggttcaagcaattctctgcctcagcttcccgagtagctgggattacaggcgccggccaccacacctggctaatttttgtatttttagtagagatggggtttcaccatgttgaccaggctagtctggcgactcctgacctccagttatctgcctgcctcggcctcccaaagtactgggattacacgtgtgagccaccacgcccggcccacacatttatcatcttacagtttgggaggtcagaagtctgaaataaattttaggggcagggcgggttctaggagtctttcttgctttttctagccaccagaggctgcccatcttccttgcctcttggcctgatctttttttttttttttttttttttttgagactgagttttgcttttgttgcccaggctggagtgcaatggcgcgatcttggctcaccacaacctctgcctcctgggttcaagcgattctcctgcctcagcctcccgagtagctgggattacagacatgtgccaccacgccaggctaattttgtgtttttagtagaaacggggtttctccatgttagtcaggctggtctcgaactcctgacctcaggtgatctgcctgcctcggcctcccaaagtgctgggattacaggtgtgagccaacgcgcccggcccttggcctgatcattgtaaagcctgcttccactttcccatctcctttgactttgaccttttgtatccctttttcacttattaggaccttttaaggacattgtgcccacctggatcacccaggagacgctccccaactcaaaatcattaactgaatcacacctgcaaagttgcaaagtccttttagctgtgtaaggcactgtattcacagatcctgggggcgaggacgtgggggtctagagacgcatatcttcgggggccatgatctgtctcctatattagggacatagcagaagtcccactgaccagatagaggagacttaatagagtgacgaagaaactgtaaaaagctaagtgggaactcaacatttttctgctcacagctctcaagggaaagaccaaagtcctccccggtggccttcaaggtattatatatcacccctctgacctcaactccccctcccctttgctcagtgggccccaaccacaccagccccttcctgctccctggacacctctaagccttttccggcctctgggtttgactttccctcctagacccatctgtccttggagtctcatctccgattccagctcaaatgtcatcttctctgagaggcccaccgcagtggccccagtgagagagtatcctctctccccgcctcccaccacatggctgctggtcactctcctataaggaatcatctgaaattatctgctttagttattcatttcttgcctgtctcccccagataggaattttccctccctgagaccaccaactgggtctgccatgtacaccgctgggttctgcagctctgagcaacctgtccggctgctttgtaggtgcccagcacaggtcactcctgtgcccgccaggactggtcagagtggaacagacagggcggagggggcagggcagccctgcccgcctggacagcctggagaaggcgggaaaacgaggcgggaaaagacagcaaacaagccctgcgggtgggtagagtggggagccctggcaggccctgacgccaggcagtggggcttggggcgatcgggcgagccatcagggtgcaggtggtctcctaggggccccccacattccctcgcagtatttacacattgattccggccttcttagacctactggtcaatgcgtgcgagtggggggctgcgaacggacttggacttaagagttcagggggtctgtaccctgggggtccccaaggctcctggggtgtccacgtgcggggggtgaccaggccctgccacgcagcccctttgcacgctgggcgcgcccagcagagcgcgcagggctgggcggagccgtggcccactaggcggaggcgccgtggacagaggcgggggcgccccccaccctctttctcgcttcccgccactgcgtcggccaatcaggaggcaggcgcccgcccccggcacggcctcctgcggccccgcaactcccaaatgccgagttttcgcgggaaaaaaatcagagcagctggcagcgcggcgggcagcgtttgccgagcgggcgctccgggtcgcacgcaagtccgcgcggggtccgggccacgcacgcggtttcatcgccatccccagccgggccacgcgcgcaggcagacaagctgttcgcggcgaccggagaggtgagcgggcgggccgggtcggggtgccagcccgggccgggcgcacggggctcgggaactttgcaaaactttcccgcgcggccagcccgggcgcacgcatgtcccgcactctgtcccgggatccagggcctccccttccacctaaccctcgggaatcgttccccggcacacatccggctggagccgggaccagcgctgcgtccccggagcccggcggggggtcgagcgcgccgggtgggggagggcctggcgagccgccggggaggatgtcaggctccgcgcctgcgcgcggggcgccccgcgattcaattgtcgcgcccgagcccgatttcgcgcgccctgagttccccgggagcatctgggccaatggggagcgagcggggcggggcggccgggtgctgcggagccaataagaggcggctcaagtgaaggggggcgggacttgacgagcgggggccccctctgtagtcccggcggcgggggtgggcgtgggctcgctggcgcgacccgcgcgggccagtgggagtgcgggagggacgccgagggtccagggtttggaggggcgcgagctgccgggggttggaggtcgaggtgagtcgcggggcgcgcgcgctcgcgggtggccgggacggggcggccggttaccatggccaccgcggggcgggcccggtcgcgcacgcgcgcggggggggccggcaaggagggggggcgtgggcaccgaggggtcccggggtccgcggatctcgggtggggtttttccctctcagtggcacttggttgagttcccccgggacttctgaagttccggcccgcgctggacttctgggattccctcttccgtaaataggaatccgaggaatgaatgaatcaatgaatgaatgaataaacgaaccaactcggccacttggcccgggcctcctttctcctctggtcgtggggaaggagggatgggttggaccttctgcttttctttcaattccctcttttcattctccttcctcctcaatcttcaacacttggctagtcgttaatgccttaagtgcttaatttgttgtgtctggtcctggccagggtctggctgtacaggaggactggaagggcatcctgggagtttcctggtgtccacaggccggacaaaagcaaccccgactccttagagcatggcatggctcagaggtgctggtaaaactgatgggggtttttgctgtccctcccctcagcgccgacaccatgtggatccaggttcggaccatggacgggaggcagacccacacggtggactcgctgtccaggctgaccaaggtggaggagctgaggcggaagatccaggagctgttccacgtggagccaggcctgcagaggctgttctacaggggcaaacaggtacacccgccgccagcacctttgttctatgcctggtccaggcctcgcgcctctgcagccaccagccgatactttctcc

SEQ ID NO: 2889 - DNA, 6000 bp, Homo sapiens
attttttgagacagagtctccttctgtcacccaggctagagtgcagtggcgcaagcatggctcactgttgccttgatcttctgggctcaagaggtcctcctgcatcagtgtcctgagtagctgggactacaggtgcacaccaccatgcctggctaatttatttttattttttgtagagaagggttctcactacgttgcccaagctggtctcaaactcccgggcgcaagagatcagccttcctcggcctctcaaagtgctgggattgcaggtgtgagccactgcacccagctggacaattaacctgagctaatttgaaaaattttgatgttctcaagatgactagggaactggagccctcaatcaacagtcctcagtatcttttctgcagggagggctagatacctcctctgtgacacttaacttccattatccaaggtgcttaggctgtgcccctcaccacgtgtacatgaagaatgcatgcccagccaatcacagtggctcatgcctgtaatcccagcactttgggaagtccaggcgggcagatcacctaaggtcaggagtttgagaccagcctggccaatgtggtgaaaccccatctctactaaaaataaaaaattagccggacatggtggtgcggacctctagttcctgctactggggaggctgaggcagaagaattgcttgaacccaggaggtggaggttgcggagagccaagatcataccactgcactgcaggctgggcaccaaagcaagactccatctcaaaaagaaaaagaaaaaaagaaaaagaaaaatgtattccctctttcagccacgttgagttttcgcaacagcgctacaaacagatgatgtgttctgatagaaataggctaggttcctgcagcaggtgctgtcattttggaagagctcaagccgtctcacaccctcaggtgggcctgctcatacctgtggtgtgggttctacctggctgatggctgagggtctagaattgtgtgcagtagcgttgatcgtgtactgaggttgcaaacagtgaacagcaccatctggacatcgtggattagaatgcaggagcttcccaaggctgctatgacaaaggaccacaaactcagtggctgcaaaacacacatttatttatttgttgatagagccttgctctgtcacccaggtgggagtacactggctcgatcttggctcactgcaacctccgtctcctgggttcaagtgattctcctgcctcaatctcctgagtagctgggattataggcacacaccaccctgcccagctaatttttttttttgagacacagtctcgctctgttgtccaggctgaagtgcagtggcacgatctctgctcactggaacctccgcttcccaggttcaagcaattctctgcctcagcttcccgagtagctgggattacaggcgccggccaccacacctggctaatttttgtatttttagtagagatggggtttcaccatgttgaccaggctagtctggcgactcctgacctccagttatctgcctgcctcggcctcccaaagtactgggattacacgtgtgagccaccacgcccggcccacacatttatcatcttacagtttgggaggtcagaagtctgaaataaattttaggggcagggcgggttctaggagtctttcttgctttttctagccaccagaggctgcccatcttccttgcctcttggcctgatctttttttttttttttttttttttttgagactgagttttgcttttgttgcccaggctggagtgcaatggcgcgatcttggctcaccacaacctctgcctcctgggttcaagcgattctcctgcctcagcctcccgagtagctgggattacagacatgtgccaccacgccaggctaattttgtgtttttagtagaaacggggtttctccatgttagtcaggctggtctcgaactcctgacctcaggtgatctgcctgcctcggcctcccaaagtgctgggattacaggtgtgagccaacgcgcccggcccttggcctgatcattgtaaagcctgcttccactttcccatctcctttgactttgaccttttgtatccctttttcacttattaggaccttttaaggacattgtgcccacctggatcacccaggagacgctccccaactcaaaatcattaactgaatcacacctgcaaagttgcaaagtccttttagctgtgtaaggcactgtattcacagatcctgggggcgaggacgtgggggtctagagacgcatatcttcgggggccatgatctgtctcctatattagggacatagcagaagtcccactgaccagatagaggagacttaatagagtgacgaagaaactgtaaaaagctaagtgggaactcaacatttttctgctcacagctctcaagggaaagaccaaagtcctccccggtggccttcaaggtattatatatcacccctctgacctcaactccccctcccctttgctcagtgggccccaaccacaccagccccttcctgctccctggacacctctaagccttttccggcctctgggtttgactttccctcctagacccatctgtccttggagtctcatctccgattccagctcaaatgtcatcttctctgagaggcccaccgcagtggccccagtgagagagtatcctctctccccgcctcccaccacatggctgctggtcactctcctataaggaatcatctgaaattatctgctttagttattcatttcttgcctgtctcccccagataggaattttccctccctgagaccaccaactgggtctgccatgtacaccgctgggttctgcagctctgagcaacctgtccggctgctttgtaggtgcccagcacaggtcactcctgtgcccgccaggactggtcagagtggaacagacagggcggagggggcagggcagccctgcccgcctggacagcctggagaaggcgggaaaacgaggcgggaaaagacagcaaacaagccctgcgggtgggtagagtggggagccctggcaggccctgacgccaggcagtggggcttggggcgatcgggcgagccatcagggtgcaggtggtctcctaggggccccccacattccctcgcagtatttacacattgattccggccttcttagacctactggtcaatgcgtgcgagtggggggctgcgaacggacttggacttaagagttcagggggtctgtaccctgggggtccccaaggctcctggggtgtccacgtgcggggggtgaccaggccctgccacgcagcccctttgcacgctgggcgcgcccagcagagcgcgcagggctgggcggagccgtggcccactaggcggaggcgccgtggacagaggcgggggcgccccccaccctctttctcgcttcccgccactgcgtcggccaatcaggaggcaggcgcccgcccccggcacggcctcctgcggccccgcaactcccaaatgccgagttttcgcgggaaaaaaatcagagcagctggcagcgcggcgggcagcgtttgccgagcgggcgctccgggtcgcacgcaagtccgcgcggggtccgggccacgcacgcggtttcatcgccatccccagccgggccacgcgcgcaggcagacaagctgttcgcggcgaccggagaggtgagcgggcgggccgggtcggggtgccagcccgggccgggcgcacggggctcgggaactttgcaaaactttcccgcgcggccagcccgggcgcacgcatgtcccgcactctgtcccgggatccagggcctccccttccacctaaccctcgggaatcgttccccggcacacatccggctggagccgggaccagcgctgcgtccccggagcccggcggggggtcgagcgcgccgggtgggggagggcctggcgagccgccggggaggatgtcaggctccgcgcctgcgcgcggggcgccccgcgattcaattgtcgcgcccgagcccgatttcgcgcgccctgagttccccgggagcatctgggccaatggggagcgagcggggcggggcggccgggtgctgcggagccaataagaggcggctcaagtgaaggggggcgggacttgacgagcgggggccccctctgtagtcccggcggcgggggtgggcgtgggctcgctggcgcgacccgcgcgggccagtgggagtgcgggagggacgccgagggtccagggtttggaggggcgcgagctgccgggggttggaggtcgaggtgagtcgcggggcgcgcgcgctcgcgggtggccgggacggggcggccggttaccatggccaccgcggggcgggcccggtcgcgcacgcgcgcggggggggccggcaaggagggggggcgtgggcaccgaggggtcccggggtccgcggatctcgggtggggtttttccctctcagtggcacttggttgagttcccccgggacttctgaagttccggcccgcgctggacttctgggattccctcttccgtaaataggaatccgaggaatgaatgaatcaatgaatgaatgaataaacgaaccaactcggccacttggcccgggcctcctttctcctctggtcgtggggaaggagggatgggttggaccttctgcttttctttcaattccctcttttcattctccttcctcctcaatcttcaacacttggctagtcgttaatgccttaagtgcttaatttgttgtgtctggtcctggccagggtctggctgtacaggaggactggaagggcatcctgggagtttcctggtgtccacaggccggacaaaagcaaccccgactccttagagcatggcatggctcagaggtgctggtaaaactgatgggggtttttgctgtccctcccctcagcgccgacaccatgtggatccaggttcggaccatggacgggaggcagacccacacggtggactcgctgtccaggctgaccaaggtggaggagctgaggcggaagatccaggagctgttccacgtggagccaggcctgcagaggctgttctacaggggcaaacaggtacacccgccgccagcacctttgttctatgcctggtccaggcctcgcgcctctgcagccaccagccgatactttctccctcccacctccccccccaacaacctcgtccggtcccacttcatctctcccggaaggagaagtccacagaaacctcaaatgcctgcgagaggaaggaacaaagggaggactcacagattgacacgctgggctggcggctggccctcgaatctatagggtctgggcttttaaacttcttttttcaaagctccgcctcaaaataatggctagagaaagaagttttggaggtggccgatggaaggctgaggaattttcgagaaagggcccaggaccatctggtagctaggacggaggggaccaggttttcttttttaaacatccaccaccaattgctctcagcctgtaccggttaagcatcagaccctgcgagtgtttgtttctaaaaatttggattagcttattcagagtctggagatggcgcttgctaatcaggaatttccgccaccctgagcctgctgtgctgcggctgctgctgacctggggcgtgtggtccccgaggggtccaccgaccctcgtctctttctctgttctgtctccagcccctcgttgcatttaaaatgtccccctttgatttcatagctgccacgtttggggcgctccctccattggcacctgggggtggaggtgctactttggttggtgtttttgtgggggactgtgggacctactgggagtggggtttcccggcaggatgagacagtgtgatcgaaggtgtaggtcccatctgctggagttggttggaccgtggggacgggcgtagactactggaactggattaaaagtcgtcagttgagctgcgtgtaccccactgtgttgttgttggattttgaaccgggtactgctgccatctggtgtctaggttggaaaataa

SEQ ID NO: 2890 - DNA, 6000 bp, Homo sapiens
gcgcctggcctaaaattttcatctaaaacccatcccggatacaagaatccagcctcctccatccctctggcaggaagaagagatcacttaccttctcaggtggccacagctccctctgtaaggaaaagtcacaaatgggacacgagccaaaggcctccagagccccacatcagggcagggtcggcttatgggaggcagacattagtccccagcagactgctgccccacaccctctcccacccctggaatgaaccctcaaacactcctcttatgcccaccttgcgctgtatgacatcgtcctcaaaccactcggcctgattggaaacccagaacatagccacagggaaagtgaggtagattatcatctggaatggcagagggtgggtgaggtgagctccccccaagcaatgtgcagaggctcctcagagcctgggggacccatcctactgcagagtccagaagcgcctcgttacggccgacccaagaatcccagaactcccaccaagggtacagaaacctcgcaccctaaaacctaactcctataatccaggaggcctcattcctgaaagttccctctgagctggagtcttcctctcaaacacagacagacacacagacgccccagctacaatcaaaagcatctcctcgagacctcattacccatccccacttaagatcccgggagcacccccaaacccaggaggcgtcactcttcaactccacttctcgaagtctaggaatctccctgtcatagacacccacccaccacgagcccgagagctcccccaggatcttaagtcttccttctttagagcccccttctcagctcacccctctctgaggtccttcctcggaccagccctctcacagcccccaaacccagaagcccaaatccgagaacccccccagcccagcgtcccctctcctggatttccaaccagaaaggttcctctcaaatcttaagagctttctccttggagctccctcttcctttgaagtccccccatttccaacctcatcttcagatccaggaagatcccctgcccagcctcccaacccactcctgtgtccactgacccgaaatatctccagcttcacccccatctcgtttctcccggtcaacaaagccagttccgcccaaagccgaccctccagcaagacagaagctcactggtgttttgcacgctccattgctgaagctgattggccaatgtgtatcctgatggcgcatcttctggcgcctctattctgcttccggtcgctggcgtcgtcgaaaagaagtcaataacgtgggcctgtccgtcaaaaatgatttaaccaatagaaaacgggtctggctcggaggggcgggccgtcagtggtagacgtcataagcgcgcgactctctcctgtacctgggcatccagaaaaatggtggtgatggcgcgactctcgcggcccgagcggccggaccttgtcttcgtgagtccacagaggagccgggggtggcctgcgttggggcattgggacctggacgccgcaggggatcgaggctgggtcggcaaggagatttaggccgaaactgccaggccaaggtctgggaaccctaatgggccagagaccggatcgtcatgtccgcaccgaactgtccaggagtaaaaatatggtgttgtatcttcgggtctgagtagaaaaccactgtcgaagggaagcgtctagcctcccgaaccaggggcggaaatgggggcgtgcagggaatgggagaggaggaagatcgcataactgaaccttgagaggtgaagatcggtgtctgaagtaaaggcttgcttacgaggccagggttctggtttctgggatgaaggcttggttttctggatagcggtctctaggcctggactgcagcatgacagtttctggggtggtggccaggctagaagaaccctggtgatgtggagcttgtcaggcgatggccagtgaaatacttactctctggagtagaggcgtgacatcttcaccagattcttggtgtgcagagttaaaggcttggcttctggtgtataactcctcctgtgagataaaggcctagcttttaatttctggggcagagttgagctagacgctggctagtgggatcctgggggcggggctagtggcttggaatctggacctgagagccctggtggctggggtaaagatctggtcatctgggcctggggtggagatgggtcagatggtgacagtgggagtctgaggggccaaaggcctggtgtctgggaagaggcacgttttgaagaagtggggtctggtgtccaggactggcatctgggccagggccttggtatctaaggagtctgaccatctggggcagaaagcgagtggtgatgcggactcattcctggcccagagccctaatgactgagaagtctgatgatttgggttcgattttgggtagttgaattctgaggggtaaaggtctgggccactgtcttggtgtcgggcatctggtttggtgcctgggcatctggtgacctgacttccttggtgggtggtgggatctaggtaaaagtccggagtttggacctgagccccagcagtgggatggtgctgcacacaggctctgagggtaggcctctcttcttcccattccctggccctggcaggaggaagaggacctcccctatgaggaggaaatcatgcggaaccaattctctgtcaaatgctggcttcgctacatcgagttcaaacagggcgccccgaagcccaggctcaatcagctatacgagcgggcactcaagctgctgccctgcaggtgggaatggctccagctgccctgcccaccagcccccaccccacctggtccagttataacaaaactgccaagtgggtcccgggtcccgggtgattgcttcgtgtttcatcactgacctgtacatcccttgatgggtcagcacaccttctctgatgtcccagtctgtccctgtcattgctgagacatgtcacccctcccacaccccttcttcccacatttgccaactggggcagggcaaatggttctgggggtgtccataaagctgaccgatcagcatctgtcccctcctattccccagctacaaactctggtaccgatacctgaaggcgcgtcgggcacaggtgaagcatcgctgtgtgaccgaccctgcctatgaagatgtcaacaactgtcatgagagggcctttgtgttcatgcacaaggtttggggctcggcgaggggatgaatcgggaagtggagctcagtccatggtggtgggtggggcggggacaggggctgggctcagcatgttagggatgggggcttggattcctgttgcttctttgcatgggaagttgggctggactcagtcctggagctgggggtttctgggtcccgccgcatttatgtggtggccccaggtgtggctcagccacaggacatcgagtgtctgtggccaggccatggagtccgtggcttagccccagccgcctctccccacacccccagatgcctcgtctgtggctagattactgccagttcctcatggaccaggggcgcgtcacacacacccgccgcaccttcgaccgtgccctccgggcactgcccatcacgcagcactctcgaatttggcccctgtatctgcgcttcctgcgctcacacccactgcctgagacagctgtgcgaggctatcggcgcttcctcaaggtgagcctagcaggtgcgctggttccccaggttagtttccagaaacggcctcactgtgacactagctccgcgtaggatgtcacccagcagacgggatgtgggaagaggctcctggagatgcatgtgttttgttgttgtccgtgattcatgtctttattttccaaatagtttgttcacactggtttcacattaggcatagcgatgggtgctgaggacagtgtgactaagacactccctgcctgcacggagcttttagtctaagtaggaagacagatgcatatgagctgatggcatgaactagagtaaaaccacagccatgaagagggccaggaataggggtggggagaagcaggcagggtggagagtggaagcaccagccgggcgggagtggggcatggtttgctcaaacttaaagtatctgttttatgacgtttggattctaagctggaccagtcaggactgaggctggacccgtggggcccaggctggacactatagtcaaggctggacccatgggatcaaggctgacccaaaggggccaaggctagaccagtcaggactgaggctggactagtggagccaaggctggacccattgtgggttgggggtcaattctaacccaaaaggaccaaggctggaccattggggctgagactggaccaccgcagtcaaggctgtgcccttgcgggtcaaggctaacccaaaaagtccacagctggtctagtcaggactgaggctggaccagtggagccaaggcaggacccacagggggttgagcctaacccagtggggccaaggctagaccagtaggaaccgggctggaccagtggggctgaggctggtttgacagggcttgcttttgcccaagacactcataaatgggtggggggggacgccccgaagccactgaatcgggaggtgggcgtagccctgccaccccactgactgcctgaggggtggctcggtccccagctgagtcctgagagtgcagaggagtacattgagtacctcaagtcaagtgaccggctggatgaggccgcccagcgcctggccaccgtggtgaacgacgagcgtttcgtgtctaaggccggcaagtccaactaccaggtgggcctgccgggagccggcaactgggtgggagggccaccccctccatgactgagcctgagactctcccccactgccccatgccctgcagctgtggcacgagctgtgcgacctcatctcccagaatccggacaaggtacagtccctcaatgtggacgccatcatccgcgggggcctcacccgcttcaccgaccagctgggcaagctctggtgttctctcgccgactactacatccgcagcggccatttcgagaaggtgcatgctggcacacggggctctgggttcggggcggggtctccctccgacactcggggacacatgttgacacatgcacaggcagaaaacatgccatttatggctgggtgtggtggctcacacctgtcatcccagcactttgggaggccgaggcggtaggatcacttgaggtcagcagttcaagaccagcctggccaacatggtgaaaccccatcactactaaaaatacaaaaattagtcagacatggtggtgcgcgcctgtaatcccagctactcgggaggctgaggcaggagaatcgcttgaacttgggaggtggaggttgccgtgagctgcgatcgcgccacggaagtccagcctgggtggcagagcgagactccatctcaaaaaaaaaaaaaaaaaaaaaaagtgccatttttgacagacatgcatatccctgcacacgattactatcctgctgagggtgggggagcactcctgcccgcaggcacgtcagccttggagtcagccacatttgcgttcagggttcaccctctggctctgcggccttggccccactaaggtggggtgtcttcatttgtaaaatcagggtgacagttactgcctgtcaccaatcagctcagtgacgcaggcacagcactgaggaggtacgtggtgtgagggccactccctcaggggttagctgactgtggctcttggcaggcagtggagtggcaagctcaggggatggcctgggggcaggtgggtgcagagggggccagagccgagagcggggaggctcaggaacccagggaagataggttgggagcctcgaaagccaaacgggctggccatgctcctggctgggggagccgccagtggggtgtgggcggtatgcgcttcgcagcgccccttccaggggcacgtgtaggccaaggctgtcggaggcagcagggcaagacccg

SEQ ID NO: 2891 - DNA, 6000 bp, Homo sapiens
caaaagtcaacttatgtgttttaagccatctggtctatgacactttgttctggcaggcctaggaaagggatacacgtactgaggagggggacacttcattggcatagagggagagagtgtgaacttggccttttgtggaacagaggaggctcgggcagaggtggtgatagtgcagcccattcattctgagatgaaacttccactggtttccgtaaaggcgtcttggggagggaagggaaggggatggggacctcccagtggtatcccctgcttgggcactgagggaaagccacagtggctcgggggaaaaggcagggacgtcctctccccgcctgcctctgtccccagggagtctcgcctcctgttcccacctggggctagggtgatagaggagaggagatagctcaacctggcatttaggtggtgtgggaacaggagaccccagactttcttgttttggggtctggggcaggcaaccaggctccagggacagtgagttgaaggaagggtggctgggagaccccttgacttgctgccaaggagacagagctggagctagggtggccggtggtgtctgaggcaggtgcagagagggagggagggaaggggcctttgactccaacctcctttttctgtaccgactgcaggtggcagctgccctttcaggagccagtgggggaacctgggtggctgggtggggacacctgcaagtcctccctaagccagctaccaccctacactgttggcctcccttctccaactgtggggatgctgctcaggccttttgtgacatcacacctgagagtccctggggtccagtcattgctgctgggcacagcgaggtccaagctcaggtcgccctgccccctacccaccatgccagatccagcatcgttgtgggcaaacaattatctggatgatctttatggggcttaagcttgggtgggagcagatggggcatgagctggggatttggggatggggggaatccacacccccacgtcctggacgtttaaaaggccctctctggcactgggccggggcagaggccagcagaaaagtgactggagtccagggacatgatggatcaggaggagaagacggaggaaggctcaggcccctgtgccgaggtgagagggccctgcccccaccccacccccagctcaaggtctcagagcccatgattgacaagactagtttgtagggcacctaattaacgagtgagtctcctaggaccccctgacccagttgtggctgtagaaaggggctggtgggcttgggggtctgagtgccaggccccagggcagagggcagggctctccgtgtggacccctattgatgggagatgctgggacctgggggtagctcctgggccatgtttccctgattcgtgtcccagctcccaggccacactcatcaggccccaatctaggacggcgggacacgcatcggagcctgtcccttgaagcggtaccacgtgaagtggcactgctggccagggcccctggggcgggggccgggattgggaaggagactcatgtctcattcagaacagctctgcagagaggatcggcggggaccatggtgagagctgaggaagtggggacggcaggccccggggtcagggtgtgagcaagctggctaggaagtttggggaggggcccccaagctgaagggccaaccagactgagcgagtctgtccccaggcgggctccccagaccaggagggcttcttcaatctgctgagccacgtgcagggcgaccggatggagggacagcgctgttcactgcaagccgggccgggccagaccaccaagagccgtgagcatgggcacgggggtgctgtccatggggcgtgaacggggtgggagtgcagggcaagtggtcatctggagggcctgggggcacgggatgtgggaggtggttgtgcaccctgaagcatctgtgtgggggtgaaggggtagggttgggggcccccactccggctgtgtcctcccaagtctgtgaacgtccacgcagagagcgaccccacccccgagatggacagcctcatggacatgctggccagtacccagggccgccgcatggatgaccaacgtgtgacagtcagcagcctgcccggcttccagcccgtggggtccaaggtaggtgatgttctggcgatgtcgaggagaaacccgccaggcagtgctctccgatcctgccctccaccccagccaggagggaacagggcctgccccatctctgtccatccgctgccctgacttcagatgggaggaccaaggcccaggcagtggctagaggggcccaaggttatacaggggccatgctagtgtaagacccatggctggaacttgtggctcctgcccccaagtctgaaggttctggggaggccaaagggagaaaataggaccccttcctaggaaagtatcccagggaggaagtcacgtaagctcacacataggatatatacatctgtatactcacatctgttgacttcacacatacacgaagcttgggttctgatcaagatcccagcgagggccccaagacctgccacctcacactcaaatgccaccctaaatggcagatattgagggtaaacatagaccagtgctcacaatgaggtgggacacggtggctacctgcaccctctctccattgttcgccacctgtggccggcactgcccttgagccctccccctggctgacccctcttcatccacaggacggagcacagaaacgagctgggaccctcagtccccaacccctgctcacccctcaggacccgaccgctctcggcttccgtcggaacagcagcccccagcccccgacacaagccccctgagggcctgaggcatcctgggtctcactcggcccccaaaaactgataaaagaataaaacacttaaatgaataacaaggaactgagtatatgtatatttcatcaggggaggggctaggactcccacttggaggcctcaggagttctgctgggcgtcgcgaaggagcttctcctcccgccgcttccgtaacctctctttgaattcctctatctcttgaagctaggggtggagaagcgggtgggacaggaaggggggaggggcacacacctcagagccgggaccacccccccccgcccacctctcccaccaccctgccccagaccacggcttcagggttcagtgtcttcactggaagccccctgccaattacaaaggggtccgcgtgggatccgcttcactcttccaggagaaggcaataaggaaaccatctactcctctgctctcggttccttactcatggctgagagtaaaatgtttctttttgagacaaagtctcactctattgcccaggctggagtgcagtggcgtgatcttgggctcactgcaacctccacctcctgggttcaagtgattcttctccctcagcctcccaagcagctggaattataggcgcctgccaccatgcctggctaagttttgtatttctgtagacatggggtttcgccatgttggccaggctggttttgaactcctgacctcaagtgatctacccacctcagcctcccatgccctgggattacaagcatgagccactgcgcctggcctaaaattttcatctaaaacccatcccggatacaagaatccagcctcctccatccctctggcaggaagaagagatcacttaccttctcaggtggccacagctccctctgtaaggaaaagtcacaaatgggacacgagccaaaggcctccagagccccacatcagggcagggtcggcttatgggaggcagacattagtccccagcagactgctgccccacaccctctcccacccctggaatgaaccctcaaacactcctcttatgcccaccttgcgctgtatgacatcgtcctcaaaccactcggcctgattggaaacccagaacatagccacagggaaagtgaggtagattatcatctggaatggcagagggtgggtgaggtgagctccccccaagcaatgtgcagaggctcctcagagcctgggggacccatcctactgcagagtccagaagcgcctcgttacggccgacccaagaatcccagaactcccaccaagggtacagaaacctcgcaccctaaaacctaactcctataatccaggaggcctcattcctgaaagttccctctgagctggagtcttcctctcaaacacagacagacacacagacgccccagctacaatcaaaagcatctcctcgagacctcattacccatccccacttaagatcccgggagcacccccaaacccaggaggcgtcactcttcaactccacttctcgaagtctaggaatctccctgtcatagacacccacccaccacgagcccgagagctcccccaggatcttaagtcttccttctttagagcccccttctcagctcacccctctctgaggtccttcctcggaccagccctctcacagcccccaaacccagaagcccaaatccgagaacccccccagcccagcgtcccctctcctggatttccaaccagaaaggttcctctcaaatcttaagagctttctccttggagctccctcttcctttgaagtccccccatttccaacctcatcttcagatccaggaagatcccctgcccagcctcccaacccactcctgtgtccactgacccgaaatatctccagcttcacccccatctcgtttctcccggtcaacaaagccagttccgcccaaagccgaccctccagcaagacagaagctcactggtgttttgcacgctccattgctgaagctgattggccaatgtgtatcctgatggcgcatcttctggcgcctctattctgcttccggtcgctggcgtcgtcgaaaagaagtcaataacgtgggcctgtccgtcaaaaatgatttaaccaatagaaaacgggtctggctcggaggggcgggccgtcagtggtagacgtcataagcgcgcgactctctcctgtacctgggcatccagaaaaatggtggtgatggcgcgactctcgcggcccgagcggccggaccttgtcttcgtgagtccacagaggagccgggggtggcctgcgttggggcattgggacctggacgccgcaggggatcgaggctgggtcggcaaggagatttaggccgaaactgccaggccaaggtctgggaaccctaatgggccagagaccggatcgtcatgtccgcaccgaactgtccaggagtaaaaatatggtgttgtatcttcgggtctgagtagaaaaccactgtcgaagggaagcgtctagcctcccgaaccaggggcggaaatgggggcgtgcagggaatgggagaggaggaagatcgcataactgaaccttgagaggtgaagatcggtgtctgaagtaaaggcttgcttacgaggccagggttctggtttctgggatgaaggcttggttttctggatagcggtctctaggcctggactgcagcatgacagtttctggggtggtggccaggctagaagaaccctggtgatgtggagcttgtcaggcgatggccagtgaaatacttactctctggagtagaggcgtgacatcttcaccagattcttggtgtgcagagttaaaggcttggcttctggtgtataactcctcctgtgagataaaggcctagcttttaatttctggggcagagttgagctagacgctggctagtgggatcctgggggcggggctagtggcttggaatctggacctgagagccctggtggctggggtaaagatctggtcatctgggcctggggtggagatgggtcagatggtgacagtgggagtctgaggggccaaaggcctggtgtctgggaagaggcacgttttgaagaagtggggtctggtgtccaggactggcatctgggccagggccttggtatctaaggagtctgaccatctggggcagaaagcgagtggtgatgcggactcattcctggcccagagccctaatgactgagaa

SEQ ID NO: 2892 - DNA, 6000 bp, Homo sapiens
tccctctcgcttgcctgaccctcttccccagcccgcctgtcctccacctggctcgcccaccccagctcaggtcccctctctctacccagccctgacgggtcttgccctgctgcctccgacagccttggcctacacgtgcccctggaaggggcgctgcgaagcgcataccgcccacaccccactggcggctcccccagccaggagcatggccagcccgtttggctttcgaggctcccaacctatcttccctgggttcctgagcctccccgctctcggctctggccccctctgcacccacctgcccccaggccatcccctgagcttgccactccactgcctgccaagagccacagtcagctaacccctgagggagtggccctcacaccacgtacctcctcagtgctgtgcctgcgtcactgagctgattggtgacaggcagtaactgtcaccctgattttacaaatgaagacaccccaccttagtggggccaaggccgcagagccagagggtgaaccctgaacgcaaatgtggctgactccaaggctgacgtgcctgcgggcaggagtgctcccccaccctcagcaggatagtaatcgtgtgcagggatatgcatgtctgtcaaaaatggcactttttttttttttttttttttttgagatggagtctcgctctgccacccaggctggacttccgtggcgcgatcgcagctcacggcaacctccacctcccaagttcaagcgattctcctgcctcagcctcccgagtagctgggattacaggcgcgcaccaccatgtctgactaatttttgtatttttagtagtgatggggtttcaccatgttggccaggctggtcttgaactgctgacctcaagtgatcctaccgcctcggcctcccaaagtgctgggatgacaggtgtgagccaccacacccagccataaatggcatgttttctgcctgtgcatgtgtcaacatgtgtccccgagtgtcggagggagaccccgccccgaacccagagccccgtgtgccagcatgcaccttctcgaaatggccgctgcggatgtagtagtcggcgagagaacaccagagcttgcccagctggtcggtgaagcgggtgaggcccccgcggatgatggcgtccacattgagggactgtaccttgtccggattctgggagatgaggtcgcacagctcgtgccacagctgcagggcatggggcagtgggggagagtctcaggctcagtcatggagggggtggccctcccacccagttgccggctcccggcaggcccacctggtagttggacttgccggccttagacacgaaacgctcgtcgttcaccacggtggccaggcgctgggcggcctcatccagccggtcacttgacttgaggtactcaatgtactcctctgcactctcaggactcagctggggaccgagccacccctcaggcagtcagtggggtggcagggctacgcccacctcccgattcagtggcttcggggcgtccccccccacccatttatgagtgtcttgggcaaaagcaagccctgtcaaaccagcctcagccccactggtccagcccggttcctactggtctagccttggccccactgggttaggctcaaccccctgtgggtcctgccttggctccactggtccagcctcagtcctgactagaccagctgtggactttttgggttagccttgacccgcaagggcacagccttgactgcggtggtccagtctcagccccaatggtccagccttggtccttttgggttagaattgacccccaacccacaatgggtccagccttggctccactagtccagcctcagtcctgactggtctagccttggcccctttgggtcagccttgatcccatgggtccagccttgactatagtgtccagcctgggccccacgggtccagcctcagtcctgactggtccagcttagaatccaaacgtcataaaacagatactttaagtttgagcaaaccatgccccactcccgcccggctggtgcttccactctccaccctgcctgcttctccccacccctattcctggccctcttcatggctgtggttttactctagttcatgccatcagctcatatgcatctgtcttcctacttagactaaaagctccgtgcaggcagggagtgtcttagtcacactgtcctcagcacccatcgctatgcctaatgtgaaaccagtgtgaacaaactatttggaaaataaagacatgaatcacggacaacaacaaaacacatgcatctccaggagcctcttcccacatcccgtctgctgggtgacatcctacgcggagctagtgtcacagtgaggccgtttctggaaactaacctggggaaccagcgcacctgctaggctcaccttgaggaagcgccgatagcctcgcacagctgtctcaggcagtgggtgtgagcgcaggaagcgcagatacaggggccaaattcgagagtgctgcgtgatgggcagtgcccggagggcacggtcgaaggtgcggcgggtgtgtgtgacgcgcccctggtccatgaggaactggcagtaatctagccacagacgaggcatctgggggtgtggggagaggcggctggggctaagccacggactccatggcctggccacagacactcgatgtcctgtggctgagccacacctggggccaccacataaatgcggcgggacccagaaacccccagctccaggactgagtccagcccaacttcccatgcaaagaagcaacaggaatccaagcccccatccctaacatgctgagcccagcccctgtccccgccccacccaccaccatggactgagctccacttcccgattcatcccctcgccgagccccaaaccttgtgcatgaacacaaaggccctctcatgacagttgttgacatcttcataggcagggtcggtcacacagcgatgcttcacctgtgcccgacgcgccttcaggtatcggtaccagagtttgtagctggggaataggaggggacagatgctgatcggtcagctttatggacacccccagaaccatttgccctgccccagttggcaaatgtgggaagaaggggtgtgggaggggtgacatgtctcagcaatgacagggacagactgggacatcagagaaggtgtgctgacccatcaagggatgtacaggtcagtgatgaaacacgaagcaatcacccgggacccgggacccacttggcagttttgttataactggaccaggtggggtgggggctggtgggcagggcagctggagccattcccacctgcagggcagcagcttgagtgcccgctcgtatagctgattgagcctgggcttcggggcgccctgtttgaactcgatgtagcgaagccagcatttgacagagaattggttccgcatgatttcctcctcataggggaggtcctcttcctcctgccagggccagggaatgggaagaagagaggcctaccctcagagcctgtgtgcagcaccatcccactgctggggctcaggtccaaactccggacttttacctagatcccaccacccaccaaggaagtcaggtcaccagatgcccaggcaccaaaccagatgcccgacaccaagacagtggcccagacctttacccctcagaattcaactacccaaaatcgaacccaaatcatcagacttctcagtcattagggctctgggccaggaatgagtccgcatcaccactcgctttctgccccagatggtcagactccttagataccaaggccctggcccagatgccagtcctggacaccagaccccacttcttcaaaacgtgcctcttcccagacaccaggcctttggcccctcagactcccactgtcaccatctgacccatctccaccccaggcccagatgaccagatctttaccccagccaccagggctctcaggtccagattccaagccactagccccgcccccaggatcccactagccagcgtctagctcaactctgccccagaaattaaaagctaggcctttatctcacaggaggagttatacaccagaagccaagcctttaactctgcacaccaagaatctggtgaagatgtcacgcctctactccagagagtaagtatttcactggccatcgcctgacaagctccacatcaccagggttcttctagcctggccaccaccccagaaactgtcatgctgcagtccaggcctagagaccgctatccagaaaaccaagccttcatcccagaaaccagaaccctggcctcgtaagcaagcctttacttcagacaccgatcttcacctctcaaggttcagttatgcgatcttcctcctctcccattccctgcacgcccccatttccgcccctggttcgggaggctagacgcttcccttcgacagtggttttctactcagacccgaagatacaacaccatatttttactcctggacagttcggtgcggacatgacgatccggtctctggcccattagggttcccagaccttggcctggcagtttcggcctaaatctccttgccgacccagcctcgatcccctgcggcgtccaggtcccaatgccccaacgcaggccacccccggctcctctgtggactcacgaagacaaggtccggccgctcgggccgcgagagtcgcgccatcaccaccatttttctggatgcccaggtacaggagagagtcgcgcgcttatgacgtctaccactgacggcccgcccctccgagccagacccgttttctattggttaaatcatttttgacggacaggcccacgttattgacttcttttcgacgacgccagcgaccggaagcagaatagaggcgccagaagatgcgccatcaggatacacattggccaatcagcttcagcaatggagcgtgcaaaacaccagtgagcttctgtcttgctggagggtcggctttgggcggaactggctttgttgaccgggagaaacgagatgggggtgaagctggagatatttcgggtcagtggacacaggagtgggttgggaggctgggcaggggatcttcctggatctgaagatgaggttggaaatggggggacttcaaaggaagagggagctccaaggagaaagctcttaagatttgagaggaacctttctggttggaaatccaggagaggggacgctgggctgggggggttctcggatttgggcttctgggtttgggggctgtgagagggctggtccgaggaaggacctcagagaggggtgagctgagaagggggctctaaagaaggaagacttaagatcctgggggagctctcgggctcgtggtgggtgggtgtctatgacagggagattcctagacttcgagaagtggagttgaagagtgacgcctcctgggtttgggggtgctcccgggatcttaagtggggatgggtaatgaggtctcgaggagatgcttttgattgtagctggggcgtctgtgtgtctgtctgtgtttgagaggaagactccagctcagagggaactttcaggaatgaggcctcctggattataggagttaggttttagggtgcgaggtttctgtacccttggtgggagttctgggattcttgggtcggccgtaacgaggcgcttctggactctgcagtaggatgggtcccccaggctctgaggagcctctgcacattgcttggggggagctcacctcacccaccctctgccattccagatgataatctacctcactttccctgtggctatgttctgggtttccaatcaggccgagtggtttgaggacgatgtcatacagcgcaaggtgggcataagaggagtgtttgagggttcattccaggggtgggagagggtgtggggcagcagtctgctggggactaatgtctgcctcccataagccgaccctgccctgatgtggggctctggaggcctttggctcgtgtcccatttgtgacttttccttacagagggagctgtggccacctga

SEQ ID NO: 2893 - DNA, 6000 bp, Homo sapiens
gatctcctttcctgtccccagcagcttgtggctctcggcagatgtttggtgtggggggggattagcacagccgctctgacctacccctctaatcccccacttagacgggtggacttcccgctggatcgaatccaaacacaagtcagattttggcaaattcgttctcagttccggcaagttctacggtgacgaggagaaagataaaggtaagagcctaggagtgggtgctcagatccgggaggacttcctggcagaagtccttgtctgtacacacacagccgggacagtccccttggaggaggacaggtggaggaagtgggggagtcttctctattctctaagtcgagggtcctcgcgagtcaaggcccaacggtgacctcactaccgtcccgtctcaggtttgcagacaagccaggatgcacgcttttatgctctgtcggccagtttcgagcctttcagcaacaaaggccagacgctggtggtgcagttcacggtgaaacatgagcagaacatcgactgtgggggcggctatgtgaagctgtttcctaatagtttggaccagacagacatgcacggagactcagaatacaacatcatgtttggtgagggcctgcttcctggtgctgatctctgtcccattagttagagggagacccagaccccattgactttcttaataatgattttttttggaaggggagctaaaagaataagtcccagcaacaatttattgcattatgatcgcagatctaggctgttaatttaatttgcgtgtttgtatatagttatttcccaatcttactaatgaggattttgagttctagagcactgattttttttttttctcctttaaacttaaggctccacccacagcccattcaggacagaatcagggtctgagtttctcttctcagccttgacagacccgagttgaagaaccaggtcttccttttataaagaggggtgagagcctcgagatgatgggtagtctctgactcttaactggatctgcttcacacctaggtcccgacatctgtggccctggcaccaagaaggttcatgtcatcttcaactacaagggcaagaacgtgctgatcaacaaggacatccgttgcaaggtgtgcctgggggtggtggcaaatggctgtcatggggagattcagaggtcagcctcattggggggtggcccccgctcaccttcttccttcttcaggatgatgagtttacacacctgtacacactgattgtgcggccagacaacacctatgaggtgaagattgacaacagccaggtggagtccggctccttggaagacgattgggacttcctgccacccaagaagataaaggatcctgatgcttcaaaaccggaagactgggatgagcgggccaagatcgatgatcccacagactccaagcctgaggttggtgtttgggcaggggctctgctctccacattggagggtgtggaagacatctgggccaactctgatctcttcatctaccccccaggactgggacaagcccgagcatatccctgaccctgatgctaagaagcccgaggactgggatgaagagatggacggagagtgggaacccccagtgattcagaaccctgagtacaaggtgagtttggggctctgagcagggctggggctcacagtggggagtgcaccaaccttactcacccttcggtttccttctcccttctgcagggtgagtggaagccccggcagatcgacaacccagattacaagggcacttggatccacccagaaattgacaaccccgagtattctcccgatcccagtatctatgcctatgataactttggcgtgctgggcctggacctctggcaggtgagacttggaggaaaaaggaggatccctggggtacctcaagtgcataagatcacccaagaggaaagggacagggtaggcaccccaggtgagtctgactcaaaaatggtacttcttgtaaacagtacttcctggtctgtccctgtgaagtcctcacagcaacccctttaaggttatacttgctgtgcaccaagtacttccccaagtacttttatgcaaatcaacttctttacccccaaagacctagaaggtggtcaggtaacccagttagttagctggggctgggcacagtggctcacccttacaatcacggtactttgggaggctgagacagaggattgcttgaggccaggagttacacaactcaacctagcttggcaacacagcgaggagaccctatctctacaaaaaaaatttttttttttgagacagagtttcactcttgttgctgaggctggagtgcaatggcacgatctcagctcactgcgccctccgtctcctggtttcaagcgattctcctgcctcagcctccggagtagctgggattacaggcatgtgctactatggatgccaggctaatttttttttttttttttttttttgagaccgtgccttgctctgtcgcccaggctggagtgcagtggtgtgatctctgctcactgcaagctccgcacgaccccccaggttcactccattcttctgcctcagggtcccgagtaactgggactacaggcaccccccaccatgcctggctaatttttttgtatttttttttttagtacagacatggtttcaccgtgttagccaggatggtctccatctcctgacctcatgaaccacccaccttggcctcccaaagtgctgggattacaggcgtgagccacctcacccagcctttttgtagagacagggcttcatgttgcccaggttggtctcgaactcctggcctcaggtcatctgcccgcctcggcctcccaaagtgctgggattacaagggttagccaccatgcctagcctctacaaaaactttaaaaattggcgagatgtcatgcatacctgtagtcccaactaccaaggaagaaggatgatcacttgagcctggggcatcgaggctgcagtgagccatgattatgtcactgcactccagcctcggtgacagagtgagaccctctcaaaaaaagttgggacttggccggacacagtggctcacacctgtaatcccagcactttgggaggccaaggcgggtggatcacaaggtcaggagatggagaccatcctggctaacatggtgaatgaaaccccatctctagtaaaaatacaaaaaatttgccaggtgtggtggtgggcgcctgtagtcccagctactcgggaggctgaggcaaaaggatgacgtgaacccgggaggcggagcttgcagtgagctgagatcatgccattgcactccagcctgggtgatagcgagactctgtcccaaaaaaaaaaaaaaatgctgggactgaatttttgtctgttttggtcactgaaataccttctgtgcccaagacagttctggcatgtagtaggtacctgaaaaatacctgaataagagagtgagaaacaagaaacaggtgcagagaactgaagtcagtggcccaaggtcatgggggtaggaaaccacaaagctggggtttgaacctgggcagtacagcacctgagtctctccatctttttttttttttttttttaagacagagtcttgctctgtcacccaggttggagtgcagtggcttgatctcggctcactgcagcctctgccttccaggttcaagtgattctcatgcctcatcctctcgagcagctggaattacaggcatgcgccacgacgctgggcttttttttttttgagatggaatttcactcttgttgcccaggctggagtgcaatgatgcaatctcggcggctcaccacaacctctgcatcccagattcaagcgattctcctgcctcggcctcctgagtagctgggattacagggatgcgccatcacagaccccgggctaattttttttagtagagacagagtttcactatgttgcccaggttggtctcgaactcctggcctcaagtgatccgttcgccatgacctcccaaagtgctgggattacaggcatgagcccgtcccgtccctggctgtctctccatctttccatcttttttttttttttttttttttttggagatggagtctcactctgtcacccaggctggagtgcagtggcacgatcttggctcactgcaagctccgcctcctgggttcacatcattctcctgtctcagcctcccaaatagctgggactacaggcacttgccaccacgcctggctgattttttgtatttttagtagagacggggtttcaccgtgttagccagggtggtctcgatctcctgacctcgtgatccgcccaccttggcctctgggcgaggattacaggcgtgatccacctcacctggcctctccatctttttaactgcagtgtcagcggtgttccttgtcttctctgcagatgcaggcagcagaatatagtggttataggaacacaggtggaaaccctgtccaaagcaagggctatcgggtatcacctctgaccatccttcccattcatcctccaggtcaagtctggcaccatctttgacaacttcctcatcaccaacgatgaggcatacgctgaggagtttggcaacgagacgtggggcgtaacaaaggtgaggcctggtcctggtcctgatgtcgggggcgggcagggctggcagggggcaaggccctgaggtgtgtgctctgcctgcaggcagcagagaaacaaatgaaggacaaacaggacgaggagcagaggcttaaggaggaggaagaagacaagaaacgcaaagaggaggaggaggcagaggacaaggaggatgatgaggacaaagatgaggatgaggaggatgaggaggacaaggaggaagatgaggaggaagatgtccccggccaggccaaggacgagctgtagagaggcctgcctccagggctggactgaggcctgagcgctcctgccgcagagctggccgcgccaaataatgtctctgtgagactcgagaactttcatttttttccaggctggttcggatttggggtggattttggttttgttcccctcctccactctcccccaccccctccccgcccttttttttttttttttttaaactggtattttatctttgattctccttcagccctcacccctggttctcatctttcttgatcaacatcttttcttgcctctgtccccttctctcatctcttagctcccctccaacctggggggcagtggtgtggagaagccacaggcctgagatttcatctgctctccttcctggagcccagaggagggcagcagaagggggtggtgtctccaaccccccagcactgaggaagaacggggctcttctcatttcacccctccctttctcccctgcccccaggactgggccacttctgggtggggcagtgggtcccagattggctcacactgagaatgtaagaactacaaacaaaatttctattaaattaaattttgtgtctccctcctgtgtctccttctggggaaagacagacttaaggaaacccagcagtggtctttttggggggggggggggtttccagtatatctcctttttcagctattgctagagaggttgctgagtgttccacaagattccagggacccttatttaccccataaccctcaaaaccaacgggggaatggctgttgctgctgtaaatactccacatactaacttactgaatccttgaacctaactggtaagttttggttctgcttatttatttatttttaagatagactctcgctctgttgtccaggctggcgtacagtggctcaatctggttcaccctgccccttaaactggcctttttcatgcttctattcctttggggtcctgtggctcagcccaacccctctgggatgcctccaggactggtagatccaagggagaattctgtatttaatgtagtgaggctttgaaagttaacatctttaaatacttctggggtcagattaggtatagtacaacaaagtactcctgcccggagacccaagaat

SEQ ID NO: 2894 - DNA, 6000 bp, Homo sapiens
aaaggaggatccctggggtacctcaagtgcataagatcacccaagaggaaagggacagggtaggcaccccaggtgagtctgactcaaaaatggtacttcttgtaaacagtacttcctggtctgtccctgtgaagtcctcacagcaacccctttaaggttatacttgctgtgcaccaagtacttccccaagtacttttatgcaaatcaacttctttacccccaaagacctagaaggtggtcaggtaacccagttagttagctggggctgggcacagtggctcacccttacaatcacggtactttgggaggctgagacagaggattgcttgaggccaggagttacacaactcaacctagcttggcaacacagcgaggagaccctatctctacaaaaaaaatttttttttttgagacagagtttcactcttgttgctgaggctggagtgcaatggcacgatctcagctcactgcgccctccgtctcctggtttcaagcgattctcctgcctcagcctccggagtagctgggattacaggcatgtgctactatggatgccaggctaatttttttttttttttttttttttgagaccgtgccttgctctgtcgcccaggctggagtgcagtggtgtgatctctgctcactgcaagctccgcacgaccccccaggttcactccattcttctgcctcagggtcccgagtaactgggactacaggcaccccccaccatgcctggctaatttttttgtatttttttttttagtacagacatggtttcaccgtgttagccaggatggtctccatctcctgacctcatgaaccacccaccttggcctcccaaagtgctgggattacaggcgtgagccacctcacccagcctttttgtagagacagggcttcatgttgcccaggttggtctcgaactcctggcctcaggtcatctgcccgcctcggcctcccaaagtgctgggattacaagggttagccaccatgcctagcctctacaaaaactttaaaaattggcgagatgtcatgcatacctgtagtcccaactaccaaggaagaaggatgatcacttgagcctggggcatcgaggctgcagtgagccatgattatgtcactgcactccagcctcggtgacagagtgagaccctctcaaaaaaagttgggacttggccggacacagtggctcacacctgtaatcccagcactttgggaggccaaggcgggtggatcacaaggtcaggagatggagaccatcctggctaacatggtgaatgaaaccccatctctagtaaaaatacaaaaaatttgccaggtgtggtggtgggcgcctgtagtcccagctactcgggaggctgaggcaaaaggatgacgtgaacccgggaggcggagcttgcagtgagctgagatcatgccattgcactccagcctgggtgatagcgagactctgtcccaaaaaaaaaaaaaaatgctgggactgaatttttgtctgttttggtcactgaaataccttctgtgcccaagacagttctggcatgtagtaggtacctgaaaaatacctgaataagagagtgagaaacaagaaacaggtgcagagaactgaagtcagtggcccaaggtcatgggggtaggaaaccacaaagctggggtttgaacctgggcagtacagcacctgagtctctccatctttttttttttttttttttaagacagagtcttgctctgtcacccaggttggagtgcagtggcttgatctcggctcactgcagcctctgccttccaggttcaagtgattctcatgcctcatcctctcgagcagctggaattacaggcatgcgccacgacgctgggcttttttttttttgagatggaatttcactcttgttgcccaggctggagtgcaatgatgcaatctcggcggctcaccacaacctctgcatcccagattcaagcgattctcctgcctcggcctcctgagtagctgggattacagggatgcgccatcacagaccccgggctaattttttttagtagagacagagtttcactatgttgcccaggttggtctcgaactcctggcctcaagtgatccgttcgccatgacctcccaaagtgctgggattacaggcatgagcccgtcccgtccctggctgtctctccatctttccatcttttttttttttttttttttttttggagatggagtctcactctgtcacccaggctggagtgcagtggcacgatcttggctcactgcaagctccgcctcctgggttcacatcattctcctgtctcagcctcccaaatagctgggactacaggcacttgccaccacgcctggctgattttttgtatttttagtagagacggggtttcaccgtgttagccagggtggtctcgatctcctgacctcgtgatccgcccaccttggcctctgggcgaggattacaggcgtgatccacctcacctggcctctccatctttttaactgcagtgtcagcggtgttccttgtcttctctgcagatgcaggcagcagaatatagtggttataggaacacaggtggaaaccctgtccaaagcaagggctatcgggtatcacctctgaccatccttcccattcatcctccaggtcaagtctggcaccatctttgacaacttcctcatcaccaacgatgaggcatacgctgaggagtttggcaacgagacgtggggcgtaacaaaggtgaggcctggtcctggtcctgatgtcgggggcgggcagggctggcagggggcaaggccctgaggtgtgtgctctgcctgcaggcagcagagaaacaaatgaaggacaaacaggacgaggagcagaggcttaaggaggaggaagaagacaagaaacgcaaagaggaggaggaggcagaggacaaggaggatgatgaggacaaagatgaggatgaggaggatgaggaggacaaggaggaagatgaggaggaagatgtccccggccaggccaaggacgagctgtagagaggcctgcctccagggctggactgaggcctgagcgctcctgccgcagagctggccgcgccaaataatgtctctgtgagactcgagaactttcatttttttccaggctggttcggatttggggtggattttggttttgttcccctcctccactctcccccaccccctccccgcccttttttttttttttttttaaactggtattttatctttgattctccttcagccctcacccctggttctcatctttcttgatcaacatcttttcttgcctctgtccccttctctcatctcttagctcccctccaacctggggggcagtggtgtggagaagccacaggcctgagatttcatctgctctccttcctggagcccagaggagggcagcagaagggggtggtgtctccaaccccccagcactgaggaagaacggggctcttctcatttcacccctccctttctcccctgcccccaggactgggccacttctgggtggggcagtgggtcccagattggctcacactgagaatgtaagaactacaaacaaaatttctattaaattaaattttgtgtctccctcctgtgtctccttctggggaaagacagacttaaggaaacccagcagtggtctttttggggggggggggggtttccagtatatctcctttttcagctattgctagagaggttgctgagtgttccacaagattccagggacccttatttaccccataaccctcaaaaccaacgggggaatggctgttgctgctgtaaatactccacatactaacttactgaatccttgaacctaactggtaagttttggttctgcttatttatttatttttaagatagactctcgctctgttgtccaggctggcgtacagtggctcaatctggttcaccctgccccttaaactggcctttttcatgcttctattcctttggggtcctgtggctcagcccaacccctctgggatgcctccaggactggtagatccaagggagaattctgtatttaatgtagtgaggctttgaaagttaacatctttaaatacttctggggtcagattaggtatagtacaacaaagtactcctgcccggagacccaagaatgaaaattgtaggttcattccaaaactccagatccctaaagaatgaatgaggctacaaaatggcaccttgcccccgcttccaacttaaggttttttttctgtgcttggtggcctttcaggtatttctagttttgagtaactttcactttgactgctctacaagggttcctgccaggatacccagaccagaataaaactcatttgggggccgggtacggtggttcacgcctgtaatcccagcactttgggaggccgaggcgggtggatcacctgaggtcaggagttttgagaccagcctggccaacacggtgaaacccaatacaaaaaattatccgggcgtggtggggggtgcctgtaatcccagttactcgggaggctgaggcaggagaattgcatgaacccggaaggcggaagctgcagtgagccgagatcgcgccactgcactccagcctgggtgacagagactgtttgaaagaaaaaattctcatttggaagaggcaaaatgaggtttttacagaagaaatacaaatgtctgtaaccagtacaggtacataaaaactttgttaaaaattcatttgagcgtgagagtggggacaccagagtcactttgcagccccgtgacgtcaccgataacgggcatggcgtcactcaggagaccacgtgtgcgggccgagcaagaagccccgcccacagcgcggagtttagtctgcgcgtgcctcgctcgagaacgcgctcgtgcgcatgcccacaaaggccaaggagggagtgcgcaggtcacgtgcgccggtggtcagcgcgcgcattgcctgccccggaagtggtcggcgcgcggcgcggcgcgcctgggcgctaagatggcggcggcgtgagttgcatgttgtgtgaggatcccggggccgccgcgtcgctcgggccccgccatggccgtcaccatcacgctcaaaacgctgcagcagcagaccttcaagatccgcatggagcctgacgagacggtgcgggccgggccggagcccgggggcgggagcgacgggtttcgggggtggggtgggggcggggaggctagaatcccaacgggaggggcagggaggacggcgcgggtcggccctgcccagacccccgacctgcccgactttcctggaccccccgatggtctttggcccagcccccagccgatcgggcggcgctcctgcgccggtctccgggcgaggccccacccccggggcgctggccaggccccggctccaatgtcagcgctctcgcggggcgcgggagtcacaagctcggattcctgggcaggccaagctctccaagactgggctccacgttcccagctttgcaggcgtctccttgggacactggtggtcgaatctaggagtaatgaccaggagatactgagtagtgacgacaacaacgatgttaatgataataaacgggtctcagtctttataattttggtggtccgtgtttgttggccgtttactttttatcagtcaccgagtgttgtagtgttgttttaccgctctgcaaaacgggcttgtcattggggacctctgatcattttacagatgtggaaacctagggattgaggaactttgccacagtcacacacaagtaatggcagagctgggattcaaattcggttctgcctcgtgtgagcgtccacgatataaatattatgctgcctttttagtcaaaagtagaattaggacctaattcaaacatactgaatgtctattgggtacttggcgctttttgcatagtgagggagacattgaagtccactttttgtagaaaaggaaacacacattttttgatccgctcaagtgtttggctttgggcaagttaacctgcctacctgtctgtgcctccgttttc

SEQ ID NO: 2895 - DNA, 6000 bp, Homo sapiens
ctcatttcacccctccctttctcccctgcccccaggactgggccacttctgggtggggcagtgggtcccagattggctcacactgagaatgtaagaactacaaacaaaatttctattaaattaaattttgtgtctccctcctgtgtctccttctggggaaagacagacttaaggaaacccagcagtggtctttttggggggggggggggtttccagtatatctcctttttcagctattgctagagaggttgctgagtgttccacaagattccagggacccttatttaccccataaccctcaaaaccaacgggggaatggctgttgctgctgtaaatactccacatactaacttactgaatccttgaacctaactggtaagttttggttctgcttatttatttatttttaagatagactctcgctctgttgtccaggctggcgtacagtggctcaatctggttcaccctgccccttaaactggcctttttcatgcttctattcctttggggtcctgtggctcagcccaacccctctgggatgcctccaggactggtagatccaagggagaattctgtatttaatgtagtgaggctttgaaagttaacatctttaaatacttctggggtcagattaggtatagtacaacaaagtactcctgcccggagacccaagaatgaaaattgtaggttcattccaaaactccagatccctaaagaatgaatgaggctacaaaatggcaccttgcccccgcttccaacttaaggttttttttctgtgcttggtggcctttcaggtatttctagttttgagtaactttcactttgactgctctacaagggttcctgccaggatacccagaccagaataaaactcatttgggggccgggtacggtggttcacgcctgtaatcccagcactttgggaggccgaggcgggtggatcacctgaggtcaggagttttgagaccagcctggccaacacggtgaaacccaatacaaaaaattatccgggcgtggtggggggtgcctgtaatcccagttactcgggaggctgaggcaggagaattgcatgaacccggaaggcggaagctgcagtgagccgagatcgcgccactgcactccagcctgggtgacagagactgtttgaaagaaaaaattctcatttggaagaggcaaaatgaggtttttacagaagaaatacaaatgtctgtaaccagtacaggtacataaaaactttgttaaaaattcatttgagcgtgagagtggggacaccagagtcactttgcagccccgtgacgtcaccgataacgggcatggcgtcactcaggagaccacgtgtgcgggccgagcaagaagccccgcccacagcgcggagtttagtctgcgcgtgcctcgctcgagaacgcgctcgtgcgcatgcccacaaaggccaaggagggagtgcgcaggtcacgtgcgccggtggtcagcgcgcgcattgcctgccccggaagtggtcggcgcgcggcgcggcgcgcctgggcgctaagatggcggcggcgtgagttgcatgttgtgtgaggatcccggggccgccgcgtcgctcgggccccgccatggccgtcaccatcacgctcaaaacgctgcagcagcagaccttcaagatccgcatggagcctgacgagacggtgcgggccgggccggagcccgggggcgggagcgacgggtttcgggggtggggtgggggcggggaggctagaatcccaacgggaggggcagggaggacggcgcgggtcggccctgcccagacccccgacctgcccgactttcctggaccccccgatggtctttggcccagcccccagccgatcgggcggcgctcctgcgccggtctccgggcgaggccccacccccggggcgctggccaggccccggctccaatgtcagcgctctcgcggggcgcgggagtcacaagctcggattcctgggcaggccaagctctccaagactgggctccacgttcccagctttgcaggcgtctccttgggacactggtggtcgaatctaggagtaatgaccaggagatactgagtagtgacgacaacaacgatgttaatgataataaacgggtctcagtctttataattttggtggtccgtgtttgttggccgtttactttttatcagtcaccgagtgttgtagtgttgttttaccgctctgcaaaacgggcttgtcattggggacctctgatcattttacagatgtggaaacctagggattgaggaactttgccacagtcacacacaagtaatggcagagctgggattcaaattcggttctgcctcgtgtgagcgtccacgatataaatattatgctgcctttttagtcaaaagtagaattaggacctaattcaaacatactgaatgtctattgggtacttggcgctttttgcatagtgagggagacattgaagtccactttttgtagaaaaggaaacacacattttttgatccgctcaagtgtttggctttgggcaagttaacctgcctacctgtctgtgcctccgttttctcaaatatcaaatgaaccggtcgcctgctggcttccgcctgtaatcccagcacttagggaggcagagggaagaggagcccttgagcctaggaattcgagatcatcctggcaacacagtgagaccccgttctctacaaaaaaaagaaacaaaaatcaataaataaaatgagaccaattaaacgtatttcataggaaacttaaaaggtatgacacatatacatttacagtagcactattggccaggcacggtggctcatgcctctaatcctgatgatttgggaggcagaggcaggaggattgcttgaggccaggagtttgagaccagccagtctaacatagggagactcttatctacaaaaaaaaattatttttaattagtctggagtggtggtgtgtacctttagtcctagctactcccaaggctggacaagagtaccagttgagcccaggagtttgaggctgcagtcagcgatgatcgtgccacatcaatccagcatgggcggcagcgagatcctgcctcttaaaattaaaaaatatcactattaactattagtcacttattgtccaaggtagagtgtagagtgggggactgtcccctttattctgttaattatactttatactacccgaaattacattttcttcacattagtgttctctcattgagagcagggacttacttgtgttgagtttgttctgtgctgtggcctctgtgtctaaaacagcacctggcacataatgggtgtttagtataagtaaatactgtgttgaatggcatgatgattgaatgaattcaaatctagcatgctttagatgctgagaaagcttaaaaaacccagcgtgcttgcctttctgccatcagggctggcagtttctctgtcctaaactagaagggaaaagagaatcttggggtctccagtgactgtctgtaccactccctctaggtgaaggtgctaaaggagaagatagaagctgagaagggtcgtgatgccttccccgtggctggacagaaactcatctatgccggcaagatcttgagtgacgatgtccctatcagggactatcgcatcgatgagaagaactttgtggtcgtcatggtgaccaaggtgggtgacgtgtgctggctgggagggtgggtggacgagctggggagctggcaaagagcctgtgtgcccaggagagattagctgtgaacagggcggggccacagcggagcgggttgttgggtctgatagggttgctgatgccagctccctttttcttgctgttgcagaccaaagccggccagggtacctcagcacccccagaggcctcacccacagctgccccagagtcctctacatccttcccgcctgcccccacctcaggcatgtcccatcccccacctgccgccagagaggacaagagcccatcagaggaatccgcccccacgacgtccccagagtctgtgtcagggtaaggcgggggcagcagtcccagcttgggccctgtcctcctagcacattccagcgtccacataagtggtcccacacacctggagggagggcaagccgccagaagccagggtccgatttctctctcttgaatttgcagctctgttccctcttcaggtagcagcgggcgagaggaagacgcggcctccacgctaggtgggtgggtggtccccagggcagaggtgactgggtgccccagccatcagctgggccttgtctgggtgcgggagggcctgggagctgccctttcctcttcctggtgacctaggctttgctgcttcctccacagtgacgggctctgagtatgagacgatgctgacggagatcatgtccatgggctatgagcgagagcgggtcgtggccgccctgagagccagctacaacaacccccaccgagccgtggagtatctgctcacggtgaggtggggcttccgcctcccggggaggccttgagggagtacccgggcgtcactgccctgatgggcggttgggaaggcaaaacctgccctgaaaagcctttgggtagtgattctagccactaaaggcttcccacaggaggctggatgtgagtgatgggtgggcctctggagggcagggccgaggcctcatctgtgtcctgccagggcatggaggagggtggcagcaggaggtctgtgcattagaactaaacaggacccctgacagggaattcctgggagccccgagccggaacacggttctgtccaggagagccaggtatcggagcagccggccacggaagcaggtgggtgtgcacatgccgcatctgccctccaggtacctgactcacattacactccaccccgcagtgctcctaggagcccggcgtggtgtctgactgcaccccttcctactaccagcaggagagaaccccctggagttcctgcgggaccagccccagttccagaacatgcggcaggtgattcagcagaaccctgcgctgctgcccgccctgctccagcagctgggccaggagaaccctcagcttttacaggtgtggtcccaagggcagagggagctagggcagccaccatttcccttccctgtgggcaccagagtccataacacgtaggaatcgttctaggtccggaaagcaggactaagcacatgcttcccccacgcccctgtgcttcctgtgacctggtgacccccctggtttctcagtcttcccaaccaccttgtaaggtgtgggtgctgtcaacatcacctcccacagaagaagacaccggaaacttagagcagcctgtcattcccagggtcacgcagctggtagtgtgtgtgtctgcctcctgcctcggggtggggtcctgggctggggctctggcttcacatacagatggtgctgcgtaaatgtctgtaaggtggcatgacgtcacccaggacagctgtgccccagttggctctgggacaactctgctcagtgaggctccatcttgcccttgaaggttcacaggaagagtgggggagtggccccctgggtgcaagtaggttcctctgggttctcggtgaagtgcctaccggtcttggctcaggaccctgctgtctgacccttctcctctcacttctcagtcccttgccagctcctcctggtcggtcgtgttcttcatctgcactcagccctccctcatagtgtcctggggccttcagtctgtatgggaacccccaaatctatgtagccagcccaggcctctctgaatgccacactccatggctggcttaattaactctccatcaaagtgctccctagactagacgtctaagacttagaacagacctccccagtcctccccgatctctgcaaggattagcttggggttgcttcagccccaggccctggggatctgctggggtctaccccttgtcctgtctgctcttcccactcagcccctccctgcactccagctctctggtagcctcttcctgggcctctgccactgca

SEQ ID NO: 2896 - DNA, 6000 bp, Homo sapiens
gaaagaaattttaggatattatactaattaaaatcagccagccccaggtgcagtggtttacacctgtagtcccagctactcaggtggctgaggcatgagaattgcttgagcctgggaggcagaggttgcagtgagccgagatcatgccactgcgctccagcctgggcaacagagtaagtactctgtctcaaaaaaaaaaaaaaaaaggccaggtgtggtggctcacgcctgtaatcccagcactttgggaggccgaggcaggaggatcacgaggtcaggagatcgagaccaacctggctaacatggtgaaaccccgtctctactaaaaatacaaaaaattagccgggcgtggtggcgggcgcctgtagtcccagctactcgggaggctgaggcagaagaatggcgtgaacccgggcggcggagcttgtagtgagccgagatggcgcccctgcactctagcttgggcgacagagcgaaaccctgtctcaaaaaaaaaaaaaaaaaaaaaattagccaggtgagcacctgtagtttcagctacttgagaggctgaggtgggagtatcacttgagtccaggaggtcgattctgcagccagttataataattgtgccactgcacttcagcctggacaacagagcaagactctgtctcaaaataaaaaataagccagttacaaaaggacaagtaccgtatgattcgacttatatgaggtacctagagtagtcaaattcatagaaacaaggtagaatagtgactgccaggccgggcgcggtggctcacgcctgtaatcccagcactttgggaggccgagacgggcagatcgcgaggtcaggggatcgagaccatcctggctaacacggtgaaaccctgtctctaccaaaaatacaaacaaattagccgggtgtggtggcgggtgcctggagtcccagctactcgggaggctgaggcaggagaatggcgtgaacccgggaggcggagcttgcagtgagccgagatcgcgccactgcactccagcctgggcaacggagcgagactccatccgtctcaaaaaaaaaaaaaaaaaaggaatagtgactgccagggactgggcgaaagggaaactggggagtgagtgtatagagttacaggtttgcaagatgaaaaaattctgaggtcaggcatggtagctcatacctgtaattccaacattttgggaggccaaggtgggaggataacttgggtcccagaattcaggaccaccctgggcaacatattgagactctatctctacaaataatacaaaaattagccaggcttgatggtgagtgcctgaagttccagctacttaggagcccgaggtgggaggaccacttgagaccaggagattgaggctgcagtgatatgccagtgtactccagcctgggcaacagtgagaccctgtcaagaaaggaggggaggggaggggaggtgagccaggagttcaagaccaacctgggtaacatagagaaaccccgtctctacaaaaaaatttaaaatgtaggtgggagtagcggttcatgcctatagtcttgctactgaagagactgaggcgggaggattgcttgagcccaggaattcaaggctgcagtgagctatgaccgagccagggcactctagcctgggcaacagagcaataccctgtctcaaaaaaataaaatttaaaaagcaatcatataggtcctcttcctttgttgcacattatgcttataagcatcatccatcttctgtgagaagatgtaatatttgctctttcattcctgtgtagtattccattggctgaaacagcataatttaggtgtccattctacttcagatggacattgggtgtgagctatttccagcttggtaatgacatatatatgtggtgttgctatgaacattcatgtcttgagaaaactgcagttattttttgcgggggtagagaaggtgtgcgtgtgtgattaaaaacaaaaacaacaggccaggcgcggtggctcatgcctgtaatcccagcactttgggaggccgaggcgggtggatcacaaggtcaggcgatcgagaccatcctggctaacacggtgaaaccccctctctactaaaaatgcaaaaaaattagccgggcgtggtggcgggcgcctgtagtcccagctactcgggaggctgaggcaggagaatggcgtgaaccccggaggcggagcttgcagtgagcggagatcgcaccactgcactccagcctgggcaacagagctaaactccatctcaaaaacaaacaaacaaaaaaaaaaaaacaaaaaaaacgtggccagtcatggtggctcacacctgtaatcctagcactttgggaggctgaagtgggcagatcacttaaggtcaggagtttgagaccagccttaccaacgtggtgaaaccccgtctctagtaaaatatgaaaatcagccaggcttggtggcttgcgcctgtggtcccagctacttaggaggcagaggctcgaaaatcccttgaatctgggaggcagaggttgcagtgagccaagattgcatcactgtactctcacctgggagacagagcgagactctgactcaaaacaaaacaaaacacaaattcgttttatttattttgtatattttacaatataaaatatattatacattataagcaataactcccactcctccacccccaacccctggaactcctaatctactttctgtctctatgaatttgactactctagttacctcatataagtggaatcatacaatatttgtccttttgtgactggcttctttcacttagcctaatgtcctcaaggttcatccatgtcacagcatgtgacagaattatttatttatttatttatttattttgagacagagtctcgatctgttgcccaggctggagagcagtggtgtaatctcagctcactgcaacctccgcctcccgggttcaagcgattctcctgccttagcttctcgagtagttgggattacaggtgtgcaccaccgcacccagccaatttttgtatttttagtaaagacggggtttcaccatgttggccaggctggtctcgaactcctgacctcagtgatacctgcctcagcctcccaaagtgctgggattacaggtgtgaaccaccgcgttcagccacatttacattaaaaaaataataaatgctagtgggctttttgtctgtttgtttgttcagacagagtctcactctgtcaccctgggtagagtgcaatggcacgatctcagctcattgcaacctccacctcccaggttcaagcgattctcctgcctcagcctcctgagtagttgggattacaggcgcccaccaccacgcccaggtaatttttgtatttttagtagagacaaggttttgccatgttggtcaggctggtctccaactcctgacctcaagtgatccgcccgcttcagcctcccaaagtactgggattacaggcgtgagccaccaagcccagcctaataaatgctagtttaaatgtataaaagtaaagttaaaaatataatttttacgcagccataaaaaatgatgagttcgtgtcctttgtagggacatggatgaaactggaaaccatcattctcagcaaactatcgcaaggacaaaaaaccaaacaccgcatgttctcactcataggtgggaagtgaacaatgagaccacatggacacaggaaagggaacatcacacaccggggactgttgtggggtggggggaggggggagggatagcattaggagatatacctaatgctaaatgacgagttaatgggtgcagcacaccaacatggcacatgtatacatatgtaacaaacctgcacgttgtgcacaagtaccctaaaacttaaagtataataataataaaataaaataaaataaactttttgaaggcaaaaaaaaaaaaaaaagaatagcatgggggaaaccacccccgtgatccaaccacctcccttccccgacatgtggggattacaggtccctccctggacacatggggattataattcaggatgagatttggttggggacacagagccaaaccatatcagtggccctgccacagcctcttatttttgatttttcaatgtgttcattcaacatgatttcagattattcattggagggctactgtgtgcacagaagacacatggatgaataaaacagtatggtttctgatatgcaaaaaacaaaaatacaatttttacccaaagaacactgaacacttagaaaaaaatacacaaatatatatttgtagccaggtgagcgtatatatatatgtatatgtgtgtgtgtgtgtatgcatgtatgtatttatttttatttattaattttttagacggagtttcgctcttgttacccaggctggaatgcaatggcacgatctcggcccaccccaacctccgcctcccgggttcaagcgattctcctgcctcagcctcccgcggagctgggactacaggcatgcgccaccatgcccggctaattttgtatttttagtagagacggggtttctcctctcctcccggaaggcggaggttacagtgacccgagatcacgccgttaccctccagcctgggcgacagagcgagactctgtctcgaaaaaaaaaaaaaaaaaagactggtctcgaactcgcgacctcaggtgatccgcccgcctcggcctcccaaagtgctgagattacaggcgtgagccaccgcgcccgacaaaaatatgtatttttaagtgtcagtgtgcagaaaggagaagaaaaaaagtgaaaattaaaaatgactttaatcagtaactgcttaactaaaatttaaagttatacttggaaacgtataaaacccatactatccccttcgccgccctcccccgaactgaggcagcagggacacccctcgccctgccctggcccacaccgggcctcgcgctcaggcaccgggcatggacagcccggcgggcctgtgaggaccccgcacagccaagatggcggcgtccgtgcgacaggcacgcagcctactaggtgtggcggcgaccctggccccgggttcccgtggctaccgggcgcggccgcccccgcgccgcaggccgggaccccggtggccagaccccgaggacctcctgaccccgcggtggcagctgggaccgcgctacgcggctaagcagttcgcgcgttacggcgccgcctccggggtggtccccggttcgttatggccgtcgccggagcagctgcgggagctggaggccgaagaacgcgaatggtacccgagcctggcgaccatgcaggagtcgctgcgggtgaagcagctggccgaagagcagaagcgtcgggagaggtgcgtgcgtgcaggcagacgcggggctgccctctgtgccccgtgggcgaactgggccccaaaccgtgcctaccccttcggggtcacgtcgcagcatctgcatgttgtagatttatgtatacgctcacctggccgcaaaacaaactcagaataacgtccatttagtcattcatcagcaagttttgtttgtttgtttgtttgttttttggagacaagagtctcgctctgttgcccaggctggagtgcagtcgcaagatcttggctcactgcaacctccgcctccccggttcaagcgattctcccgccttagcctccggtgtagctgggattacaggcgtgcaccaccacgcccggcaaatttttgtagttttagtagagacggggttccaccatgttggccaggctggtctcaaactccttacttcaagtgatccacctgcctcagcctcccaaagtgccgggattacaggtgtgagccatcacgtccggccatcaccaccaagtctttactgagcgcataccgtgtgcaagaccctgtcccaggccgggggcggtggctcgtgcctgtaatcccagttatttgggaggccgaggcaggccccaaaagggcccttaatatcagatggcgacagctgacaggcaagataataccaatggtgaca

SEQ ID NO: 2897 - DNA, 6000 bp, Homo sapiens
aacctctccagagcagccatgttcatccatcatgacctgcttttaacacttgatcattcctagatgagcacgtgacccagctgtgccaatccaagagtccttgcctaggactgttggaacaggaacttaaaatgagagttggcccttctttagggactgaagctgtgaacactgagattgtcattggccgtgtgaagaaggtttatgtgccagcagaaagcataatgaaatcaacaggaagacacatacacacttacacacacacacatacacacagagagagagagagagagagagacaaagacatctgttcttggttctgacatgacctgggtatttcatggagtggcctagcatctttcaccaagggcttgcttaatgcttaggctagtcagggatggttttcacttacttccaaccaaagagcctttaccaatgcagaatgattgataatcatattatcaccaacatactgcaagacatcaactgaaactcaaatctgacggacattttcccagctctcaaatattacagatacagtctggatctcctgtcaaaggtggttaacttggctgtttagtttttcagaaactttccaaatatacattaatttatttcagtttgcatagtaaacttctattgatctggctttcaaatacaaaaaaatcaaattactaaattgttcctccactctaccttgtggaaacaaatgaaataaggtgtggtaactaaggaactgctctaaaaataacaccttttaggatacaacatagggtcaacatcatgaccttcaatattttgtgtgtttagtgcctgaatcagcaaagcagtataagcacagcttggcctcattttgcagtgtgttttagtctactatgattctatggatgcaatttgtttataattcatgtatgagcatcgtggtaataatagctaatactttttttattttttgagactgagtctcgcttggtttcccaggccgatctaggctcactgcaatctctgcctcccgggctcatgtgatcctcccacctcagcctcctgagtagctgggaccataggcacatgccacccatcacacccagtactttgggagaccgaggtgggagaatcataagcccaggagtttgagactggccgggacaacatagtgagactccatctctaaaaatatttcatctctcaaaaaattttaaaaataaaccaggtgtggtgatgcacgtctgtagtcctaactacttgggaggctgaggtgggaggactgcatgagcccaggagttcaaggctgcagtgagctatgctcatgccattgcactccagctttagcctcccaaagtggtgggattacaggagtgagccactctagccagccatgtagctaatacttttgaggtaccaagcaggcactgttttaggggtctagcacactaattcctttaatcctcagagcgacactgttgtcttctccatttacagatgacagagaggttaagtaatttggccaaggctgcacatctagcaagcggtgaagctgtggacactagtgttcatatctcttaggtaactaatgtagttaatcatagtggctgtcaggtaactacaatattcaatgaatacaacagcctacttcccaagtcctttggagggtttttttattttaaatttttttaaattaaatagagatgaggggtctcactatgttgcccaagctggtcttgaactcctggcttcaagtgatcctctcacctcggcctcccaaagtgctatagaggctactcagtctttggatttgtagaatatatattgattactgtaaggcagagagatatgcaggaaatttttcttttactgtgatggcttggatccctgtgacttgtaaaaaaagctacatagtagacctccaaggcttcaccaggctctcgtttccttatggagaacaaatctttcggaagcttctatctcttagggtaaaaatctgaatgtttcttgggcccacatggccctgcctatcttgttggtctccactttactttcagccactttagccttaaatttctcccatcacagggccccggacaagaattccctgtgactgctgcacccacgtcctctgtattgcctagccaaatcctgtcaatttttcaggcttccccggacccatcagactaggtctggttcgcttctgatttctcacagcgtcttgtactgctttcttgtagtatctatgaaaatggtaattgaaaaattgtggaccaggggaggtagctcatgcctgtaatcctagcactttaaaaggccgaggtgggtgcatcacttgacctcagctgttcgaaaccagcctgggcaacatggtgaaaccctattgctacaaaaaatacaaaaattagccaagcatggtggcgcatgccttgtagtcccagttgcttgggaggctgaggtgggaggatcacctgagcccaggaggtccaggctgcagtgagccatgcttgccccactgcactccagcataggtgacagaaagaaaaattgtgtaattaccaaacgcctgtctgcctggctgtaagtgtaagttccatgtgggcagtgactgtgtgtttgtcttgctcattgctgaatctccaacacttagcctacggcttagtacatagttggcaccaaatgcatacttgtaaactgagtagaagaaaaactaccagctaccagctgaaaagaaaataaatacccgagtgtcctgggcactgactagacttgctgggtgtgtaagaaggcctgcccagacacagatacaaagaatgctggaacagcttggcagggcggtttgcaaaccaaaggataactgaatatacctatgcaagttcttttttttccccttacacatttttcttttttcttttctttccttttttatttttatttttttatttttgagatggagtcttgctgtcacccaggctggagtgcagtggcgtgatctcagctcactgccaacatttgcctcccgagttcaagcaattcttctgcctcaggctcccgagtggctgggattacaggcacccgccaccacgcctggctaatttttatatttttagtagagacagggttccaccatgttggccagggtggtctcaaactcctgacctcaggtgatccgcctgcctcggcctcccaaagtgctgggattacaggcgtgagccactgtgtctggcccccttacacattttttaagtgattaggaaatattcagggtaaaattatgattttgtgagcaataaatcacaatcctattttaatagtactaaaatcttgatcaaagcaagttcaggcaggacttggttactcacacccttaatcccagcaatctgggaggccgagacagaaagatcacttgagcccaggagtttgagaccagagtggacaatatggtgagaccttgtctctacaaaacatttttaaaaaattagctaggtgtggtggtgcatgcctgtaatcccacctacttgggaggctgaggtgggaggatggcttgagcccaggaagtcgaggctgcagtgagctgtgatcaagctgtggcagtgccattgcactccagctggggcaacacagcaagatcgtctcaaaaaaaaagaagaaaagaaatttaagctgagaatactgagagccaacgtgaagaaacacacttgtttcaatgacacttattctcctaagtgtgcatctgtgagcattattacctgtttttttttttttggagacagggatctcattctgtggctcaggctggagtgcagtggctcaatctcagctcactgcaacctccgcctctcaggctcaagccatcctcccatctcagactccagagtagctgggaccacaggcacagcgccaccacacccggctaatcttctgtatttttggtagagatggggtttttccatgttgcccaggctggtctctaattcccgacctgaagtgatcagcctgcctcggcctcgcagagtgctgggattacagacctgagccaccgcgcccagcccattgttcaccgttgtgaccccttttaatttttatttattgctttatcatcttactgattcctcgaaacaatcttacggggcgagccggttccatgggcgctgaagaaacatttcctctttcaaagcctcaattgtttgaacgatacgcgttgctaaagaggaagcaattaaacctatcaggcgagttctgccctccgcccagcgagctgctgcttcctggtgttaaaacgctttcggggccaggcgcggtggctcacgcctgtaatcccagcactttgggaggccgaggcgggcggatcacgaggtcagaagatcgagaccatcccggctaaaacggtgaaaccccgtctctactaaaaaaatacaaaaaattagccgggcgtagtggcgggcgcctgtagtcccagctacttgggaggctgaggcaggagaatggcgtgaacccgggaggcggagcttgcagtgagccgagattgcgccactgcactccagcctgggcgacagagcgagactccgtctcaaaaaaaaaaaaaaaaaaaacgctttcgggttctcctggcgagttttaagtcacactggatcgctgcttattttcagagatcacctcgcacccatgcacctggaaggcacccaaagagaatcattttaagaaattcacttcatctcaccctaacaacaaagcacagcctgcagcacatggatttcacccatgtgacatcaatgctaatcctatgtgtgaaacatctgggttcattcgattttttaaaaattagtaactgagatggggtctcgctatgttgtccaggctggttctccaacgcctgggctcaagccattctcccgcctcggcctccctcggcgctgagattataggcgggagccaccgcgtcagcctccactctttttgcggcgacaaagcccgcccgcctgcggggcgttccgttcgcagaaactctgtgagggacgccgcgggggcttccaagggacgcggcgaaaccaaaacagtcgccggtggttcacaaaaccacctcagaaaatgcttccaaaggcacgtctggcctccacaaggtgacggcttttcagcctccgactcgaacttgagtcgtccacagcactaggccgccgccagcccgggcgagctgcctagggaccgcggacgccgcagcaagcagctccctgctcccgccacacccgccgagccagccgcgcggaacccactcccccaccgtgggcccgcctcccgccgccagcctgcccacgattggtcgactgggctgcccgtcgcgagagaaggcggtgcctccggcaggccggcgctcccattggccgggatggcggcggcggcgcgcgcggccccggcgagcaggggaagccggtggccgcggctgcggaacgggcggaggctgccggtttcgtaaccgtcgctcctcctcgctgactcgcgggctgtgaggcctgggtcggctcgggccgcaccgcgcggggccgctcggagtggaggccgcctgggggcaggcgggctagaggagcaggtaaggaggctgcggcgggcgccctgagaacggggaggaggaggccgcggcgacgccggccgctcgactgggtgcgggcccggctcggggaaacccagccccggccccagacggcccgctggcccgggaaggccacgcgaggctggaggcgcgggcggcggcgccgcgcggcgtctgatgcaacctgccggcaacacccggcggggacgctgagctcattcctggccgcggcccagcgctgcggcgccgcccgtcgacccccgcgctgcccggggcgcccctcgcggcgggccgggagcgcgcgaacggccggggaatgccccctgcggagcccggccccctctcggtgaaacgggcgctgtgacccgccaggctcgcattggcccctggggatgaagggtgttcccagaatagcagaaggtggaccgagtcga

SEQ ID NO: 2898 - DNA, 6000 bp, Homo sapiens
ttatcaccaacatactgcaagacatcaactgaaactcaaatctgacggacattttcccagctctcaaatattacagatacagtctggatctcctgtcaaaggtggttaacttggctgtttagtttttcagaaactttccaaatatacattaatttatttcagtttgcatagtaaacttctattgatctggctttcaaatacaaaaaaatcaaattactaaattgttcctccactctaccttgtggaaacaaatgaaataaggtgtggtaactaaggaactgctctaaaaataacaccttttaggatacaacatagggtcaacatcatgaccttcaatattttgtgtgtttagtgcctgaatcagcaaagcagtataagcacagcttggcctcattttgcagtgtgttttagtctactatgattctatggatgcaatttgtttataattcatgtatgagcatcgtggtaataatagctaatactttttttattttttgagactgagtctcgcttggtttcccaggccgatctaggctcactgcaatctctgcctcccgggctcatgtgatcctcccacctcagcctcctgagtagctgggaccataggcacatgccacccatcacacccagtactttgggagaccgaggtgggagaatcataagcccaggagtttgagactggccgggacaacatagtgagactccatctctaaaaatatttcatctctcaaaaaattttaaaaataaaccaggtgtggtgatgcacgtctgtagtcctaactacttgggaggctgaggtgggaggactgcatgagcccaggagttcaaggctgcagtgagctatgctcatgccattgcactccagctttagcctcccaaagtggtgggattacaggagtgagccactctagccagccatgtagctaatacttttgaggtaccaagcaggcactgttttaggggtctagcacactaattcctttaatcctcagagcgacactgttgtcttctccatttacagatgacagagaggttaagtaatttggccaaggctgcacatctagcaagcggtgaagctgtggacactagtgttcatatctcttaggtaactaatgtagttaatcatagtggctgtcaggtaactacaatattcaatgaatacaacagcctacttcccaagtcctttggagggtttttttattttaaatttttttaaattaaatagagatgaggggtctcactatgttgcccaagctggtcttgaactcctggcttcaagtgatcctctcacctcggcctcccaaagtgctatagaggctactcagtctttggatttgtagaatatatattgattactgtaaggcagagagatatgcaggaaatttttcttttactgtgatggcttggatccctgtgacttgtaaaaaaagctacatagtagacctccaaggcttcaccaggctctcgtttccttatggagaacaaatctttcggaagcttctatctcttagggtaaaaatctgaatgtttcttgggcccacatggccctgcctatcttgttggtctccactttactttcagccactttagccttaaatttctcccatcacagggccccggacaagaattccctgtgactgctgcacccacgtcctctgtattgcctagccaaatcctgtcaatttttcaggcttccccggacccatcagactaggtctggttcgcttctgatttctcacagcgtcttgtactgctttcttgtagtatctatgaaaatggtaattgaaaaattgtggaccaggggaggtagctcatgcctgtaatcctagcactttaaaaggccgaggtgggtgcatcacttgacctcagctgttcgaaaccagcctgggcaacatggtgaaaccctattgctacaaaaaatacaaaaattagccaagcatggtggcgcatgccttgtagtcccagttgcttgggaggctgaggtgggaggatcacctgagcccaggaggtccaggctgcagtgagccatgcttgccccactgcactccagcataggtgacagaaagaaaaattgtgtaattaccaaacgcctgtctgcctggctgtaagtgtaagttccatgtgggcagtgactgtgtgtttgtcttgctcattgctgaatctccaacacttagcctacggcttagtacatagttggcaccaaatgcatacttgtaaactgagtagaagaaaaactaccagctaccagctgaaaagaaaataaatacccgagtgtcctgggcactgactagacttgctgggtgtgtaagaaggcctgcccagacacagatacaaagaatgctggaacagcttggcagggcggtttgcaaaccaaaggataactgaatatacctatgcaagttcttttttttccccttacacatttttcttttttcttttctttccttttttatttttatttttttatttttgagatggagtcttgctgtcacccaggctggagtgcagtggcgtgatctcagctcactgccaacatttgcctcccgagttcaagcaattcttctgcctcaggctcccgagtggctgggattacaggcacccgccaccacgcctggctaatttttatatttttagtagagacagggttccaccatgttggccagggtggtctcaaactcctgacctcaggtgatccgcctgcctcggcctcccaaagtgctgggattacaggcgtgagccactgtgtctggcccccttacacattttttaagtgattaggaaatattcagggtaaaattatgattttgtgagcaataaatcacaatcctattttaatagtactaaaatcttgatcaaagcaagttcaggcaggacttggttactcacacccttaatcccagcaatctgggaggccgagacagaaagatcacttgagcccaggagtttgagaccagagtggacaatatggtgagaccttgtctctacaaaacatttttaaaaaattagctaggtgtggtggtgcatgcctgtaatcccacctacttgggaggctgaggtgggaggatggcttgagcccaggaagtcgaggctgcagtgagctgtgatcaagctgtggcagtgccattgcactccagctggggcaacacagcaagatcgtctcaaaaaaaaagaagaaaagaaatttaagctgagaatactgagagccaacgtgaagaaacacacttgtttcaatgacacttattctcctaagtgtgcatctgtgagcattattacctgtttttttttttttggagacagggatctcattctgtggctcaggctggagtgcagtggctcaatctcagctcactgcaacctccgcctctcaggctcaagccatcctcccatctcagactccagagtagctgggaccacaggcacagcgccaccacacccggctaatcttctgtatttttggtagagatggggtttttccatgttgcccaggctggtctctaattcccgacctgaagtgatcagcctgcctcggcctcgcagagtgctgggattacagacctgagccaccgcgcccagcccattgttcaccgttgtgaccccttttaatttttatttattgctttatcatcttactgattcctcgaaacaatcttacggggcgagccggttccatgggcgctgaagaaacatttcctctttcaaagcctcaattgtttgaacgatacgcgttgctaaagaggaagcaattaaacctatcaggcgagttctgccctccgcccagcgagctgctgcttcctggtgttaaaacgctttcggggccaggcgcggtggctcacgcctgtaatcccagcactttgggaggccgaggcgggcggatcacgaggtcagaagatcgagaccatcccggctaaaacggtgaaaccccgtctctactaaaaaaatacaaaaaattagccgggcgtagtggcgggcgcctgtagtcccagctacttgggaggctgaggcaggagaatggcgtgaacccgggaggcggagcttgcagtgagccgagattgcgccactgcactccagcctgggcgacagagcgagactccgtctcaaaaaaaaaaaaaaaaaaaacgctttcgggttctcctggcgagttttaagtcacactggatcgctgcttattttcagagatcacctcgcacccatgcacctggaaggcacccaaagagaatcattttaagaaattcacttcatctcaccctaacaacaaagcacagcctgcagcacatggatttcacccatgtgacatcaatgctaatcctatgtgtgaaacatctgggttcattcgattttttaaaaattagtaactgagatggggtctcgctatgttgtccaggctggttctccaacgcctgggctcaagccattctcccgcctcggcctccctcggcgctgagattataggcgggagccaccgcgtcagcctccactctttttgcggcgacaaagcccgcccgcctgcggggcgttccgttcgcagaaactctgtgagggacgccgcgggggcttccaagggacgcggcgaaaccaaaacagtcgccggtggttcacaaaaccacctcagaaaatgcttccaaaggcacgtctggcctccacaaggtgacggcttttcagcctccgactcgaacttgagtcgtccacagcactaggccgccgccagcccgggcgagctgcctagggaccgcggacgccgcagcaagcagctccctgctcccgccacacccgccgagccagccgcgcggaacccactcccccaccgtgggcccgcctcccgccgccagcctgcccacgattggtcgactgggctgcccgtcgcgagagaaggcggtgcctccggcaggccggcgctcccattggccgggatggcggcggcggcgcgcgcggccccggcgagcaggggaagccggtggccgcggctgcggaacgggcggaggctgccggtttcgtaaccgtcgctcctcctcgctgactcgcgggctgtgaggcctgggtcggctcgggccgcaccgcgcggggccgctcggagtggaggccgcctgggggcaggcgggctagaggagcaggtaaggaggctgcggcgggcgccctgagaacggggaggaggaggccgcggcgacgccggccgctcgactgggtgcgggcccggctcggggaaacccagccccggccccagacggcccgctggcccgggaaggccacgcgaggctggaggcgcgggcggcggcgccgcgcggcgtctgatgcaacctgccggcaacacccggcggggacgctgagctcattcctggccgcggcccagcgctgcggcgccgcccgtcgacccccgcgctgcccggggcgcccctcgcggcgggccgggagcgcgcgaacggccggggaatgccccctgcggagcccggccccctctcggtgaaacgggcgctgtgacccgccaggctcgcattggcccctggggatgaagggtgttcccagaatagcagaaggtggaccgagtcgagctttagaatcctgatcttctagaagggctcagcttgcggtgatcgaaaatctgttcagaagttcaaagactgatcaataaaatagggaaagcaactggtttttaaatgcatgactttgcagagataatattttgcttctttgtggagctgttggaatgtcctgcactttactgttgaacgtagtttagaagaacacgcaacacctacgggtcgaatagagaagaaatgaagcacttcgcaggcatagttggagggagcggagcagggccgacagccagcggaggtgaccagatgcgaaggatggaaatgcatgtgtcgcggggggaggagagtgttttccagggcagctggtgtgttgcttctcttccgcaggtttacgtgttgggttttcctcttgtttgaagtttatactgtaatctggcatcctgaaatgtataagatttagaaaggtctcaat

SEQ ID NO: 2899 - DNA, 6000 bp, Homo sapiens
tcctcctctctcagatcctgccatggtcactcctcagacctcccaacgagggtctcttgctgcccctcttggctattttcaggtcttgtttaaggtgggttcttccagtctccccggccttccccctccccaccatgtggtggtctcttcctacccaattcacaggttcccccttcactccatcgaggggtcccccagctctctctcctcccttcccgagggtgcgtttcctcttctatgccgggatgggggttctcttcaagcctttcaggtccttccttaacccaccaacgctggctgggtgattttcgatctcactttcctttcacagcctctcccgaccagtgttttctccctgcacccaaagtcgcctttattccctcaccaggcctcatcatctctcctcctgtgattgaaagtctctttcagctttgtataaacatctctgtcccccactggtctcttccattgctccctttctcctccatcatttttcaggtctggggtggtctctttcatttaactcatgcccatcttctctcttccattttattttctgagacaggtttccctctgttgcccaggctggagtgcagcggtgtgcacttagctcgctgcagcctcgatctcctaagctcaagtgatcctcctgcctcagcctcccaagtggctgggactacaggcatgtgccaccatgcgcaactatttttttttttttttttctgtagagatggatctctttttgttgtccaggctggtctcaaactcctgggctcaaacgatcctcccacctcaacctcccaaagtgctgggattacaggcgtgaaccaccgtgcccggcctccctttcattttactcatccacatctccccctccctgtctctgcttctcctctttacgatgatttgctcagccaggcacggtagctcatgcctgtaatcccagcactttgggaggtcgaggcgggagaatcacttgaggtcaggagttagagaccagcctggccaacatggcgaaaccccgtctctactaaaaaatacaaaaattagccaggtgtggtggcacgcacctgtaattccagctactcgggaggctgaggcaggagaatcgcttgaacctgggaagtggaggttgcagtgagcagagatcgcgccattgcactccatcctgggtgacagagcgagactctgtctcaaaaaagaaaaaaaatgatttgctccatacttcaaggttatcatccatctcctgtttggggtgatcccttttctgtctcttccaccactccaacactccaccatcatctctcctccctcggtcaggaatgacctcttccctgattacacttacactttcccaccccagcccagcctcttccttctctatccactccccaccatttccacctcctgccagttagattcttcccctctcactatttctctgccccccacagtgtctttccttacccctcttctgcctaagaaagtctattaactctcacccctcccacattttccttctctttaggacagtgtcattttcagaattctgtgacaataatgatttctatcacaccacttatttctgttccctccatctcatgatggtctttccctctttcctgctctccactgatttcttcccacgctcccgtcttgagaaccatgatgatcccccctcagcatggtagtctcttccaccctgaaggtacaccccacctccccaccaggtcccaggccacatcctcttacttgaagtagccttcccgaccaggagcacacatgtgtccttgtcactgctgcaggtcttcatttggccatggcacctgctccccgccgccgtacatatttcgcagtgtagtgggcaccctgcagtgtagacagagggcgaggctgtagtcatgggtggtgtggtcttcggaccacgactttgacttaggacttttgtgtcctgagagaggagggaccagcagctccctggtttttcatgggcgggatgttgaccactgcccaaggaactgtccagagttggacgaagaagcagtggtgatgccagcaaagctgcttccaggggcgggaagcgactccaccatgaagcctgtttgcctaattacatggctggggattttggatgccagggtccgctgagaaagctcaggggcagggaggggtcgtgatggaggtttccatggacttttgtgaaacttcaggtccagctggttcttgaatgtgggattctcctccttgaaggtgccatgtaggtcttgtagacagcaggagctcaggcagggggccctgaggctagggtctgcatcccaggtcaaggagggagagtgaggaccaggagggcagaggacttgaacttcttggttctgagagaggggacagctaggggcccagaaacctgggtcctggggaaagtgaggcttacttggactcctgtgtgcaggggaggagggggctggggcctgaacttcttagtctaaggagaaaggaaatctctctacctcttttaaaaaaatatatcatatgatattaatgtattttttttgagatggagttttgctctgtcacccaggctggggagtgcagtggcacgatcttggctcactgcaacctttgcctcccagtttcaagcaatcctctcacctcagcctcccaagtagctaggattacaggcgcccaccaccaagctcagctaactttttttgtatttttagtaaagacggggtttcaccatgttggccaggctggtcttgaactcctgacctcaagtgatccacctgcctcggcctcttaaagtgctggggttacaggcatgagccaccgcacctggccttctccctctttttttttttttaattatatttttaaagatttccctttccagccatgctctcatctgatttcctagaattgagatgtgtttgggatccttcctggaggatggaggattcagagcccaccaagcccctctctcagggatccaatcacaggagcttttcttctctgggacccccaggctttctcttcctttacccttggcctcttccatgaatctgaatttccagaatgcctccccgttcaccttgaggacttgctgaaggctctttctctctctatatctctctctctctcaatctgggacctctctcttcctgaggtcccagagacagttcaggtcccttgtcacttaccaagacccaggagggtgcagagcaacacaaaggccagcagaaaggtctctggtctcctggagagcctcatggtgtgtgtatcagcagtacctggtccccagcttttataggaagctgaggaggggtgggtctggacccacattcaccctacggggagaaatagctgaggtcagaacccagggcagtcctctgtggcctccgggttgggaaggcagaaccagaatccaaaagtgacctgggcatcttgtgcccagccccccacctccatggagaccccaggagtctgggcttccatccccctcttctattagaacccagaaagtcaccaccctgttttctcaccttcccacggcccattgttgtttgtttgtttgcttgaagaccaagacggagttgggcctcttgattcccagtggctgcaagaactgggattccctctccttctctctcttcccctctcctcccaaggaagcacccagtgtgggtagggccccaccttggagcacccagcatgtccaggctggtcctgcgggtgcggggtgccttgtctcccttcccctctcttcatgtgctcggctcacactccttgtgtgtttgggctgtctccagctgcgaccccacccagggctgcacccttgggtctccaaggcaccgaatgaacagagggatgtctgtcggcagtcataggcgggcgtagtaaaagacagatgcccacagtccacatattgggaaactgaggcttttgtggaagaactccaggataggggtgtgtgtgtgtgtgtgtggtgggggttgggcacatgctttgtgttatatttaggacgcagaacccttctcttttggcctcaggcataaggctgaaagagatctgctaatttttttcgcgcgtgcgcgcgcgcgtatgtatgtatatgtgcgtgtgtgtgtgtgtggcaaggggacagagagaagagtgcagccgcctgagccatttgaagagatcctgttgcgtagaatccaggttccctacgaaactacgaaaattcactcagatttgctgtcctagcccagcgcagtcgctcacgcctgtagttccagcactttgagaggccgaggcaggtggatcgcttgagctgaggagttcgagaccagtctgggcaacatggcaagacccgccgccctctcaccccatgtctccacaaaaaatacaaaaattagccgaatgtggtggcgcgtgcgtgtaatcccagctacttaggaggctgaagtgggaggatcccttggccccaggagacaggggttgcagaaagccgagatcgtgccactgcactccatcctgggtgagagagcaagaccctgtctcaacaaaaaatttttaaaaaataaaataaataataatacagcaaaaagatttgctttctcggcttcagtgtgggcggtaactccatcgtgcaatgagaaaggcgaatttcttccagacaccaatcccggaggtcgcttctgttgctaggctcccagaaagcagggttcggacgtcattgggaggcgaggctagagcggggttgtgtgtggcggagggaggcggggctggaggaaacgctcgttgctaaggaacgcagcgctcttcccgctctggagaggcgcgactgggcttgcgcagtgtcgacgccggcgccggcgcgccggggtttgaaaggcccgagcctcgcgcgcttgcgcactttagccagcgcagggcgcaccccgccccctcccactctccctgcccctcggaccccatactctacctcatccttctggccaggcgaagcccacgacgttgacatgccggagatccgcctccgccatgtcgtgtcctgcagcagccaggactcggtgagggacctgcatgggggaggttggaagacgtgagggaattaatgaggatagctcttaaaagagcttttggggttctcttggaagtctaaggagagtcatggggggatttccaggaggctaaaagtgaattgtggagagatgttgaattagggacgttccggcgtctagggaacttccggagagaaaaggaggaatagggaagctttcttggagagcccataggtgaacttccacgggaaagtgttgtaggggaaactccaggcagagtgtcgggggattaacgggagagcttaaatctgggggtcgtagaggccttgggaggactcaaaggaatcatctgagagctggaggcctagctgtcatctctgtgccctaattctcctctcccactgttgtttccagactcactgtgcagaaaatcttctcaaggcagacacttaccgaaaatggcgggcagccaaggcaggcgagaagaccatctctgtggtcctacaggtgatcctgccaccccacctcctcctcactaggagtctggagtccggggttccagattctgctcctgagccaactggcagtgggtttagtcactttctttgctgggcctcagcttccttactcggaaaatgggcagcataatccctgtgcccctcagcagagaggaaaggagacccaaggattaagtccaggatgaccacaggaatcagtgtgtggtcctgggcaggtggcatctactttctgggttccagtttcctcagctggaacaaaatgaatcattgccacgtactctgcctcctgcagccagtgggctcagggctggaaggtgtccaggaaggtcgtctaagccaatcaactccactttaaagaaggggaaactggccggatgccgtggctcatgcctgtaaacccagcactttcagagcctgagatgggaggattgcttgagctc

SEQ ID NO: 2900 - DNA, 6000 bp, Homo sapiens
ctccacctcccgagtagctgcgatcacaggcgaccgccaccatgcccggctatttttttgtatttttaatagagacggggtttcaccatgttggccaggctggtctccaactcctgacctcaggtgatccgcccgcctcggcctcccaaagtgctgggattacaggcgggagccactgcgccagcccggccggggcggtctctttcaagccccctagagccatgcggccaaatctgtctggtgcatggcctggagtgctttcttaggtagccctccctcccgctgccatagcccctagtcggcctttggtggtctcttccagctccccattgccaacctcagcctgctggatgtggtcccttccaccccaccccaccccacccacggccacccctctctccctgtccttccgggattactctatttcaggccgcctatggccacccccatgccttcgtgaaatggtctcttccagcctcctcaactccccgccaacccccgcccaccccgtagtctcttccaatgaaccccggtcccagcaacaggcatcctcctctctcagatcctgccatggtcactcctcagacctcccaacgagggtctcttgctgcccctcttggctattttcaggtcttgtttaaggtgggttcttccagtctccccggccttccccctccccaccatgtggtggtctcttcctacccaattcacaggttcccccttcactccatcgaggggtcccccagctctctctcctcccttcccgagggtgcgtttcctcttctatgccgggatgggggttctcttcaagcctttcaggtccttccttaacccaccaacgctggctgggtgattttcgatctcactttcctttcacagcctctcccgaccagtgttttctccctgcacccaaagtcgcctttattccctcaccaggcctcatcatctctcctcctgtgattgaaagtctctttcagctttgtataaacatctctgtcccccactggtctcttccattgctccctttctcctccatcatttttcaggtctggggtggtctctttcatttaactcatgcccatcttctctcttccattttattttctgagacaggtttccctctgttgcccaggctggagtgcagcggtgtgcacttagctcgctgcagcctcgatctcctaagctcaagtgatcctcctgcctcagcctcccaagtggctgggactacaggcatgtgccaccatgcgcaactatttttttttttttttttctgtagagatggatctctttttgttgtccaggctggtctcaaactcctgggctcaaacgatcctcccacctcaacctcccaaagtgctgggattacaggcgtgaaccaccgtgcccggcctccctttcattttactcatccacatctccccctccctgtctctgcttctcctctttacgatgatttgctcagccaggcacggtagctcatgcctgtaatcccagcactttgggaggtcgaggcgggagaatcacttgaggtcaggagttagagaccagcctggccaacatggcgaaaccccgtctctactaaaaaatacaaaaattagccaggtgtggtggcacgcacctgtaattccagctactcgggaggctgaggcaggagaatcgcttgaacctgggaagtggaggttgcagtgagcagagatcgcgccattgcactccatcctgggtgacagagcgagactctgtctcaaaaaagaaaaaaaatgatttgctccatacttcaaggttatcatccatctcctgtttggggtgatcccttttctgtctcttccaccactccaacactccaccatcatctctcctccctcggtcaggaatgacctcttccctgattacacttacactttcccaccccagcccagcctcttccttctctatccactccccaccatttccacctcctgccagttagattcttcccctctcactatttctctgccccccacagtgtctttccttacccctcttctgcctaagaaagtctattaactctcacccctcccacattttccttctctttaggacagtgtcattttcagaattctgtgacaataatgatttctatcacaccacttatttctgttccctccatctcatgatggtctttccctctttcctgctctccactgatttcttcccacgctcccgtcttgagaaccatgatgatcccccctcagcatggtagtctcttccaccctgaaggtacaccccacctccccaccaggtcccaggccacatcctcttacttgaagtagccttcccgaccaggagcacacatgtgtccttgtcactgctgcaggtcttcatttggccatggcacctgctccccgccgccgtacatatttcgcagtgtagtgggcaccctgcagtgtagacagagggcgaggctgtagtcatgggtggtgtggtcttcggaccacgactttgacttaggacttttgtgtcctgagagaggagggaccagcagctccctggtttttcatgggcgggatgttgaccactgcccaaggaactgtccagagttggacgaagaagcagtggtgatgccagcaaagctgcttccaggggcgggaagcgactccaccatgaagcctgtttgcctaattacatggctggggattttggatgccagggtccgctgagaaagctcaggggcagggaggggtcgtgatggaggtttccatggacttttgtgaaacttcaggtccagctggttcttgaatgtgggattctcctccttgaaggtgccatgtaggtcttgtagacagcaggagctcaggcagggggccctgaggctagggtctgcatcccaggtcaaggagggagagtgaggaccaggagggcagaggacttgaacttcttggttctgagagaggggacagctaggggcccagaaacctgggtcctggggaaagtgaggcttacttggactcctgtgtgcaggggaggagggggctggggcctgaacttcttagtctaaggagaaaggaaatctctctacctcttttaaaaaaatatatcatatgatattaatgtattttttttgagatggagttttgctctgtcacccaggctggggagtgcagtggcacgatcttggctcactgcaacctttgcctcccagtttcaagcaatcctctcacctcagcctcccaagtagctaggattacaggcgcccaccaccaagctcagctaactttttttgtatttttagtaaagacggggtttcaccatgttggccaggctggtcttgaactcctgacctcaagtgatccacctgcctcggcctcttaaagtgctggggttacaggcatgagccaccgcacctggccttctccctctttttttttttttaattatatttttaaagatttccctttccagccatgctctcatctgatttcctagaattgagatgtgtttgggatccttcctggaggatggaggattcagagcccaccaagcccctctctcagggatccaatcacaggagcttttcttctctgggacccccaggctttctcttcctttacccttggcctcttccatgaatctgaatttccagaatgcctccccgttcaccttgaggacttgctgaaggctctttctctctctatatctctctctctctcaatctgggacctctctcttcctgaggtcccagagacagttcaggtcccttgtcacttaccaagacccaggagggtgcagagcaacacaaaggccagcagaaaggtctctggtctcctggagagcctcatggtgtgtgtatcagcagtacctggtccccagcttttataggaagctgaggaggggtgggtctggacccacattcaccctacggggagaaatagctgaggtcagaacccagggcagtcctctgtggcctccgggttgggaaggcagaaccagaatccaaaagtgacctgggcatcttgtgcccagccccccacctccatggagaccccaggagtctgggcttccatccccctcttctattagaacccagaaagtcaccaccctgttttctcaccttcccacggcccattgttgtttgtttgtttgcttgaagaccaagacggagttgggcctcttgattcccagtggctgcaagaactgggattccctctccttctctctcttcccctctcctcccaaggaagcacccagtgtgggtagggccccaccttggagcacccagcatgtccaggctggtcctgcgggtgcggggtgccttgtctcccttcccctctcttcatgtgctcggctcacactccttgtgtgtttgggctgtctccagctgcgaccccacccagggctgcacccttgggtctccaaggcaccgaatgaacagagggatgtctgtcggcagtcataggcgggcgtagtaaaagacagatgcccacagtccacatattgggaaactgaggcttttgtggaagaactccaggataggggtgtgtgtgtgtgtgtgtggtgggggttgggcacatgctttgtgttatatttaggacgcagaacccttctcttttggcctcaggcataaggctgaaagagatctgctaatttttttcgcgcgtgcgcgcgcgcgtatgtatgtatatgtgcgtgtgtgtgtgtgtggcaaggggacagagagaagagtgcagccgcctgagccatttgaagagatcctgttgcgtagaatccaggttccctacgaaactacgaaaattcactcagatttgctgtcctagcccagcgcagtcgctcacgcctgtagttccagcactttgagaggccgaggcaggtggatcgcttgagctgaggagttcgagaccagtctgggcaacatggcaagacccgccgccctctcaccccatgtctccacaaaaaatacaaaaattagccgaatgtggtggcgcgtgcgtgtaatcccagctacttaggaggctgaagtgggaggatcccttggccccaggagacaggggttgcagaaagccgagatcgtgccactgcactccatcctgggtgagagagcaagaccctgtctcaacaaaaaatttttaaaaaataaaataaataataatacagcaaaaagatttgctttctcggcttcagtgtgggcggtaactccatcgtgcaatgagaaaggcgaatttcttccagacaccaatcccggaggtcgcttctgttgctaggctcccagaaagcagggttcggacgtcattgggaggcgaggctagagcggggttgtgtgtggcggagggaggcggggctggaggaaacgctcgttgctaaggaacgcagcgctcttcccgctctggagaggcgcgactgggcttgcgcagtgtcgacgccggcgccggcgcgccggggtttgaaaggcccgagcctcgcgcgcttgcgcactttagccagcgcagggcgcaccccgccccctcccactctccctgcccctcggaccccatactctacctcatccttctggccaggcgaagcccacgacgttgacatgccggagatccgcctccgccatgtcgtgtcctgcagcagccaggactcggtgagggacctgcatgggggaggttggaagacgtgagggaattaatgaggatagctcttaaaagagcttttggggttctcttggaagtctaaggagagtcatggggggatttccaggaggctaaaagtgaattgtggagagatgttgaattagggacgttccggcgtctagggaacttccggagagaaaaggaggaatagggaagctttcttggagagcccataggtgaacttccacgggaaagtgttgtaggggaaactccaggcagagtgtcgggggattaacgggagagcttaaatctgggggtcgtagaggccttgggaggactcaaaggaatcatctgagagctggaggcctagctgtcatctctgtgccctaattctcctctcccactgttgttt

SEQ ID NO: 2901 - DNA, 6000 bp, Homo sapiens
ctcccctggaagtgacacatggcctttttttgagacagagtcttgctctgttgcctaggctggagtgcagtggcatgatctcggctcactgcagtctctgccttgcgggttcaagcgattctcatgcctcagcctcccgagtagctgggattacaggcctctgccgccacgctgggctaatttttgtatttttagtagagatggggtttcgccatgttggccaggctgatctcaaactcctgacttcagatgatccacccgcctcggcctcccaaagtgctgggattacaggcgtgagccacagcgcccggccccttctgcactcatttcattggccatggcaaatcacatagccaggtgtgacttcaggaagtggcaaggcgggtcctcagacacgcccgggaggaggaggagggggatatgtgtgaaaagcctgacaggcagcctcagtggggtttccagaaactcctagttctaagacagagaagggaggaggacctgggccaggagagggcccaacctctgaccccttgcagctgtgatccggaactatgggaacctcctgctggagatgtccgctgtggtccctgatggcatcgtggccttcttcaccagctaccagtacatggagagcaccgtggcctcctggtatgagcaggtacgcctggccaccccctccctgcacctgctctcctcagtccctggcactgcaccgctatgtcagcttcattcctctcacactctgatggtgacaggtttcctgtgtgacaggagagtgtgtgcagcatgtaggaatggggtgtaagcagcacacacccccatgccccgcccccagtacatcaggctgagaatgcagatataagccccaatgtgggcccctccctcagaggagtaccctgtggcagagtcacccccacgttctaggttccttgcttctctgctgcttttggggttacccatccctgttatcctccagcacagatggcctggtggggaggcccagatagcaggcgtggctctagctgggttagaggaattctagagaattaaggctggaccaagactcggggcgagcctctcaagggtctgcaggagccccttcagggaagcagctagaggaggtcgtggggcattctggaaacagggctcaccacagccaggccctgggtgaccagcaggacatgggtgggaggggaggccactctgcactttgtgcctctgagcacaccatggccgggctctcaggagtgggtgaaagcactttggggtgaggtgagtgaacttggctaatccaggtattggaaaggcacgcatgggaggcgggaacgtcatcctcacagccaggacatcggccttgtgcttcaataggcggcttccacgcggcgggaaaggtgacccagtccccacagcgcaggtgccttttgtgtcctacttaagacacctttgcctaccccaaggtcatagagagaggctcctttgtttccttctaggagcttgtggttttagctttcacatccaggtctatgaggtacctcaaattcatctttctatgtggtgtgaagtagggggtcaaggttcattttttggttccatttgaaaatccacttgctccagtaaaagctctccccactgaactgcacaggtggctgtgtgtttctggactctccattctgtcccagtggtctgtccttgcattggctccacactgtctctattgtagtgtcatatgggaagtctcagggcagcctctgattggctctgcctgcctcacagtcagcccctccaccaatcgctggcaggggttggggtgccctgattggccacccgcttgggccacatgcctgccccacttatccagcaatgattggttccccacccagatcactgtttccccaaagaactgaggttggacaattccaccctccctcaccacatctcagatgagccagctgaggcccagagacatggtgatgtgggagtccccagaagagttggatgtaaccaggatggctgtgccctgaacccaccctgacctccctgggtccttccccaggggatccttgagaacatccagaggaacaagctgctctttattgagacccaggatggtgccgaaaccagtgtcgccctggagaagtaccaggaggtgggtgtgcgaggccagcgtggagaggggtcggggaggtggctctgaggagtgacctaacttgcgtctcggtctccccacctcaggcctgcgagaatggccgcggggccatcctgctgtcagtggcccggggcaaagtgtccgagggaatcgactttggtgagtggactgggctcttcctccccaggtgtcttcccagagctctctggaacacctgcccgctctgctgtctgctcccgcggggaaccacccacccccagcctaggtgcacagaggggccctcccctcccctctgtccctaggcacccggcgggaacacaccctctccccccaactcagacacagcatcctgggtcgcgtgaggctgtccctgtcccaccagccacacttgtaacccccctcgccccctctcctctgcccaccagtgcaccactacgggcgggccgtcatcatgtttggcgtcccctacgtctacacacagagccgcattctcaaggtgagtagctctgtctcccagggagtcccacagtgttaggatcaagggaggagtggctcccccacctccccagcttctcatcctccgtatctgcaggcgcggctggaatacctgcgggaccagttccagattcgtgagaatgactttcttaccttcgatgccatgcgccacgcggcccagtgtgtgggtcgggccatcaggggcaagacggactacggcctcatggtctttgccgacaaggtgcagcttcaggggtgcccctgtgctcccatcccaggctccaagaaccaggctgtttcccgttcatttcccaggtggggtgggttgcagggtggagagtggcccaggctccccgaatgaccttctgtccctggcctgcgcttctgcccacagcggtttgcccgtggggacaagcgggggaagctgccccgctggatccaggagcacctcacagatgccaacctcaacctgaccgtggacgagggtgtccaggtggccaagtacttcctgcggcagatggcacagcccttccaccgggtgaggcctgcgtccccctcccggcaccctcccaggctgagcttctcctccagaaagtccccttggattctccccactccccaccctcagcctgcctgtcctcctgccctcagcaaagagaagtttatcgtgcatctacgtgccaggctctggggggaagggggagattcgaggggccacagatgccagcaggtggcccaggcacggcagggtgagagaagttggggtgaggaggcattgggcgttttcaggagagacggtgctggcctggagaaagccggtccttctccgactccctagctggctcctccctcagccccatcttatgttgacagggatggcccgctctggattatacggacatctccaaattcattcaaacatcctgtccctactggccattcgggggggtggttggggaagtgcagcagctgcctgggcccctgcccaacagtgcccccctctccctttcctctgttctctgcaggaggatcagctgggcctgtccctgctcagcctggagcagctagaatcagaggagacgctgaagaggatagagcagattgctcagcagctctgagtggggcgggtggggccataaacggttcctggtgactcctgagtcttgcctggccctggttcccagcggcggtggtgctagaaggtcttatgaagtcaggtgacatttctcactgtcacgtccacagcctttaatcgcaggagaaggcagctatccaccaggtacccagaggcaagggggggccaggagatgatagaccccctctcaccccaccagcccatccctcctgcactgttcccaagaagctgcggccagcgcagttcactggacgttagtgggggctcaggtcctgggtgctggcgctgagggtccgaggggccttgtccaggtgccagctgggaaactggagacaggcacaggggatggttggaggggaggtgaggggcaagtgttacatccaccctccagctccaggtccagcctggcagccaactatccaaccccctcgcctctaccccaagtaaaacccatctttgctcctgtcctgggtctcttctgacaccaacccaccacctgctgactccaccactggcccgaccgccctgcctttgcctcatctctgcacctacccacatggcctcctctatttttgacccagatgtccccctcacctgagtcccaggagcccttggagcatccacgttcagtgtgttgagtgacatggctctcttcattctgcaaagagggcagcagggaggaaatgagtgaatccaggagtggcccccctccacgagggacctttccagcacagggtttgatctgtgtgtatcacaggggagatgggagccatggaaggttcttgagcaagatgggggtgggggtggggtgggctgtggattctgctgatgtcagggctctttgccgacctgatcaacactcacccggctgctcctgccgccgcctcgcctcggagccgggagaccagcttctcacttcctcgcctgatagactcacggatcttggagagtgagctgctgcggcgaagggcctggggaggggccggggatgctgctcagtcccccaggcccatgcagtccccacgcccaccccaggagccgaagcacagcccatcctcacctgttctgcgtcaccagctgtgcctgtgttgggggcacctagggggaaagatgggggacactgagatggggacatagagaagccaccaggagggaagacagacaggggctaggggctcaccgagaggggcgggtaggtcctccttgtggaggatttctttgtacagctcttccgcttgttgatacttgttctgtttcaggtaggctgaggcctgcggagaagggagtgtctgggaacttttcggaccccagttcccaacactgcatccagtcccgcctttttttttttttttgtagagacaggggtcttggtatgttgcccaggctggtcttgaactcctagcctcaagtgatcctcctgccttggcctcccaaagtgttggggttacaagcgtgaaccaccacgtctggccccactttctaatgtgctgacctggccgtatccttcccctgcctaaagccttgccctggggcagagtgggtttggagctcggccttacttcctgccctggggatggaggacaggcagcctcctgtttctgagcctgtctgctgtactttgggctggtggcatggcctcggtgcctcagtcttcccacacgcaaagtggagcgacagctcccacctcatagggacgctataagaactagcgatgtggggaccgggctaagaggggagccggccacagtgagctcaataaatgtctgctgctgccacctgtgcctgccagcttccgcttcactggctgtcctctggctgccgtggacttacgcgtttcctgattccgtgttctgtgctgagccagctcctgtgtctgacacttgctccaagggcccggcctggggggcccccccccaccctcacgttgctcaccctgtatccaaccaatgggtgcctccccagggcaggaccctccactcttggcccactctgagccccaggggcctcaccaggttgttcttggtcttggccacgttggggtcatggggcccgcccagtgcctcatagatgctcagggcccgggcatagtgccgctccacgtcctcaaacttgccctggttctggcacagcagggccaggttgttgagctgcttggccacatctgggtggtcagcacccaggacctgggggccaggggtcacaagtcagagggatcatacaggat

SEQ ID NO: 2902 - DNA, 6000 bp, Homo sapiens
gtaatcccagcactttgggaggccatggcgggcagatcccttaagcccaggagttcaagaccagcctgggcaacgtggcggaaccatgtctctactaaaaatacaaaaaattagctaggcacggtggtgcacacctacagtcccagctactcaggaggctgaggtggcaggatcacttaagcctgggaagttgaggctgcactgagccatgttctcaccactgcacttcagctggagcaacagaagtgagaccctgtctcaaaaaaaaaaaaaaaaaaaaaagagagagaaaagaaacttttatgcaacagtgcttgtcagggtccttccatcctttctctctttctccctttctctctctctctctgtctctttctctctttctctctttccttctttcttcctttctgagacggagtctgttgcccaggatggagagcaatggcgcgatcttggcttactgcaacctctacctcccaggttcaagccattctccagcctcagcctcccaagtagctgggactacagacatgtgtcaccacgcccggctaatttttgtatttttagtagagatgaggtttcaccatgttggccaggctggtctccaactcctgacctcaagtgatccgcccgcctcggcctcacaaagtgctgggattataggcgtgagccatcactcctgccatggagctgacttttgtttttttcgagacagagtttcactcttgttgcccaggctggagtgcaatggcgcgatctcggctcagcgttaacctctgcctcccaggttcaagcgattctcctgcttcagccttctgagtagttgggattacaggcatgcgacaccacacccagctaatttttgcatttttaatagagatgaggtttcaccgtgttggtcaggctggtctggaactcctgacctcacatgatccacctgttccagcctcccaaagtgctgggattacaggcgtgagcccccgcgcccagccaggagctttctaaacaaaataaataagtaaaatattcagcatgtcacatggttaaatgagctctcaagaacaataaagcagggaaaggggatatagtgtgtgtgtgtgtgtgtgtgtgcgtgcgtgcgtgtgtgtgtgtgcgtgcgtgcgtgcgtgtgtgtgtgtgtctaggaggtagatttaatttggtggtcaggaagccctcattgagaaggagacttttttttttttgagacagagtcttgctttgtcacccaggctggagtacagtggcatgatcttggctcactgcagcctctgcctcccgggttccagcaattctcctgcctcagcctcccgggtagctaggattactggtatgtgctaccatgctttgccaatttttgtatttttagtagagacgggatttcaccatcttggccaggctggtctcgaactcctgatctcaggtgatctgcccacctcagcctcccaaagtggtaggattacaggtgtgagccaccatgccgggccgagaagttgacaattgagcaaagagctgagggaggtgagtgtgtcagccacatggctatcaggggaaacagcattccaggcagacaaaatagctggtgcaaaggccctgagatgggatgtgcttgttatgttttagagacagcaaggagaccagcatagctgaaacaaaatgagctgggggagagagaggaggagatcagagcagtaaggtgggttggtatggggatgatgagcagtaagctagttacagaggactctgtaggtgacagtaaagattttggatctgggctggatgcagaggctcacgcttgtaatcccagtactttgggaggctgagggaacaggatggcttgagcccaataccagcctgggcaacatagcgagaccctgtcaataacaaaatatattttcttcctgtaggagatagaaaagtaaacataaaaaaatttatgtaaataaattaagccgggcacagtggctcacgtctgtaatcccaccactttgggaggctgaggtgggagaattgcttgagctcaggagttcaaccagcctggacaacatagtgagataccctcgtctctacaaaaaattaaaaaaaattaaccaggcgtggtgtcgtgtacccgcagtcccagctactcaggaggctgaggtgggaggatcacttgagccctggaggtcaaggtggcaatgagccaaattcacaccaccatactccaggctgggacagagcaagactctgtctccaaaaatacagccgggaagggtggctcacacctgtaatcccagcactttgggaggctgaagtgggtggatcttttgaggtcaggagtttgaggccagcctggccaacatagtgaaaccccgtttctactaaaagtataaaaattagctgggcagtagtggtgcgcacctgtaatcccagctactagggaggctgaggccagagaattgcttgagcctgggtggcagaggttgcggtgcgctgagattgtgccactgtactccagtctgggcgaaagagtgagaccttgtctcaaaaataaataaattaagaattaattaatttaaaaaagagatttcgatctgcccctgccttcccctccagctgccctttctctgctccctgtgctcaactcagagctccacccccacaggcttcctttcagcactcacaggcctcagctttcttctggcctagagcttttgtgtatgatggtctctctccctggaacacctttctcacttctctcatccatcccctcttgctggttgatctcttctaattattttctggctctactcaaacctcgcttcttccacgaagccttctctgatcacttggccaacactcacaccccacagttgacagtagacatcctgtcataataagtcttttttttttttctttttctgggacggagtcttgctctgtcacgcaggctggagtgcagtggcgtgatcttggctcacttctgcctcctgggttcaagcaattctcctgctttagcctcccgagtagatgggattacagatgcatgccactatgcctggcttttttttttttttttttttttttagtagagatagggtttcaccatgttgaccaggctggtcttgaactcctgacctcgtgatccatctgccttggcctcccaaagtgctgggattacaggcatgagccactgcacccagcccataatcaatctttatggtgacttgaagttttccttcacagcacttttgtacttgtgattatacacgtgcgcacacacacacacacacacacacacacacacatttgagataggttttcactcctgttgcccaggctggagtgcagtggcacaatcactgcccattgcaacctctgcctcccaggcccaggtgattctcccacctcagcctcctgagtatctgggactacaggtgcacgccaccacgcccagctaatttttgcattttttgtagagacgggttttcaccatgttgcccaggctggtctctagctcctgagctcaagcaatgtactcgccttggccttccaaagtgttggaaccacaggcacgagccaccactccaggctgtaatcatatattcatttgtatatttaatatctgttctttgaggccaggcctggtgcctcacccctgtaatcccaacaatttgaaaggctgaggggagaggatcacttgaacctgcgagtttaaccagcctgggcaacgtggtgagacctcgtctctaaaaaaatttaaaaaataaaacttagctgggcttggtggtgcacacctgtggtcccagctactctggaagctgaggtgggaggatcgcttgagcccaagaggtggaggctgcagtgagctgtgactgtgccactgcactccagccttggcgacagagaaagaccctgtctcaaggaaaaaaatctgttctttgagggcaggtgctgaggctgtcatggtcacctttctgttcccaggggccagcacaggatcagacacatggtagatgccacatagctatttgttgaagaaacaaacaaaagctagcatttatgttttatttattagttattattattaatatttgaaatggagtttcgcttttgttgcccaggctagagtgcgacggcgccatctctgctcactgcaacctctgcctcccaggttcaagcaattctcctgcttcagcctcccgagtagctgggattacaagcatttgccagcacgcccggctaattttgtatctttagtagagacaggttttctccatgttggtcaggctggtcttgaactcccgacctcaggtgatccacctgcctcagcctcccaaagtgctgggattacaggcttgagccaccgcgcccggcctgcaaagccatttctaactcttgggcccagaaaggatcaccaatttccctgtcattctccgttagactattcgctactgagacgatttttttttttttttgagacgaggtggaggggcgggggttctcgctatcttgctcaagctgatctcgaactcctgggttcgatcaatactcagacaatcttggcaggcgcaggaggaccaaattctagtgaatgagatcgagtctctcggctctttcccttccatgttttctttttgattggccctcgacgatcctcagtgacgcctcccgcaccgcctcacccgagagtcagccgccctcgcttttccgtgcgcacgcgcagtatcccgattggctctgccctagcggattgacgggcaggttagccaatggtctcgtaatataggtggagcgagccctcgaggatgtccacgacccggcctctcgctgaatattcatgagggaggcgggtcgaccccgctgcacagtccggccggcgccatgaagtgagaagggggctgggggtcgcgctcgctagcgggcgcggggggtcttgaagatggggtcatcggtgggcgcgcctgggtccccaagggggcgaggggagggtgaaggggtgggacgggggcagccgcagggagcagcagtgatagcgaggagacactgagggggccccgaggctcctgaggacctgagggttaccgggggcgccgggcccgtcacccttctctgggctcgacgaccgggcactgtggaggcgggagaggggctgaggggacgggaactgacccagcagcccctgccgccaggctcaacgtggacgggctcctggtctacttcccgtacgactacatctaccccgagcagttctcctacatgcgggagctcaaacgcacgctggacgccaaggtgggtggccggtgggcccgacccgcccactcgaccggtggggctgccacgcctgggcctaagacagattgcaggacgtctggattttagaagtccgaggtccctgggaatccaggaccccataatcttccgttatctaaaacaataatggtgaataggctgggcgcggtggctcgcgcctgtaatcccagagctttgggaggacgaggcgggcggatcacttgaggtcaggagttggagaccagcctggccaacacggtgaaaccccgtctgtactaaaaatacaaaaattagccaggtgtggtggcgggcgcctgtaatcccacctactcgggaggctgaggcaggaggatcgcttgaggccaggagttggaggctgcagtgagccatgattgtgccactgcattccagcctgggcaatagtgacacttgtctcttaaaaaagaagggagaaaagttcactatatatcagctactgtgccaaatatttaacctgcaatttctcacaatcctcatagtcatgttatgaggaaggttttattattaggcccattttattttatttatttatttttgagattgaattacaggtgcgcgccaccacatctggctaattttttgtatttttagtagagacggggtttcaccttgttggcccagctggtcttgaacttctgacctcaggtggttcacctgcctcagcctcccaaa

SEQ ID NO: 2903 - DNA, 6000 bp, Homo sapiens
gtatttccttggtatttaattcatgttctgcttggtttagcaattttataaaccagcctaggccttgcacagtggctcatgcctgtaatcccagcgctttgggaggccaaggcaggtggatcacctgaggtcaggagttcgagaccagcctggccaacatggtgaaaccccgtctctactaaaaataaaaaaataaaaaaaaaaatagccgagcatggtggtgggtgcctgtaatcccagctcctggggaggctgaggcaggagaatcacttgaaaccgggaggcggaggttgtggtgagccaagatcgtgccactgcaatccagcttgggcaacaagagtgaaaatccatctcaaaaataataaaataaaataaaataaaatataaaccagtcagtttcttcattagagttctggaaattcttacccagtccaaacaatatgatcctaaaatttatcagaaacctatactcaggctgggtacagtggctcacgctggtaatcccagcactttgggaggccatggcgggcagatcccttaagcccaggagttcaagaccagcctgggcaacgtggcggaaccatgtctctactaaaaatacaaaaaattagctaggcacggtggtgcacacctacagtcccagctactcaggaggctgaggtggcaggatcacttaagcctgggaagttgaggctgcactgagccatgttctcaccactgcacttcagctggagcaacagaagtgagaccctgtctcaaaaaaaaaaaaaaaaaaaaaagagagagaaaagaaacttttatgcaacagtgcttgtcagggtccttccatcctttctctctttctccctttctctctctctctctgtctctttctctctttctctctttccttctttcttcctttctgagacggagtctgttgcccaggatggagagcaatggcgcgatcttggcttactgcaacctctacctcccaggttcaagccattctccagcctcagcctcccaagtagctgggactacagacatgtgtcaccacgcccggctaatttttgtatttttagtagagatgaggtttcaccatgttggccaggctggtctccaactcctgacctcaagtgatccgcccgcctcggcctcacaaagtgctgggattataggcgtgagccatcactcctgccatggagctgacttttgtttttttcgagacagagtttcactcttgttgcccaggctggagtgcaatggcgcgatctcggctcagcgttaacctctgcctcccaggttcaagcgattctcctgcttcagccttctgagtagttgggattacaggcatgcgacaccacacccagctaatttttgcatttttaatagagatgaggtttcaccgtgttggtcaggctggtctggaactcctgacctcacatgatccacctgttccagcctcccaaagtgctgggattacaggcgtgagcccccgcgcccagccaggagctttctaaacaaaataaataagtaaaatattcagcatgtcacatggttaaatgagctctcaagaacaataaagcagggaaaggggatatagtgtgtgtgtgtgtgtgtgtgtgcgtgcgtgcgtgtgtgtgtgtgcgtgcgtgcgtgcgtgtgtgtgtgtgtctaggaggtagatttaatttggtggtcaggaagccctcattgagaaggagacttttttttttttgagacagagtcttgctttgtcacccaggctggagtacagtggcatgatcttggctcactgcagcctctgcctcccgggttccagcaattctcctgcctcagcctcccgggtagctaggattactggtatgtgctaccatgctttgccaatttttgtatttttagtagagacgggatttcaccatcttggccaggctggtctcgaactcctgatctcaggtgatctgcccacctcagcctcccaaagtggtaggattacaggtgtgagccaccatgccgggccgagaagttgacaattgagcaaagagctgagggaggtgagtgtgtcagccacatggctatcaggggaaacagcattccaggcagacaaaatagctggtgcaaaggccctgagatgggatgtgcttgttatgttttagagacagcaaggagaccagcatagctgaaacaaaatgagctgggggagagagaggaggagatcagagcagtaaggtgggttggtatggggatgatgagcagtaagctagttacagaggactctgtaggtgacagtaaagattttggatctgggctggatgcagaggctcacgcttgtaatcccagtactttgggaggctgagggaacaggatggcttgagcccaataccagcctgggcaacatagcgagaccctgtcaataacaaaatatattttcttcctgtaggagatagaaaagtaaacataaaaaaatttatgtaaataaattaagccgggcacagtggctcacgtctgtaatcccaccactttgggaggctgaggtgggagaattgcttgagctcaggagttcaaccagcctggacaacatagtgagataccctcgtctctacaaaaaattaaaaaaaattaaccaggcgtggtgtcgtgtacccgcagtcccagctactcaggaggctgaggtgggaggatcacttgagccctggaggtcaaggtggcaatgagccaaattcacaccaccatactccaggctgggacagagcaagactctgtctccaaaaatacagccgggaagggtggctcacacctgtaatcccagcactttgggaggctgaagtgggtggatcttttgaggtcaggagtttgaggccagcctggccaacatagtgaaaccccgtttctactaaaagtataaaaattagctgggcagtagtggtgcgcacctgtaatcccagctactagggaggctgaggccagagaattgcttgagcctgggtggcagaggttgcggtgcgctgagattgtgccactgtactccagtctgggcgaaagagtgagaccttgtctcaaaaataaataaattaagaattaattaatttaaaaaagagatttcgatctgcccctgccttcccctccagctgccctttctctgctccctgtgctcaactcagagctccacccccacaggcttcctttcagcactcacaggcctcagctttcttctggcctagagcttttgtgtatgatggtctctctccctggaacacctttctcacttctctcatccatcccctcttgctggttgatctcttctaattattttctggctctactcaaacctcgcttcttccacgaagccttctctgatcacttggccaacactcacaccccacagttgacagtagacatcctgtcataataagtcttttttttttttctttttctgggacggagtcttgctctgtcacgcaggctggagtgcagtggcgtgatcttggctcacttctgcctcctgggttcaagcaattctcctgctttagcctcccgagtagatgggattacagatgcatgccactatgcctggcttttttttttttttttttttttttagtagagatagggtttcaccatgttgaccaggctggtcttgaactcctgacctcgtgatccatctgccttggcctcccaaagtgctgggattacaggcatgagccactgcacccagcccataatcaatctttatggtgacttgaagttttccttcacagcacttttgtacttgtgattatacacgtgcgcacacacacacacacacacacacacacacacatttgagataggttttcactcctgttgcccaggctggagtgcagtggcacaatcactgcccattgcaacctctgcctcccaggcccaggtgattctcccacctcagcctcctgagtatctgggactacaggtgcacgccaccacgcccagctaatttttgcattttttgtagagacgggttttcaccatgttgcccaggctggtctctagctcctgagctcaagcaatgtactcgccttggccttccaaagtgttggaaccacaggcacgagccaccactccaggctgtaatcatatattcatttgtatatttaatatctgttctttgaggccaggcctggtgcctcacccctgtaatcccaacaatttgaaaggctgaggggagaggatcacttgaacctgcgagtttaaccagcctgggcaacgtggtgagacctcgtctctaaaaaaatttaaaaaataaaacttagctgggcttggtggtgcacacctgtggtcccagctactctggaagctgaggtgggaggatcgcttgagcccaagaggtggaggctgcagtgagctgtgactgtgccactgcactccagccttggcgacagagaaagaccctgtctcaaggaaaaaaatctgttctttgagggcaggtgctgaggctgtcatggtcacctttctgttcccaggggccagcacaggatcagacacatggtagatgccacatagctatttgttgaagaaacaaacaaaagctagcatttatgttttatttattagttattattattaatatttgaaatggagtttcgcttttgttgcccaggctagagtgcgacggcgccatctctgctcactgcaacctctgcctcccaggttcaagcaattctcctgcttcagcctcccgagtagctgggattacaagcatttgccagcacgcccggctaattttgtatctttagtagagacaggttttctccatgttggtcaggctggtcttgaactcccgacctcaggtgatccacctgcctcagcctcccaaagtgctgggattacaggcttgagccaccgcgcccggcctgcaaagccatttctaactcttgggcccagaaaggatcaccaatttccctgtcattctccgttagactattcgctactgagacgatttttttttttttttgagacgaggtggaggggcgggggttctcgctatcttgctcaagctgatctcgaactcctgggttcgatcaatactcagacaatcttggcaggcgcaggaggaccaaattctagtgaatgagatcgagtctctcggctctttcccttccatgttttctttttgattggccctcgacgatcctcagtgacgcctcccgcaccgcctcacccgagagtcagccgccctcgcttttccgtgcgcacgcgcagtatcccgattggctctgccctagcggattgacgggcaggttagccaatggtctcgtaatataggtggagcgagccctcgaggatgtccacgacccggcctctcgctgaatattcatgagggaggcgggtcgaccccgctgcacagtccggccggcgccatgaagtgagaagggggctgggggtcgcgctcgctagcgggcgcggggggtcttgaagatggggtcatcggtgggcgcgcctgggtccccaagggggcgaggggagggtgaaggggtgggacgggggcagccgcagggagcagcagtgatagcgaggagacactgagggggccccgaggctcctgaggacctgagggttaccgggggcgccgggcccgtcacccttctctgggctcgacgaccgggcactgtggaggcgggagaggggctgaggggacgggaactgacccagcagcccctgccgccaggctcaacgtggacgggctcctggtctacttcccgtacgactacatctaccccgagcagttctcctacatgcgggagctcaaacgcacgctggacgccaaggtgggtggccggtgggcccgacccgcccactcgaccggtggggctgccacgcctgggcctaagacagattgcaggacgtctggattttagaagtccgaggtccctgggaatccaggaccccataatcttccgttatctaaaacaataatggtgaataggctgggcgcggtggctcgcgcctgtaatcccagagctttgggaggacgaggcgggc

SEQ ID NO: 2904 - DNA, 6000 bp, Homo sapiens
ggctcactacagtaatcccgacactttgggagggcgagaagggaggatcgcttgagcccaggagttcgagaccagcctgggctatagtgagaccccacccccccacccccacgcctctacaaaaaaaatacaaaagttggccaggcgtggtggcgcgcgcctgtggtccagctactcggtaagctgatgtgggaggatcatctgagcccgggaggttgaggctgcagtgaggtgtgatcgcaccaccgcactctagtctgggtgacagagagagactccgtctcaaaaaaaaaaaaaaaaaagaaagaaagaaagaaaaagaaaaaaagaaaagaaactgagggtagaaatccaacatccaacttgccaacttggaaataacgtagaacccagggcaattttttcccctcgctcttaactaacgttaaccgattcagaattccactgatcgcaggcggcgggccctttaccgcacttctgcttcaaggaaatgaatcgggagcggggaatgggccgccttctagggggtcctgcccccgctgggttctggcggagcagagaggccccggctccccaacacttccaatcctcttgtggtgcaccatcgcccccttgcagaaaacgcaggagttgcagggttaagtctggcaattccattccccaaggggataactgagtcacaagcccttctacttgggatgacctacttctagaatcgctgtatggtcttggatacagaggcatatttcattttttctttttttcgttttttgagacggagtctcgctctgtcgcccaggctagagtgcagtggtgtaatctcggctcactgcaacctccgcctcctgggttcaagcaattctccgtctcagcctcccgagtagctgggattacaggcgtccgccaccacgcccggctaattttttttttgtattttttagtagagacaaggtttcatcatcttggccaggctggttttgaactcctgacctcgtgatccaccttccatcggcctcccaaagtgccgagattacaggcgtgagccactgtgcccggcctcctgggggaaaattatacctagtgatgagactattagactgattctccttccttcctactaggcgtgagccacctctcctggcccctatatcttctaacattgcaagaaacaatactaagaacctaggattctggatttcctttttctttcctttcttttctttcgtttttttgtttgtttgtttgttttgttttgtttgtttttggtctcactctgtcacccaggctggagtgcagtggcacaatcgcagctcactgcagcctctgcctcctgggctcaagcaattctccctcctcagcctcctgagtatctgggactacaggtgcacaccaacacacatagctttttttttttttttttttttttagatggagtttcgcttttgtcgcccaggctggagtacaattgcgtgatcttggctcactacaacttccacctcccgggttcaagtgattctcctgcctcagctttccaaagtgctgggattacaggcatgagctaccttgcccagccaatttttgtgtttttttgtagagatggggttttgtcatgttgccctggctggtcttgaactctggagcccaagcaatctgcccaccttggcctcctaaattgttgggattataggcatgagccaccgcacccagcctagaattctggatttcaattgttagggtgaaaagaaaaaggcatttgaggtaagcaaggttcaggacaataaatctgggcaatagatcaagaccttgtctcaaaaaaaattttttttttttttttgagatggagtttcactcttgttgcccaggctggagtgcaatggtgcgatctcagctcaccgcaacctttgcctccagggttcaagcaattctcctgcctcagcctcctgagtagctgggattacaggcatgtgccaccatgcccggctaatttttttttttttttttttttttgagacagagtctggctctgtcacccaggctggagtccagtggcacaatctcggctcactgcagcctccgcctcccaggttcaagcgattcttctgcctcagcctcctgagtagctgggactacaggtgtgcgctaccacgcccaactaattttagtatttttagtaaagacggggtttcaccatattggccaggctggtcttgaactcctgacctcgtgatccgcctgtctcggcctcccaaagtgctgggattacaggtgtgagccactgcaccgggactctaattttgtatttttaatagagataggatttctccatgttggtcaggctggtctcgaactcctgacctcaggtgatccacccgcctaggcctcccaaagtgctaggattacagacattagccaccatgcccagaaaaaaaaaattaagtaaaatgggaaaatgtagacacagatagacacccatagatgaaagactgatgtgaacaaagaaacagagggatgtcatgtacatgcaggcaagaataaataaaaagatcaatgaacataacagaaatgtcagaaatagacgtgtgtgtatgggaatttggtatgtgataaaggtagaatttcagaacagtggagaaaagatctacctttggtcaacttgagacaattggttacatcactcataaacaacgacctcggtgcactttcaaaaataaatcttggccaggcaccgtggctcatgcttgtaatcccagcactttgggaggctgaggtgggcagatcacttgaggtcaagagttcgagaccagcagggccaacatggtgaaactccgtctctactaaaaatacaaaagttagcctgtaatcccagctacttgggaggctgaggcaggagaactgcttgaatgtgggtggcggaggttgcagtgagcctagattgctccattgcactccagcctaggcaacaagagcaaaactccatctcaaaaaataataaataaataaataaatcttacatagattaaagccagatgacctgctcattctaggtcattactgtttgggaccgtgtctgtgtccctcactgaactgtaagctctgggaggacaacacggggcttttatcttttacgtagataaaagaaatgatagaatatatcattatagccgtgcactgtaatcccagcactttgggaggtcacaaagtgacctcaggatcagctgaggtcaggagtttgagaccagcctggccaacatggtgaaaccccgtctctactaaaaatacaaaaaaaaaaaaaaaaaaaaaaaattagccgggcatggtggcacatgcctgtaatcccagctactaaggaggcaggagaatcgcttgaacccgggagggggaggtgcagtgaactgagatcgcgccattgcactccagcctgggtaataagagcgaaactccgtctcgaaaaaaaaaaaaaaaagaaaaaaaagaatttatcattatgaccctgggttatggcagggctcttaacacaccaaaagcaaaagtcagaacggaacagattgataaatagttgcgcataaacacaaataacttctgtgccaaaaataactaaagttaaagcccaaagtagaaactaggaggaaatgtttgcaatatgggtaactaaggattagaatcagaatccataaagtacccctagaaattaatagtaataaaaaagccatacaacccattttaaaaatggacaaggaatatgagcaagcaattcacagaagacaaaatttacaagaccaatactttcacaaaaaacattccatttccttagtaatcagagagctgcaagttagaacagtgtgatactatcctttcaggaagtgactaatactaactcatcagccaggcccctgctcagatgtcccttcctccaggaagcccttccggactccggggctgagtcaggcgctccccctgacccccatcccacggctctcccgggatctcccatcccagacctgcccattctgggtcagcactgggaacgtgtctgtgtcccttactgaaccgtaagctccgggaggacaacacggggctgtcgttggtcactgctgtgtcaccagcacggactcgcacaggaccgggaagagaggaagcgcgtggggggaataggtgtggaataaatgaatgaatgaggaaactgaagccaagtcaatgtctgagttggattcaaacttaagtctctccttactgagaggagggaccaagttggatctcctgcgatctgttctccactgagccctgccaggattctgggcacacagaagcgctcagtaagggctttgaaacttaacagtttgggagccagatcctcaggccacatctctctcctcccacgacctccgcggtcctccagaaccatagagagttgtacagagatcgccctgctctatgctctactctcctggggagcggggccagagaggccggaagtgctgcgagccctgggccacgctggccgtgctggcagtgggccgcctcgatccctctgcagtctttcccttgaggctccaagaccagcaggtgaggcctcgcggcgctgaaaccgtgaggcccggaccacaggtgcgggaggcggagactgcgggtggagattggcgccgcggaagccaatcattgccgagtctgagagatggacaaggccaggcgtggggagggcgtccagatgctagcctcgggggccggacgaacggaaggcgggggatggtggggacggagccaatagaatccggtgggggcgaggggcggagcgatgggacttgtggacctgtaaggggcggggcgagccgaaggtggaggtcaaaggggcgtggcgttacagagcctctagcgctgggtgttggggacctgacgctatggagctctcggagttttgtgggggacggctgtgagtggggggttcctgctgcgggatgagaacgtagacgccagtggctcactcgctcctggcaccttccctttcaggctccagatggaccctgggaaggacaaagagggggtgccccagccctcagggccgccagcaaggaagaaatttgtgatacccctcgacgaggatgaggtccctcctggagtggtaggacaaggagatgcggggcccctgggaggctgggggctgttaggacgaagaggataggatggggcctgtgggaccagggtgtgggttagtggatttgggggccacggacgacttggggaaacagtccttggtcctccccaggtcccagtttccccatctgtgaaatggatgggtggttctaagagagggctaaggcagaggccagacactggcattcagcaggtagcccctgatgtgttttacgaggccagcaccctgatttttcaagacatgaatttattgctcgtgtttaagaatcgccaggttttgcaatcttaaaaaaatctacactttagacatattttggtaaatggaaggacctggcaatattgaaatctccttcccaagggaaaacaatcgacgggtgatgagcattggctatgaagaaaaggaaagtgggctaaggatgtagggcatgatgggggagaggaccttcctactctatttatttatttatttatttatttttttgagacagagtctcgctcttttgcccaggctggagtgcactggcaccatctcggctcactgcaacctctgcctcctgggttcaagcgattctcctgcctcagcctcccgagtaactgggattacaggagcgcgcctggctaatttttgtatttttagtagagacgggtttcaccatgttggtcaggctggtctcgaacctcaagtgatccgcccacctcggcctcccaaagtgctgggatgtacaggcatgagccaccatgcctggccccttcctactttagataggaaggtcaagggagggcctctctgaggaggtgacatcttggtagagacgtgaaagaggtgagggagtgagccatggcgacatctgg

SEQ ID NO: 2905 - DNA, 6000 bp, Homo sapiens
tccacagacttgggtttgaatcctggctctactaccccttcgctgtatgaccttgagcatatgacttcatctctcaaagcctcagtttcctcaaatggaaaacttattaggccgggcacgatggctcacgtctgcaatcccagcactttggaaggccaaggagggaggatcacttaaggccaggagttcgagacaagtttgggcaacatagacctcatctctacaaaaaaattaagtaagaaaaaaagaggccaggtgcagtggctcacacctgtaatcccagcctttgggaggccaaggaaggtggatcacctgaggtcaggagttcaagacaagcctcgccaacatggtaaaacctcgtccctactaaaaataccggatgtggtggtgggcacctgtaagaccagctacacgggaggctgaggcaggagaatcacttgaactaaggaggtggaggttgtagtgagctgagattgtgtcactgcactccagacagggcgacagagcaagaccctgtttcaaaaaaaaagaaaagaaaaagaagaaaactgtcaaccataactatacctacatgtaaagcccttggcattgggcctggcatataataaatgcacagtaaggagttataatattgtttcccaaacctcagtcattccccacatgaccttcatctttctacaacctgttctgctatttatctaatatttttcttgaaaattggtttaatatttaataatataataacaaatgtattttaagaagaaaggttaccttgccaccagaaaccagtattgcttgccagaaatagaagacaatagtaaaaataaacacaaaaatattgacgtttaaaatgtttgtgcagccaggcgcagtggctcacgcctgtaatctcagcactttaggaggccaaggcacgtggatcacctgaggtcgggagttggagaccagcctgaccaacatggagaaaccatgtctctactaaaaatacaaaattggccgggcgtggtggtgcatgcctgtaatcccagctacttgggaggctgaggcaggaaaatcgcttgaacccgggaggcggaagttgcagtgagccgagatcacaccactgcactccagcctgagcaacaagagggaaactccatctcaaaaaaaagccgggctcggtggcttacgcctgtaatcccagcactttgggaggccgaggcgggcagatcatgaggtcaggagatcgagaccatcctggctaacacggtgaaaccccgtctctactaaaaatacaaaaaaattagccgggagtggtggcgggcgcctgtagttccagctactagggaggctgaggcaggagaatggcgtgaacctgggaggcagagcttgcagtgagccaagatcgcgccactacactccagcctgggcgacagagcgagactgcgtctcaaaacaaaaaaccaaaaaaaagaaacaaaaaaaaaaaaaactcacttgttcgtcatacacacgtcacatattaggagacagataacggtgttccaaggagtccttacatcctcagaatttgtatacagaggtgcctagcagcaactatctaattaaaacaaagagggtttaggggatatatcttgaatctggatttgccaagcagagggaatactttttttttctttttttcttttctttctttcttttttttttttttgagacagagtctcactatgttgcccaggcttgtctctaactcctgggctcaagctatccgctcatctcggcctcccaaagtgctgggattacagcgcctgtccaaaactttctaaagatactcttagttaaacttcccataagacaaaatgtttattgatctatcacaaaaagtggtggaagagggtctgattgagattttgggtctgggaatgactaaagcctccaagctcaaaacagattgaagactgaaacggcctttattggccaggtgtagtggctcccgcctgtaatctcagcactttgggaagctgaggcagttggattacctgaggtcaggagttcaagaccagtctggtgaacatggtgaaaccccgtctctcctaaaaaaacaaaaaacaaaaattagccaggtgtgggggcaggcgcctgtaattccagccaaaaaaaaaaaaacttttttttttttttttgacagagtcttgctctgtcgcccaggatggagtgcagtggcacaatcttggctcactgcaacctcagcctcctgggttcaagggattctcctgccttagcctcccgagtagctgggatcacaggtgtgagccaccatgcctggctactttttgaattgttagtagagatggggttttaccatgcttgccagatggtctggaacttctaatctcctgtgatccacccaccttggcctcccaaagtgctgggattacatgtgtgagccaccgtgcccagcagaaacagcctttactgagctcctcccagttgcctcagccagtgtcagaattttatatcatgatttctccagtgagatcagttgtactagtctggttatacaaatgagaaaactgaggctgaaagaaggatagtgaggccaggtgctgtggctcacgcgtgaaattccagcactttaggagcccaaggcagaagcatcacttgaggccaggagttcgaggccagtctgggcaacaaagtgaggcccctgtttctacaaaaaaaattaaaattagctgggcgtgatggtatatgcctgtcatcccagggaggctgaggcaagaggatcacttgagcttgggaggtcgaggctgcagtgagccgtttttgcgccactgcattccagcctgggtgacaaagtaagatcctgtctggaagaagaatgaaaaaaagacagtgatgatattcttttattcattccacaaacatttactgaacatctgctatgttctcaagcactttttaggcactagagatacagcaatgatcaaaaataaagtgcatagtttcatggtgctgatattctacagaagcagacagacggtaagcaaatagacacagaaaatggcaggtggtgatcagagtggtggggaaatgtctagcagggtaaggggatagagtgacagagctcgctttttaaaaatttttattttatttattattattattacttttatttggagatggagttttgctcttttcaccaaggctggagtacaatggcaccatctcagctcactgcaacctctgcctccccggttcaagcggttctcctgcctcaaactcccgagtagctgggattacaggcgtgagccactatgcctgactaatttttgtatcattcgtggagacggggtttcaccatgttggccaggctggcctcgaactcctgacctcaggtgatccacccgcctcggcctcccaaagttctgggattacaggccctgagccaccgatcccagccactagctattttatttatttattatttattgagacggagcctcgctctgtcccccaggctggagtgcagtggagcaatctcagctcactgcaagctccgcctcccgggttcactccattctcctgcctcaggctcccgagtagctgggactacaggcgcccgccaccacgcccagctaatgttttgtatttttagtagagacaaggtttcaccgtgttagccaggatggtctccatctcctgatctcgtgatccacccgctttggcatcccaaagtgctggggttacaggcgtgagctaccgcgcccggccgccactcgctattttaaactgggatcagggaaggccccactgagtgctggtcactcagtgagtttttggtattgacatttgatcagatgacagagtgaagggaggcgatgagccatgggaacatgtgaagaggagatccaggctaggggatcggcaagcacaaagtccctgtggtggtagcatgatccatgtgtgcagcaagacatctgtgtgcctaaatccaataatatccaagggaagaggagtatgtgagacagggtcagagggaccaaaggggctggattacagggatttgtaaagcagggtgagtactttgacttttactctgaaatggaagtcatgggagagtttcatgcaggagaatggtattgtcaaagaatcactgacttagaatattgaataatttttcgtgatgagtacacctaaaagcccagatttcaccacgatgcaatcaacatatgcatgtagaaatcggcacctgtacctcctaaatatgtaaaaatttaagaaaaaagaatcaccttttttgtaataaaaattgtaacacaagttcgatttccctaagtggatgggctgttttaaccggaatatggtactatccgtttctgagtctgtctcagtttctccaaccataaaacgcaagtgcagaaattggttatgtctagtgtttaaactcaatcgggacaggatgtctgtcgtcaccagcaccgagacagttcctgggactcagtagacgctcaataaacgtttgaatgaacgcggagctccatcggcctacgcaattccataaaagaacagcaggtgtcgcaccagccctatagccgcctgctcagagcctttggggccagggtgaatcagactctaacaggaacccactcaccactcctccgcagaaagagaattcggaattttccgagaaggcgcttctgaatgccgaatcatgaatctctcctcttaaaaagctgacttttcattttggaaaaagggggtcctgggccctttaacagcttgccaggtgctcaaacgctgcttcccagaatgcgtggcgctatgtaaatgagacggtttggggagcgaggatgattcatactatatgaagtgaaggcaacgttttacaaggacatctctcacgataaatgagtggggagaacttatagcccttgaagtcaaccatctcacacctttccaaaggacgcgaccataactctaaaaggtaagcttttgcgatccttatatagctgcgcgggaataaggttgtcctgcccggatgatcctcagtggtctggggtgcaggcttcaaacctgtagctgtctagcgacagagtggttcaattccacctttcgggcggtagtaactaagcgccttaaatcttacttatcgaaccggacttcttttgcttgttgcccgggaggcgctcctccagcctgcacctggagaggtcgctgcggccttccgcatcgcaaactcattctctgtcactccgatctctgattgtcgttacttatttccccctccggagtataaaaacccactccaaaagacggagaaaaagtcatctacccagttctgggatattggcagtttggaaattatcctagatctctccccttcaattgcttactcattcagtcgtttgctcactcatttatttaatcacgcatgccgtgattaatcagtcaaatacttgcccatttgttcatctgtcattcactcatcaaacaagcatttgctgaggacgcagcggtgggtgacagccctggccttggtctcctggtgcagtcagcccagtgggggagacaaacattaagccatcatgtaattacacacttaattaacaactacaaaggggataacggctgcaaagggaatagaaaagtgaggccctctcataaggagagctgagctggtcgggtgtcatgggaacattagggcagacccttgaaggatgggggtgaatattatgggatatcgagggttcaggctgaccccaataaagatgatgggggtaatgataattgcaccgtcactctgcacttactgctggcatgcacaagccttgcaactcctcttaacagcccccattctacagatgaggaaatggaggctcagggagatgaagtctgttgtccaaggcaacccagccttttttcttttttctctctctttctttctttctttctttcttttttttttttttttttttttaattttactttaaaaactgctccttgtagagcagggttaac

SEQ ID NO: 2906 - DNA, 6000 bp, Homo sapiens
agtcccaggagtgtacccagggccctgtcctcgccccctccatagtcctgtctctcctgctccttggctgtctctgatatttgtagagcacttgggacagtacctgcacatagtaaacctagtgtgtctgttagctcacatactatacatacataaacatatcaacaaaattcttcaaggttctgcttactggttacctcttccaggaagccttccagaaccacccagtaagctttcaggtggagctgaccactccctttgtatcctcctctcatctccccctcaatctcactctcactactatgggccactatctataatttttttttgttttttggtctttgtctaccccattaagttctgaactgttcaagagccgagatcagtctcggattctaaacgtccagtgaagggcatgcacatagtaggtgctcaataagcatttgttacattggaactgggttctgttaataggtttcagattaggcctgagcttctttgagcttcttgcaagctctaacgttctaggtttctgggtgatgtgtgtgtttgatgctgttccactttcagatctccgagtctctgtttctagaataagtagtgagaaagaagttgcaagaatgtatttcacaatacatgtttaaataactaccggtgaaagagctgttaagagtgtgcttactctgtgctggatgcctttctgaataatttacctatgagatagacactattatgtctcccattttccacatgaggaaactgaggccacagaaaggtgaagtcactcactcaacagcatccaccaagcatcagcagcacaatggcccagagtccatgctctcgaatcctgtaacagctatcacttaaccagccaccccatgttccaggcaccagggttatgtgtttttctcatgtatgatctcacagtatcctcacaatggccccatgaggcgggtatcgtgataaccccatttcaaaggatgagaaaactgaggcttggagatgtgaagtccattgcccaaagtcacccatccaggaagtcgtggagcatgtctcaggcagcctaaaggcagagcctgtgttcttaagcactctgttcttgtctacagctccccaaccaagggtctcaaactcacacacctactgggaccaggcaggcaaaacaagcaaaagacagtgctagggatgaggcagcagagagtggcagggtttggggcaaacctgggcagcaaagccccatccaagaggggtggccgtctgccaatggaaacatgggctcacctcttccggtgttccagtggaagctggaaacctaactgtgtggggaacaacccctgtttaaaactggggtcagaccaggcaccgtggctcacacctgtaatcccagcactttgggaggccaaggcaggcagatcacctgaggtcgggagttcaagaccagcctggccaacatggtgaaaccctaaaaatacaaaaattagctgggcatggtggcgcatgcctgtaatcccagctactggggaggctaaggcaggagaattgcttgagcccaggaggctgaggttgcagtgagtggagattgtgccactgcactccagtgtggatggcagagcaagactccgtctcaaataaaataaaataaaataaagtaaaataaaattggggtcaatttggctgggtgtggtggctcatgcctgtaatcccagcattctgggaggccgaggtgggcagatcacctcagcctccttgaggtcaggagttcgagaccagcctggccaacatggtgacaccccatctctactacaaatacaaaaattaggtgggcatagtggcacacacctgtagtcccagctacttgggaggctgaggtgggggaatctcttgaacccaggagttggaggttgcagggagccaagatcgcactactgctctccagcctgggcaacagagtaagaccctgtctcaaaaaaataaagactaaataaaatacaattggggtccattaaaatacccctggccacctgggtgtgattctggctctcctggatttctcacctgcccctctttgcacagttgtagggaactacctgtgagcttgttcttttaacgtcaatctttctgtccagtcagaaagtaccagaagggcagggatttttgtctcttgcccaactccatcgctccaactagaatatccccagcccacagcatgggacctggccccttattcactgaatagatggatccttttctttatcctgcggcttctctgcagttcagtctcccagtctctgtctcccagtctttgtcacgtgtacaaaacctggctcttctgtttccctggctgtctctggtgtctctgcctccatgtctccatgtttctggaattttccgtgactattttctcctcttggggtgtgtgtgttttacgctctgcctctcgaagtctctattacattctgtaagtcaggccgggcacagtggctcgcggctgtaatcccagcactttgggaggcaagacgggcagatcacctgaggtcatgagtttgagaccagcctggccaacatggtgaaaccccatctctacaaaaatccaaaaattggccaggcgtggtggcgcgtgcctgtaatcccagctactcaggaggttgaggcaggagaaacaacgcttgaactcgggaggtggaggttgcagtgagccgagattgtgccattgcactccagcctgagtgacagagcaagactctgtctcaaaaaaacaacacaaagcaaaacaaaacaaaaacaaaaacaaaaaaccacacaaaaattagccgggcatgatggcaggtgcctgtagtcctagctactcgggaggctgaggcgggagaatcacttgaacctaggaggtggaggctgcagatggcaccactgcactcaagcctgggcgacagagcgagactccatctcgaaaaaaaaaaaaaagtctgtaagtcgggcccacaccatctcttgctccgtgagtatctttgtctctctagctcctcttcttctctcagtacatgtccctccttgactcccgcctctctgcaaggtgtatttggctgcctcagttggcctctccccctctgcatctctgggtggggtgttctctgcccgtctcccacccacacccacccccggtgctccccttccccccagcaggacagcggctcaggttcacgcaccccacggcgggccggctgggcgcacgcacgtccttgcacacaagccgcacgtagctgtacttgagcacgtcgatgagcgtgtagagcgggggcgcactggcccagcggcagcgcgccaggtgcatggagctcttgacgaagaagagcgccagccgctgctggcaccacgcgtcgaagaagcggctgaactcggcccacgagaagaaggcccgctcccgcagctcctgctcctcctgccccgcagccgtgccgggtgggggctccggccgctccatcctgggggcctgcgtggaggaggggagaacaggtggatatcagacccattcccacccggggtatctcatctactccattcttggcctgccccgtcggttgctggtgcctctatcgaggtgggtagcccggggtcggacgtgcctgtttttctccaaatatataaatatcaacctccatcctatctttggcctcctcccaccgccttatccctggttcacttggagcctgtcatcttgattcctaattccaactcgtctcctcctccgcagatgtgacccttaggtacagttggaatctctcctcccaaaatacgacccttaagctcagatgtcccttaaggacatctcctcaaatgtgttctcaaattccagctaaaacctcctccccttccagctgtgtctctcacccaagagtaacttctaactctcgtattcatctggaactcctccttccatgtgccaacagttggctgtaacccctccaaagacgctccatctccagatgtgctcccacatccaggccacggacccctcacccggtcacatgcttcatgcacctgtggctccgcactccccagatgtgcctctggcgtgcagctgttgccccttcccccgattatgaccctatggctcgccacatgcagctgtagctggggcttccctgagacactctcatctccagatgtactccccacatgcagttatccacgcttcgcctacaggtgtgtgccccacttgtggctagttctcctcggaagtgtcaccagtattcacctgtggtcccctcctcctcagatgcggcccccagtccagctgtgggcccctcctcccagttacatccaccatcccccgcaatatgcatcttcgttctagacatggcccctcgtcctcggatgggctccttcaccccagatgctccccccacgtccagctgcgcgtctcccctcgagcagccccatccagcccgctcccgaccctcctactccccccctccccgcccgctgcggcaccttccagccccgccgtcccacctagctgtgcctctcccctccccaagatgtgcacccttcccgcccctccccactcacctacccgccccggagcggcgtccacctcccacaatgccccgcgcccaggcctggcccggcccttgctcccgggatgccccgcgcggtctcccgcctctcttcccgccgtgcctcgcgggggcgcttccaccgattcctcctctttccctgccagtcactcctcagaccctcagccacacccgctcatccagggcgagggaaagcgcgggcattttcccagtgtgctctgcgggagggctcgccccacttcaccccttttcccgccctcctcccattcgggagactacgactcccagtgtcctccgcgcgacggcggcggtgcggacggtgcccaggtcccgcccctaggctctgccccgcccccgcccgcagacgtctgcgcgcgaatgccgtggcgcgaacttgggactgcagaggcgcgcctggcggatctgagtgtgttgcccgggcagcggcgcgcgggaccaacgcaaggcaagtggggccgtccgcaagcagatgggaggcggagggcggcgggtgcgccgaatgcttggggcctatgcttcgccatgtcggggtgtctgcagaggagtgggcgtggggacgctgaggctgccgagagcgcggtggagacggaagagcgcgggctgcgggccgccggagagtgcagagaggtgtctcccagagggaggggggccaggtagagggtagacgagagacagagacagttggacaggtcctctgagaagaggccttgaggtgcgagttcacctggaaaggggagaggccaaatggaactgaggggcggggccgggggggggaaaactgtgtgggcggggccagctggaaatcggaaggccccccgagggggcggggctatctgggagggggaggggctgaagggagctaaggggcggggccggggaaaagattgcgtgtgggcggggccacctggaagggggaggtgccaagggtggggctggctgggaaccggaagtgctgagggggcgggggccacctggaagtgctgagggggcggggctagaagaaggtaaatcgcgggcagcagcatcacctggaaggagtgggccctactggagggagatgggtggtgtcagggagaggtcagtggtaaggtccaggtctaggtaaagggctcgtaaaagatggagaatcatctgaatggggagacgtctggcctaatgtatgcttgataaagggatggagcttacctcttgtttttactttttattttgaaataattatagattcaaggaagttgtgaaaagagtatatccatcttcccctaatggtgacatcttatgtagtcccaatatcgaaaccaggaaattgacatcaatacagttctgttaactagattacagaccttgttcagttttcaccagtttgtgtggtgtgagtgtgattgtgcatctgtgtgcccgtgcagct

SEQ ID NO: 2907 - DNA, 6000 bp, Homo sapiens
aaactcctgtttttatgaaccaaaataatttgctggtgagatttactggtgcagaataaaagctccaaatcagagaaaaagataagaggcctcctttaccataagaagactgtttttcatctaatatgaggaatagactgaggacctgaaatgggtttttttggagttaagtttaaaggttagtgaaaaattgttttaaggtgatgacataattccgtgaaacaactgtggaagcttataaaattgtacccgctggtctacataaattagctcttgggcagtttctaaggtatgctgttatttcaaacaaagggcagaatatcacagagtgtgtgctactgaactgtgtaaaagagaaaggctataggtcaggcacagtagctcacgcctgtcatcccagcactttgggaggccgaggtgggtggatcacttgaggtcaggagttcaagaccagcctggctaacatggcaaaaccctgtctctactaaaaatacaaaaattagccaggtgcggtggcacgcgcctgtattcccagctactctggaggctgaggcaggagaatcgcttgaacccgggaggtagaggctgcagtgacccgagattgtgctactgcactccagcctggacaagagtgaaactccatctcaaaaaacaaaaacaaaagaaagactataaatgtatccacatatcttgtatatgtacagaacatctcagttggaagacaaaaaactggtaatgctgtcgcctcaggagggacagacgctggagggagattttttaatatgcatgcttttgcaggcagaacaattggaatacgttaccccttcacaatatatttttaaaaattaaatacttttttaaaaagtctgttatttaatgaaatcaataacagtcactggggcttccacagtttagagtaactctaatgaaagggttcctaggccgggcgtggtggctgctgcccataatcccagcattttgggaggccgaagcgggtggatcgcctgaggtcaggagttcgagaccagcctggccagcatggtgaaacctcatctctactaaaaatacaaaaattagccaggtatggtggtgcacacctgtaatcccagctagtggggaggctgaggcaggagaatcacttgaacccaggaagtggaggttgcagtgagatcatgcactctagcctgggcaacagagtaacactctgtctcaaaaaaaaaaaaaaagaaagaaaaagaaagaaaaagaaaaagaaaagaaagggttcttaatctggggtccacaaaacccaggagtccaagagcagaactcaagtggtctatgaaatttgacaggaaagaaattacgactttattcttgtaaacttctaattggaactgagcctttccttccattataaatattaaagatataaaaaattataaattttctatatctttaatatttataatggaagaaaataaattacacattataattatgtaattataattatttacattatatttccttccactatgaatatattttttaaaaaaggactagcaggacctctgcgtggattgcttgagttgagaccagctcagaccagcctgggcaacagaaatggttttctttgactttcccttcctttgcacagaaatcttcttcaacccatggggtcccctttcgttttctggaatcagtactctctgtcccgcaccacacgcctctaagtctccactactctctacagccttggccgccacatgttggcaccacaactcaaactcaattttggaatcaaaaaactcagtaggccggcactgtggctcacgcctgtactcccagcactttggaaggctgagacaggcggatcacgaggtcaggagttcaagaccagcctggcccgcatggtgaaaccccatctctactaaaaatgcaaaaaattagccaggcatggtggtgccagcctgtaatcccaactactcaggaggctgaggcaggagaatcacttgatcccaggaggcagaggttgcagtgagctgagactgcaccactggactccagcctgggcgacagagcgagaccccgtcttaaaaaaaaaaaaaaaaaaaaaaaaacaaacaaaaaagaaactcagcaatttccaaacagagtttctcagggccagttggggagcaggaagtaagcaatgcttcaaccaaacagttcacacagaaagcaggttagggacttagccaccaaaatcctgagggcaaaggagaaaactattacgatccctcctgagtgctcaactgcctaggtacttgacattctcaattatactgactctccacaacaactctgttacagaaactaaggcacagaggggttttcaaaggaacttaacctgcatctatagtacgttccaccccaggtcggcctgctccacagctcacctcttaaccaccagactgagttgcaagggaaggagaaatacataagcgtttactgggaagcctactctatgcctgacaggctgatcacattctcaaataccctcaatcctcaagtcagccctccaagacaggtgagatcatccccactttatagatgaaggtaatgaggacagaggaacatagctggggttcaggcaaggcttcaaaacccggtgtggctggctccaaagcccacgttcctttctccttaccacggtactcaaggctggcttctcaactctgtgtactgctgagttggggggaacaaactggttgatgcctctggaggaccacctggcgtctctatcggaacggcaaccccacttctgtgtatttggcccacagagaccctcacaggtggaccaagtgaggcacaaagttacctgctgcagcactaactgtaatgagagaagactggaaactggtggaatgtctacccttagggaactggttccctcattactggaataccatatggtagaatattgttcagggttaaaattaaatgaatgatggataaaaggtataggagttttttggggggatgataaaaatatcctaaaatcgattatggtaataactgcacaactcagcgcatacactgaaaaccactgacttgtacactttaaatgggcactttaaatacactgaaatacactttaaatacactgaaaaccgctgacttgtacattttaaatgggcaaaattgtacactttaaatgggcaaactgtataattgtgaattatatctcaataaagcggttaccaaaatgaagagataatgacaggaaaaatatcaagtaaggatgaaacagtactcagtaataaaaagaaacgaagcactgatacaagcaacaacttgggtggacctccagggcattgtgcagagtagaaaaaaggtaacatcctaataatatatgattccatttacataacaatctccgaatgacaaaactagagatggtgaacacattagcggttgccaggggcctggggaggagttcttatgtggagagggaactgttctatatcacaattacgatgggggttacacaaatctatacaaggaatcaagctgcacgggcacacagatgcacaatcacactcacaccacacaaactggtgaaaactgaacaaggtctgtaatctagttaacagaactgtattgatgtcaatttcctggtttcgatattgggactacataagatgtcaccattaggggaagatggatatactcttttcacaacttccttgaatctataattatttcaaaataaaaagtaaaaacaagaggtaagctccatccctttatcaagcatacattaggccagacgtctccccattcagatgattctccatcttttacgagccctttacctagacctggaccttaccactgacctctccctgacaccacccatctccctccagtagggcccactccttccaggtgatgctgctgcccgcgatttaccttcttctagccccgccccctcagcacttccaggtggcccccgccccctcagcacttccggttcccagccagccccacccttggcacctcccccttccaggtggccccgcccacacgcaatcttttccccggccccgccccttagctcccttcagcccctccccctcccagatagccccgccccctcggggggccttccgatttccagctggccccgcccacacagttttcccccccccggccccgcccctcagttccatttggcctctcccctttccaggtgaactcgcacctcaaggcctcttctcagaggacctgtccaactgtctctgtctctcgtctaccctctacctggcccccctccctctgggagacacctctctgcactctccggcggcccgcagcccgcgctcttccgtctccaccgcgctctcggcagcctcagcgtccccacgcccactcctctgcagacaccccgacatggcgaagcataggccccaagcattcggcgcacccgccgccctccgcctcccatctgcttgcggacggccccacttgccttgcgttggtcccgcgcgccgctgcccgggcaacacactcagatccgccaggcgcgcctctgcagtcccaagttcgcgccacggcattcgcgcgcagacgtctgcgggcgggggcggggcagagcctaggggcgggacctgggcaccgtccgcaccgccgccgtcgcgcggaggacactgggagtcgtagtctcccgaatgggaggagggcgggaaaaggggtgaagtggggcgagccctcccgcagagcacactgggaaaatgcccgcgctttccctcgccctggatgagcgggtgtggctgagggtctgaggagtgactggcagggaaagaggaggaatcggtggaagcgcccccgcgaggcacggcgggaagagaggcgggagaccgcgcggggcatcccgggagcaagggccgggccaggcctgggcgcggggcattgtgggaggtggacgccgctccggggcgggtaggtgagtggggaggggcgggaagggtgcacatcttggggaggggagaggcacagctaggtgggacggcggggctggaaggtgccgcagcgggcggggagggggggagtaggagggtcgggagcgggctggatggggctgctcgaggggagacgcgcagctggacgtggggggagcatctggggtgaaggagcccatccgaggacgaggggccatgtctagaacgaagatgcatattgcgggggatggtggatgtaactgggaggaggggcccacagctggactgggggccgcatctgaggaggaggggaccacaggtgaatactggtgacacttccgaggagaactagccacaagtggggcacacacctgtaggcgaagcgtggataactgcatgtggggagtacatctggagatgagagtgtctcagggaagccccagctacagctgcatgtggcgagccatagggtcataatcgggggaaggggcaacagctgcacgccagaggcacatctggggagtgcggagccacaggtgcatgaagcatgtgaccgggtgaggggtccgtggcctggatgtgggagcacatctggagatggagcgtctttggaggggttacagccaactgttggcacatggaaggaggagttccagatgaatacgagagttagaagttactcttgggtgagagacacagctggaaggggaggaggttttagctggaatttgagaacacatttgaggagatgtccttaagggacatctgagcttaagggtcgtattttgggaggagagattccaactgtacctaagggtcacatctgcggaggaggagacgagttggaattaggaatcaagatgacaggctccaagtgaaccagggataaggcggtgggaggaggccaaagataggatggaggttgatatttatatatttggagaaaaacaggcacgtccgaccccgggctacccacctcgatagaggcaccagcaaccgacggggcaggccaagaatggagtagatgagataccccggg

SEQ ID NO: 2908 - DNA, 6000 bp, Homo sapiens
ctaaggatctttgtccttaacaaccagagtccttggggaaacagaaggatgggcggcccagagccccaccttcctccccatccccgccaggaagctcaaaccttggggctcaggctgctgagcgaggagatggtggaggcgctgctggccaggctcaggctgctgcgaggtcggctcccctccatcaagggctgggggagagaaagaaaggggctgtgtctctgcagtgacgggtgtgagacagagatggggtcaggggcttggaggtcggaggaggctgcagagaaagagcctgttgtttcgggacttggggggctgggggaggccatggcccgtgaccacataccaagagtggtgccaagagaggtaggcggccctggcagctgcgggagggggcagctgtctgcagcccaggccagagaataggggcttctttattcctgcccactgcactcaggccaggaatttgaccctctctgtgcttagggactccccattccctgcctccttccggctgccccaggctacctgtctcccgccctcccacatgcacccccaaaccacccctgccaactccccaagccaagccctgcggcaccaggaatgtgaacccagagagcccctcccagcccagccagggaacttacccagctctggggtcccagtgacgggggggcaagaggacggtgtgggtgctgcggcacctaggcagtctcccgcctcctttgtctcttagctgctgtctctcatagttctcaatctctctcctcacctgctcactcacactttttgtctctttgtctcctgtctcttacggtctctctctctctctcttccttttacactacctctctccccactctcactttctgtgtctccctctgatctctgtctcttccagtctctctctcactcattctctccctctctctctctctccaatctttctgtttctgtccaaatcttttattgtcagactcacagggtctcttccttaagtctctgtctcattctctctctctctctctctctgtctctcagtcatcccctgtgtcctctctccttcacactcagtctcttcctctttctctctggctctgccgtttcctcccttttctctttccgatttcccttctcactttctcccttcctccctctcccagtttctctttcctctctgctggtctttccctgcctctgccagccgcccacgctgctgttctcccctcccaatcccggctgtccccgccccttctggcctccccactacagcctgacctctggctcagctgcccccatagctgaagggaggggcttgggccccccaattcccaggtcccctaaggaccaaggttgggacttctcagtgtttggagagttggacttgaggcctgcactccagggcccccgtgggtttgctgctgtggttgggggcctgagccactggtgtcctaaacggaggaggcttgtgtcctgcaaggggtggggactcaaatttccaaagccctggagggaatgggttagggatccagactcctgggtgcccgagaaggtctgagctaggatcaggactcctgagtcgtgaaagagctgggggtctggaaacatggctgtgcttggaaggggccagggacggtttgtccaggtcccctagggagaaaaggggatggtcccagtagggcagggtgaaatggagagttccaaacctccacctcagatccaggtgagaattctcttctagactgaggacaactccctcaggagagagacatgattccttggtatattttgaggaacaagattatgcatccgtaggcaggggaggagagcggggggctggaactgtcacccagggcctggaacttgtagcagaagcgcccccacccgcacaaagagtgccacccaggcagaatcgcggcttgtgggggcagagctactgcctaagtctgaagcagatgacacccaggagtggagccttgtgcctgtgaccgggaaggaatctgagctttcggtttaactgccattcaccatgcacctgttgagcacctactgtgtgcaggcactgtctgttgcagccactgagaagaaagcagtgagccctggctgggtgcaatggctcacgcctgtaatcccagcactttgggaggccaaggcaggaggatcgcttgagaccaggagttcaacaccagcctgggcatcatagcgagaccttgtctctatttagaaaatgaatttcttttttttttttttttgaggcggtgttttgctctgtcgccaggctggagtgcagtggcgtgatctcggctcactgcaacctccgcctcccgggttcaagcgattctcctgactcagcctcctgagtagctggaactacaggcacatgccactgcacccggcctaaattaattattattattatttttttgagacggagtctcgctctgtcgcccaggctggagtacagtggcacgatctcagctcactgcaagctctgcctcccaggttcacgccattctcctgcctcagcctcccgagtagctgggactacaggtgcccaccaccacgcccggctaatttattttgtatttttagtggaggcggggtttcaccgtgttagccaggatggtcttgatctcctgacctcatgatccacctgcctcagcgtcccaaagtgctaggattacaggcgtgagccaccgcgctcagcctaattacttttttttgaaaagcattgagcccagcaaagtgcctgatctcatagtgcttacatcctcattctcatttgcaaggaatctggaccctgctgtgactatcttggtcaagtggcttcatttccaagcctgtttccccatctgtgaaatgggaacaatgacaccctcgcactcggggaggaaaccaaccacatgtgaaaataggagactctagccaggcgtggtggcaagctcctgtactcccaactactcaggaggctgaggcaggagaattgcttgaacccgggaggcggaggttgcagtgagccaagatcatgccattgcactccagcctgggtgacagagtgagacaccgtctcaaaaaaaaaaaaaaaaaaagaaagaaaaagaaaaaagaaagaaaagaaaaaaaaaagaaaatgggagactctaggctggggcctgtgggctaaattggggtaggaggccaggcacagtggatcacaactgtaattccagcactttgggaagccaaggcgggcagatcacctgaggtcaggagttcaagaccagcctggtcggccgggtgcggtggctcacacctgtaatcccagcactttgggaggccgaggcgggtggatcacaaggtcaggagatcgagaccatcctggttaacacggtgaaaaaccccgtctctactaagaatacaaaaaaaattagccgggcgtggtggtgggcacctgtagtcccagctactagggaggctgaggcaggagaatggcgagaaccagggaggaggagcttgcagtgagccaagatcgtgccactgcactccagcctgggcgacagagcaagactccgtctcaaaaaaaaaaaaaaaaaaaaagacctgcctggtcaacatggcgaaacactgtctctactaaaaatacaaaaattacccaggcattgtggcacatgcctgtaatcccagctactccagaggctcaggcaggagaatcgctggaacccaggaggtggaggttgcagtgaaccgagatggcgccactgaactccagcctgggcgacagagtgagacgcctactcaaaaaataaataggctgggtgcagtagctcacgcctataatcctaacactttgggaagccgaggcaggcagactgcctgagctcaggagttcgagaacagcctgggcaacatggcgaaacactgtctctactaaaaatacaaaaaattagctgagtgtggtagtgcgtgcctgtaatcccagctactcggaggctgaagagggagaatcgcttgaacccggaagatggaggttgcagtgagccgagatcacgccattgcactccagcctcggtgacagagcgagactccatctcaaaaaaaaataaaaaaataaaaaataacaaataaataaataggcctggagtggtggctcacgcctgcaatcccagcactttgggaggccaaggcaggcagaacacctgaggtcaggagttcgagaccagcctagcaaacatggtgaaatcccgtctcagaaaaataaataatgaataaataaataaataaataggccgggcgcggtgactcacgcctgtaatcccagcactttgggaggccaaggcgggaggatcccctgacgtcgggagttccagaccagcctgaccaacatggagaaactacgtctctactaaacaaatacaaaattagccgggcgtggcggcacatgcctgcaatcccagcactttgggaggccaaggcgggaggatcccctgacgtcgggagttccagaccagcctgaccaacatggagaaactacgtctctactaaacaaatacaaaattagccgggcgtggcggcacatgcctgcaatcccagatactcgggatgctgaggcaggagaatcgcttgaaccccgaaggcggaggttgcggtgagccgagatcgcccctttgcattccagcctgagcaacaagagcaaaactccgcctcaaaataactaactaaataaataaataaattggggtgggaaggcattgaccctgagctgagagagaactggctcgctgttgaagcagggccacgcatttgattgacagttcgtttgttggaggggcgtggtcacgctcggaaactccgccgtgacgttgcaaaagctggaatctccgcgagaagtcctgtcttacttccacttcccacccttcgggttgcggtctcgaaaccccgcctctcttcgtgacgtcagcacgccgggcgcggtaggctataaaagcctagtggccattgtgttcgttgctcttatcggttcccatcccagttgttgatcttatgcaagacgctgcacgaccccgcgcccgcttgtcgccacggcacttgaggcagccggagatactctgagttactcggagcccgacgcctgagggtgagatgaacgcgctggcctccctaaccgtccggacctgtgatcgcttctggcagaccgaaccggcgctcctgcccccggggtgacgcgcagctcccagccggtgagtaaggggtcggaacgcctgggtccccacggggctgggggcccggatttagaaaggagaaggggttgggagcctggagtcctgagcctgagggaggagggatctggaagccagattcttgggtcccccgtgaaggaatcatctgccaagtagggggtcgggtcagaatgtttcagtctgcgagggaggagggtgtgagggtttgatttgtcaatcttcagcagaatgagagagctagggactatgactttgtcgccaagggaagcaagtaaagacttttgttcttggttcttgggactgggagttctgcgtctgaagaaagagagggctgggggcttggacccttggatctaaggcagaactaggggctcagactcctggctattgagagataagaacagagccaagggacagagatgggcgtggccgagatcagaaaggaatttgggactctcgcgttgctatttacaatagttgtgttactatttccgttgctatgactcatagtcacgcccggatgccatcctctaaatggcccctaaactttatttttttctcccccttttccagcccagacacatggccccaggccaagcaccccatcaggctaccccgtggagggatgcccaccctttcttcctcctgtccccagtgatgggcctcctcagccgcgcctggagccgcctgaggggcctgggacctctagagccctggctggtggaagcagtaaaaggagcagctctggtagaagctggcctggagggagaagctaggactcctc

SEQ ID NO: 2909 - DNA, 6000 bp, Homo sapiens
gagttggacttgaggcctgcactccagggcccccgtgggtttgctgctgtggttgggggcctgagccactggtgtcctaaacggaggaggcttgtgtcctgcaaggggtggggactcaaatttccaaagccctggagggaatgggttagggatccagactcctgggtgcccgagaaggtctgagctaggatcaggactcctgagtcgtgaaagagctgggggtctggaaacatggctgtgcttggaaggggccagggacggtttgtccaggtcccctagggagaaaaggggatggtcccagtagggcagggtgaaatggagagttccaaacctccacctcagatccaggtgagaattctcttctagactgaggacaactccctcaggagagagacatgattccttggtatattttgaggaacaagattatgcatccgtaggcaggggaggagagcggggggctggaactgtcacccagggcctggaacttgtagcagaagcgcccccacccgcacaaagagtgccacccaggcagaatcgcggcttgtgggggcagagctactgcctaagtctgaagcagatgacacccaggagtggagccttgtgcctgtgaccgggaaggaatctgagctttcggtttaactgccattcaccatgcacctgttgagcacctactgtgtgcaggcactgtctgttgcagccactgagaagaaagcagtgagccctggctgggtgcaatggctcacgcctgtaatcccagcactttgggaggccaaggcaggaggatcgcttgagaccaggagttcaacaccagcctgggcatcatagcgagaccttgtctctatttagaaaatgaatttcttttttttttttttttgaggcggtgttttgctctgtcgccaggctggagtgcagtggcgtgatctcggctcactgcaacctccgcctcccgggttcaagcgattctcctgactcagcctcctgagtagctggaactacaggcacatgccactgcacccggcctaaattaattattattattatttttttgagacggagtctcgctctgtcgcccaggctggagtacagtggcacgatctcagctcactgcaagctctgcctcccaggttcacgccattctcctgcctcagcctcccgagtagctgggactacaggtgcccaccaccacgcccggctaatttattttgtatttttagtggaggcggggtttcaccgtgttagccaggatggtcttgatctcctgacctcatgatccacctgcctcagcgtcccaaagtgctaggattacaggcgtgagccaccgcgctcagcctaattacttttttttgaaaagcattgagcccagcaaagtgcctgatctcatagtgcttacatcctcattctcatttgcaaggaatctggaccctgctgtgactatcttggtcaagtggcttcatttccaagcctgtttccccatctgtgaaatgggaacaatgacaccctcgcactcggggaggaaaccaaccacatgtgaaaataggagactctagccaggcgtggtggcaagctcctgtactcccaactactcaggaggctgaggcaggagaattgcttgaacccgggaggcggaggttgcagtgagccaagatcatgccattgcactccagcctgggtgacagagtgagacaccgtctcaaaaaaaaaaaaaaaaaaagaaagaaaaagaaaaaagaaagaaaagaaaaaaaaaagaaaatgggagactctaggctggggcctgtgggctaaattggggtaggaggccaggcacagtggatcacaactgtaattccagcactttgggaagccaaggcgggcagatcacctgaggtcaggagttcaagaccagcctggtcggccgggtgcggtggctcacacctgtaatcccagcactttgggaggccgaggcgggtggatcacaaggtcaggagatcgagaccatcctggttaacacggtgaaaaaccccgtctctactaagaatacaaaaaaaattagccgggcgtggtggtgggcacctgtagtcccagctactagggaggctgaggcaggagaatggcgagaaccagggaggaggagcttgcagtgagccaagatcgtgccactgcactccagcctgggcgacagagcaagactccgtctcaaaaaaaaaaaaaaaaaaaaagacctgcctggtcaacatggcgaaacactgtctctactaaaaatacaaaaattacccaggcattgtggcacatgcctgtaatcccagctactccagaggctcaggcaggagaatcgctggaacccaggaggtggaggttgcagtgaaccgagatggcgccactgaactccagcctgggcgacagagtgagacgcctactcaaaaaataaataggctgggtgcagtagctcacgcctataatcctaacactttgggaagccgaggcaggcagactgcctgagctcaggagttcgagaacagcctgggcaacatggcgaaacactgtctctactaaaaatacaaaaaattagctgagtgtggtagtgcgtgcctgtaatcccagctactcggaggctgaagagggagaatcgcttgaacccggaagatggaggttgcagtgagccgagatcacgccattgcactccagcctcggtgacagagcgagactccatctcaaaaaaaaataaaaaaataaaaaataacaaataaataaataggcctggagtggtggctcacgcctgcaatcccagcactttgggaggccaaggcaggcagaacacctgaggtcaggagttcgagaccagcctagcaaacatggtgaaatcccgtctcagaaaaataaataatgaataaataaataaataaataggccgggcgcggtgactcacgcctgtaatcccagcactttgggaggccaaggcgggaggatcccctgacgtcgggagttccagaccagcctgaccaacatggagaaactacgtctctactaaacaaatacaaaattagccgggcgtggcggcacatgcctgcaatcccagcactttgggaggccaaggcgggaggatcccctgacgtcgggagttccagaccagcctgaccaacatggagaaactacgtctctactaaacaaatacaaaattagccgggcgtggcggcacatgcctgcaatcccagatactcgggatgctgaggcaggagaatcgcttgaaccccgaaggcggaggttgcggtgagccgagatcgcccctttgcattccagcctgagcaacaagagcaaaactccgcctcaaaataactaactaaataaataaataaattggggtgggaaggcattgaccctgagctgagagagaactggctcgctgttgaagcagggccacgcatttgattgacagttcgtttgttggaggggcgtggtcacgctcggaaactccgccgtgacgttgcaaaagctggaatctccgcgagaagtcctgtcttacttccacttcccacccttcgggttgcggtctcgaaaccccgcctctcttcgtgacgtcagcacgccgggcgcggtaggctataaaagcctagtggccattgtgttcgttgctcttatcggttcccatcccagttgttgatcttatgcaagacgctgcacgaccccgcgcccgcttgtcgccacggcacttgaggcagccggagatactctgagttactcggagcccgacgcctgagggtgagatgaacgcgctggcctccctaaccgtccggacctgtgatcgcttctggcagaccgaaccggcgctcctgcccccggggtgacgcgcagctcccagccggtgagtaaggggtcggaacgcctgggtccccacggggctgggggcccggatttagaaaggagaaggggttgggagcctggagtcctgagcctgagggaggagggatctggaagccagattcttgggtcccccgtgaaggaatcatctgccaagtagggggtcgggtcagaatgtttcagtctgcgagggaggagggtgtgagggtttgatttgtcaatcttcagcagaatgagagagctagggactatgactttgtcgccaagggaagcaagtaaagacttttgttcttggttcttgggactgggagttctgcgtctgaagaaagagagggctgggggcttggacccttggatctaaggcagaactaggggctcagactcctggctattgagagataagaacagagccaagggacagagatgggcgtggccgagatcagaaaggaatttgggactctcgcgttgctatttacaatagttgtgttactatttccgttgctatgactcatagtcacgcccggatgccatcctctaaatggcccctaaactttatttttttctcccccttttccagcccagacacatggccccaggccaagcaccccatcaggctaccccgtggagggatgcccaccctttcttcctcctgtccccagtgatgggcctcctcagccgcgcctggagccgcctgaggggcctgggacctctagagccctggctggtggaagcagtaaaaggagcagctctggtagaagctggcctggagggagaagctaggactcctctggcaatcccccataccccttggggcagacgccctgaagaggaggctgaagacagtggaggccctggagaggacagagaaacactggggctgaaaaccagcagttcccttcctgaagcctggggacttttggatgatgatgatggcatgtatggtgagcgagaggcaaccagtgtccctagagggcagggaagtcaatttgcagatggccagcgtgctcccctgtctcccagccttctgataaggacactgcaaggttctgataagaacccaggggaggagaaagccgaggaagagggagttgctgaagaggagggagttaacaagttctcttatccaccatcacaccgggagtgttgtccagccgtggaggaggaggacgatgaagaagctgtaaagaaagaagctcacagaacctctacttctgccttgtctccaggatccaagcccagcacttgggtgtcttgcccaggggaggaagagaatcaagccacggaggataaaagaacagaaagaagtaaaggagccaggaagacctccgtgtccccccgatcttcaggctccgaccccaggtcctgggagtatcgttcaggagaggcgtccgaggagaaggaggaaaaggcacacaaagaaactgggaaaggagaagctgccccagggccgcaatcctcagccccagcccagaggccccagctcaagtcctggtggtgccaacccagtgatgaagaggagggtgaggtcaaggctttgggggcagctgagaaggatggagaagctgagtgtcctccctgcatccccccaccaagtgccttcctgaaggcctgggtgtattggccaggagaggacacagaggaagaggaagatgaggaagaagatgaggacagtgactctggatcagatgaggaagagggagaagctgaggcttcctcttccactcctgctacaggtgtcttcttgaagtcctgggtctatcagccaggagaggacacagaggaggaggaagatgaggacagtgatacaggatcagccgaggatgaaagagaagctgagacttctgcttccacaccccctgcaagtgctttcttgaaggcctgggtgtatcggccaggagaggacacggaggaggaggaagatgaggatgtggatagtgaggataaggaagatgattcagaagcagccttgggagaagctgagtcagacccacatccctcccacccggaccagagggcccacttcaggggctggggatatcgacctggaaaagagacagaggaagaggaagctgctgaggactggggagaagctgagccctgccccttccgagtggccatctatgtacctggagagaagccaccgcctccctgggctcctcctag

SEQ ID NO: 2910 - DNA, 6000 bp, Homo sapiens
gcacatgctggcccctgagtccagactgctctccctgccctctcactgaattagatcaagtgctgccccctaggggaggccctttctgtccaacagccctgccaggctagttctaggacctctagacattcagacagatgaaaggcctccctgggagcccgatctccctgtgtgatctcacattcccgagggagatggatggatcaatattctctgctccagtggacatgagtcccatgaagggcacggcctgttctctcttgttcacctcgggactcaatgtctgtggtttgctaagtgatactctaaagtgctgagctcattcaacaagaatataccgaggcttcccatgttgacagttctccacagagaggagccagctaccaccccttctcacatgggggagggaggtgagtaaacaccacccgggacaattcaggacccccccagaggtccacacaaaacatggacacgagtgttcacggcagcactattcacaacagccaaaagatagaaacaacccacatgtccatcagctgatgaatggcaaaataaaacagggtctatttgtgcaaaggaatattattcagtcataaaaaggaatggagttcttttttcttttcttttttttttttttttgagacatagtctcactctgtcacctaggctggagtgcaatggcgcaatcttggctcactacaacctctgcttcctgggttcaagtgattcttctgcctcagcctcccgagtagctgggattacaggtgtccgccaccacacctggctaatatttttttgtattttttagtagagatggggtttcaccatgttggccaggctggtcttgaactcctgacctcaggtgatccacctgccttggcaccccaaagcgttggggttataggcgtgagccaccgcgcccggccaggaatggagttctgatacatgctacaacgtggatgaactttgaaaacattatactgactgaaagaagccacacacgaaagacacatatggtatgattccatctatatgaagtagccacaataggcaaatccatatacagagaaagattagtggctgcctagaactgaagatgggaggtatggaaggattagcggtgacaggtaagaggcatggggtttctttttggggtgacgacaatgttctaaaattgactgtggaaatggctgcacaagtctgtgaatatactagaaaacactgagctgtatactttaaatgggtgaattatgtagtacgtgaattctatctcaataaagctattaagaaaaaaaaaaaacaacaggctgggcgtagtggctcccacctgtaataccagcactttgggaggctgaagcaggcaaatcacttgaggtcaggggttcgagaccagcctggccaacatggtgaaaccctgtctctactaaaaatacaaaaattaggtcaggcacggtggctcacgcccgtaatcccagcactttgggaggtcaaggcaggtggatcacttgaggtcaggagttcgagactagcctggccaacatggtgaaacccagtctacactaaaaatacaaaaaattagccaggcgtggtggcaggtgcctgtaatcccaggtacttgggaggctgaggcaggagaattgcttgaacccaggaggcggaggttgtagcgagcagagatcgcgccactgcactccagcctgggcatcagagcaagactctatcactaacacacacacacacacacacacacacacacacacacacagatacaaaaattagctgggcgtggtgacgcgcacctgtagtcccagctactcaggaggctgaggcaggaggatcatttgaacatgggagagaggcagaggctgcagggagccaagatcacaccactgcactccagcctgggagacagagtgagactctgtcttgaaaaaaagaaaaaacaaaaaaacaatcctggatggtggatctttgcatgtctgttacattattttctgacactttggaatagttcataatttctaataaggaaaaggaagcctaagaagctagcatgctaaccgaggccacccatccccaggtctccttccttcccacaggtttgtgtttttttttttgagataagatctcattttgtcccccaggctggactgctgtggcctccacctcccaggctcaagcaatcctcccaccttagtctcccaagtagttgggactacaggtgtgtcccaccacacttggctaattttcttctcttttcttttcttttttttttttttttgagacacagccttactctgtcacccaggctggagtgcagtggcgcgatctcggctcactgcaaccttcgcctcccgggttcaagcaattctcctgcctcagcctccagagtagttgggactacaggcatgtgccaccacgcccggctaattttttttgtatttttaataaagacggggtttcaccatattagccaggctgctctcaaactcctgacctcatgacctgcccgcctcgaccccccaaagtgctgggattacaggtgtgagccaccgcacccggcctaattttcttatttttttgtagagacagggtttcgctatgttgccagggctagtcttaaattcctgggctcaagcaatccttctacctcggactcccaaagtgtgggattacaggcgtgagccactgtgcccagcccacaggtctttcttctcttcttcccctagagaggacatgcagttatccagcccagaggaagcctcctccctctggagccaatcgtttagactttctggccatcaatggtcacaagctttccctgtcactgtgtgaaccttcccacctaccgtctcctataggaagctggaacccaggagcatagaacattacccccagactacaagcagaagactaggcatccccaccccacaaaaaagacatgaatccaggaatcccaaatgtagctctctcaacataaacaggccccttaccaaggactgtctcctataaagactttctctttcatcataagtctctccaaaaccttgctgcccgctgttcccatgaaaaccaaggtcatttcaaaactcagcacacaccgtcccctcatacttccaatactttctccacggtagttctggtcatagccttcctcttctacttccctatccacctcctcctcctccttgccctggtgacagcaacagactcaaatctcatccccagctaccaacaactttctccccctcccttcctccatcttgactgggctcatcatggaaattgaggcacctgtaagcccagcccagtccctaagttcaggtcacattacctttttttttttggagacagagtctcgctttgtcgcccaggctggaatgcagtggcgcgatcttggctcactgcaacttctgcctcccaggttcaagcgattctcctgcctcagccttctgagtagctgggattacaggcctgcaccaccacacctggctaatttttgtatttttaatagagacggggtttcgcaatgttggccacgaactcctgacctgaagtgatccgcccgcctcggcctcccaaagtgctgggattacaggcatgagccaccacgccaggccaaaatcgcttctttattcaggtaattgagcaggtgccaggccaagtttcctggcctctccttcattcacatgtattcattcattcaaatattcaagtgataatttattgagcatttacactgagacgtagcccgtgtgaaatactggaaatatgaaaatggccaaaacggtagcatgacaagatcccgatttctgggtccctaatccttcagtcctctccactaagactctcttgttcctcgacaatttcttcccactaaaggctcactaggcgccctcgcgctctcagacacactgaacaggtacctgcctgtgcttccagcttggaactcaagtgccattggcaccactaacaatccaaggctcccaaatggctcgaagcgcaaggtcctacaaccctcctcatcacacactggcgccaaggactgcggaaccggccgttgcgccaagatgattttgaaagttggagttcctatagcatgatggggccagacccgagattctgggatcccagccccctccccgcctcagatccagaagtccagcccccatgtccccttctcccccagatctgggtggccgagcttcctcctctttcagacccaggagtctgaacccccagatcccccctccctcagacccaggagtcagggcctccagcatcctcctctctcaaactcgagactgctagctcgctcctcaccctccatgcacccacacttacaacggttgccatgatgctcaccaactgccagagtcctagcggaaacggaaacgcgcgaggagcgagatgttctggctcctctaggctagctggttcttcaaagatctcgatggttcctcataaatatgtaaatattgtgggggcgtggcgggactttatgccccgccctcccaccgaggctgcgctggaagacgggcgtccggaactcctgggtccattcccaatgtctcctggctcctcctccttttgctcagccccaccaccgccccgctcaggccgattgcaaaattcttagctgttctttgagtaaccacacgtcctccacgctcctttcctctttatcccaccctcctcctcctccccactttgaggcctccagctccagattgacagagctgaaggccactcgtttccgtaaagcgcagcggcaagctccgccccctggaggtctcacggccgaggcggggccgggacacagcgactccaacccgttccaccaatgaggacacgcggaaatccccgcccccgggcgtgggccaatggcgctggctggggggggcggccaccgcctcctggcggctgcgaggtttcactgcaggggcgccagtgggctcagtgacgctgcggcctccttctgcctaggtcccaacgcttcggggcaggggtgcggtcttgcaataggaagccgagcgtcttgcaagcttcccgtcgggcaccagctactcggccccgcaccctacctggtgcattccctagacacctccggggtccctacctggagatccccggagccccccttcctgcgccagccatgcctttaaaccgcactttgtccatgtcctcactgccaggactggaggactgggaggatgaattcgacctggagaacgcagtgctcttcgaagtggcctgggaggtggctaacaagggtgagcacgccaggcgtcggggcccttgacgagaaggacagtagtggatgggggcccggaactctgagttgtaggaggacggggctactaggggaacccttgtgacctgggcaaggaggctgtgtccttgaggaggggctgggaagccggaggtgggtgggagagggatggttcgtttgacttaagatgaaaggaggctggaagcccgggttctgggtcctagggaagagggcgctaaaatgagactcctaggtcctggaggcaggcttccgagagactagatacctgggtcctgaacagggaaggggatggggggatgggatttctgcgtgcaaacctgggaagctgccggggtttcagacctatgaccctaacagcatggtctaggggataaaactccagatttgagagagagctgactgggagataggaggcctgagcggcggtgggaggacctgaggatctggctgcttaagaataaagatgggacgggctggagactgtaatgaatgcctgggctttgaaggagctgagggcctgagctattagttcctaggagtagaggagcccatggcctgggacacatgcgtactggaataggggaaggctgggaagtcctaagttagtcagaggctgggccctaggatgggaggggctaggagcctgcatttctgtgtcttgggcttcagaaagctgaggttctggccttggagaaggctggggctga

SEQ ID NO: 2911 - DNA, 6000 bp, Homo sapiens
tcttactgttcatgctgccacttttcttccccatgatgccttgtttctgttcctttcatcacatatctgtcacctgcgacctctttcctctatccataggcccattttgtagtccacagcctccttccttccttccttgcttccttccttccttccttccctctctccctccttccctccctctctcctttttctttctttcttccatttttttttgtttgtttttgtttttgacagggtctcactccggtcacccaggctggagtgcagtggtgcaatcatggctcactgggctgggcgcggtggctcacgcctgtaatcctagctctttggggggccgaggcgggcggattgcctgagctcaggagtttgagaccagcctgggcaacatggtgaaaccctgtctctactaaaatacaaaaaattagccgggcgtggcagcatgtgcctgaggtcccagctacttgggaggccgaggcaggagaattgcttgaacgcgggaggcggaggttgcagtgagtcgagattgtaccactgcactccagactcagcgacagagtgagattctatctgaaaaaaaaaaaaaaaaaattatggctcactacagcctccacatcccatcctcccacctcagcctcctgagtaactgggatcacgagcacgcaccatcatgcctggctaattttttgtatttttagtagagacagagtttcgccatgttgcccaggtgggtcaggaactcctgggctcaagctatcctctcacctcggcctcccaaagtgctgggattccaggcatgagccaccgccctcggccacgccacacatttctaacatagcccatcctctgtccgtgccccagggctgcatttttctagccactgccgtgtttctaagacttgctgtctcacttctgcctctgccacatttctccagttggctgttttcctccctgagaccatggctttggttctgggcctgctgccacagcagtggagaagcagccccgctcctcgccgacctggctttttgctgcctggagcctcgctctgaggtccctccccctcccagctgttgtctgcccttttgctgggggggggggggggctattcttaggcccccagcacgtgggaagcagctgccctcaggaagcgactgggctgttctgggttcccttagggacacagtcggacctgaatggattccagaccccaccccaaaccagaggctgtgaatgagtaaaggaaccacagtgcctctccatccccagcctggacctgtctgtcccttagccctgccgcctgatggctttctccttggacaacagcgtgccgcctgatggctttctccttggacaacagcgtgtctctttccgtcttcaccctggggccctggaactccccctcctctctaatccctgatctgcccatctcagactctgtcctgtgggtctgtccactgacctctcctctcttccccgatattccatgcttctctctccttctaggactggctttctgaaacatctggtggcctctcttctgtccccagtctattactcttgcctgtggctccatccacccttctcccttggtctgcctgtccccctcactctccaagcttggctgttagtaacaataatgacgatgatcataacaatgacaatcaccgcccacacaatgtgctaccttcatgccaagaactctactaaccactttgtccttattaactgtttcctcctcccagcaccgctagaaggtagacgctattagcatgtccattagccaaggacacacaggcagcaagtggagggtgaacttgaacttcaagctccagaatcctgctccttcctgacctcaggcccacttctccccagctctgcctggctggctggcattcttttctgagacagagtctcgctccgtcgcccaggctggagtgcagtggcccaatcgcagctcactgcaacctccgcctcccgggttcaagcgattctcctgcctcagcctcccgagtagctgggattacaggcacccgccaccacacccagctaatttttgtatttttggtagagacggggtttcgccatgttgaccaggctgtctttcgatcttgctctctttctctctgggtctgaggaccttggcctcttggatctccgtctcagtctgtctcatacttgccatctgtctgtccattcgcccatgtctgggatccacccacccacttccaggccctgcatctgtctgggtgtcctatcacgcctccttcctgtgtccaagcctgcctcgctctctggctggggctgtccaccctgcaccctctccgtctgtggctcccaccccgatggcaggctgtccacccgcttctgccctgggctgggccacgtcccaccttgcagcccttgctgttcatggaatccagtgtcctcttcagggccggggtgggggcctccagcagttccacctgggtcctcacgccctgctccgtgtacggccccaccaggaagtagttgtcgccccattcgtcccctgtcaccttcgccttcgtctgcagcaccgtgtagatgccacccactgtgggcccaagcgtgtgagggcaggccccggccgaggtccatagttctggggcctggggtggggtgggccggggatgtagggggcactcaggccccagacctctagctcagggggaagaggggactgggagcccatagtttggagtaggggttggaagcttggatgaggggaacacgagggctggagggcagtcctcctgggtctaagggagaagggggctggggtcaggaccctgaaggaggagggggctcaggctagacttctgggtctgagagagaaggggctgggtgccgggaccccttggtctgaaggaattaggcactggggctctaaggatggcagagctgaggactgactacccggactcaggttcccgagttcccagctcacaggagctgggtttaaatcgcagccaggctccaaaacccagtgagggagaccccctcatggccaatccagcttctcaccattgcccaagagaagcctgcatggtcattccctgcccccagggaccttgctgacctgcctcccaatttcctctccctgactagggacaccagcatgcagggctctgcctctcccatgaccctatcccagacccaggagccccagcccccagcctcctcccatcctggagcccaggccctggcgatacccggctgggtgttcacgggccccctctcctcctgggagacacagtccctttctcctccaagacccagcaaagcaaccccccagaccctgctctttgaggtgtgagattggcttgttcctggggatttcagccccagccttctccaaggccagaacctcagctttctgaagcccaagacacagaaatgcaggctcctagcccctcccatcctagggcccagcctctgactaacttaggacttcccagccttcccctattccagtacgcatgtgtcccaggccatgggctcctctactcctaggaactaatagctcaggccctcagctccttcaaagcccaggcattcattacagtctccagcccgtcccatctttattcttaagcagccagatcctcaggtcctcccaccgccgctcaggcctcctatctcccagtcagctctctctcaaatctggagttttatcccctagaccatgctgttagggtcataggtctgaaaccccggcagcttcccaggtttgcacgcagaaatcccatccccccatccccttccctgttcaggacccaggtatctagtctctcggaagcctgcctccaggacctaggagtctcattttagcgccctcttccctaggacccagaacccgggcttccagcctcctttcatcttaagtcaaacgaaccatccctctcccacccacctccggcttcccagcccctcctcaaggacacagcctccttgcccaggtcacaagggttcccctagtagccccgtcctcctacaactcagagttccgggcccccatccactactgtccttctcgtcaagggccccgacgcctggcgtgctcacccttgttagccacctcccaggccacttcgaagagcactgcgttctccaggtcgaattcatcctcccagtcctccagtcctggcagtgaggacatggacaaagtgcggtttaaaggcatggctggcgcaggaaggggggctccggggatctccaggtagggaccccggaggtgtctagggaatgcaccaggtagggtgcggggccgagtagctggtgcccgacgggaagcttgcaagacgctcggcttcctattgcaagaccgcacccctgccccgaagcgttgggacctaggcagaaggaggccgcagcgtcactgagcccactggcgcccctgcagtgaaacctcgcagccgccaggaggcggtggccgccccccccagccagcgccattggcccacgcccgggggcggggatttccgcgtgtcctcattggtggaacgggttggagtcgctgtgtcccggccccgcctcggccgtgagacctccagggggcggagcttgccgctgcgctttacggaaacgagtggccttcagctctgtcaatctggagctggaggcctcaaagtggggaggaggaggagggtgggataaagaggaaaggagcgtggaggacgtgtggttactcaaagaacagctaagaattttgcaatcggcctgagcggggcggtggtggggctgagcaaaaggaggaggagccaggagacattgggaatggacccaggagttccggacgcccgtcttccagcgcagcctcggtgggagggcggggcataaagtcccgccacgcccccacaatatttacatatttatgaggaaccatcgagatctttgaagaaccagctagcctagaggagccagaacatctcgctcctcgcgcgtttccgtttccgctaggactctggcagttggtgagcatcatggcaaccgttgtaagtgtgggtgcatggagggtgaggagcgagctagcagtctcgagtttgagagaggaggatgctggaggccctgactcctgggtctgagggaggggggatctgggggttcagactcctgggtctgaaagaggaggaagctcggccacccagatctgggggagaaggggacatgggggctggacttctggatctgaggcggggagggggctgggatcccagaatctcgggtctggccccatcatgctataggaactccaactttcaaaatcatcttggcgcaacggccggttccgcagtccttggcgccagtgtgtgatgaggagggttgtaggaccttgcgcttcgagccatttgggagccttggattgttagtggtgccaatggcacttgagttccaagctggaagcacaggcaggtacctgttcagtgtgtctgagagcgcgagggcgcctagtgagcctttagtgggaagaaattgtcgaggaacaagagagtcttagtggagaggactgaaggattagggacccagaaatcgggatcttgtcatgctaccgttttggccattttcatatttccagtatttcacacgggctacgtctcagtgtaaatgctcaataaattatcacttgaatatttgaatgaatgaatacatgtgaatgaaggagaggccaggaaacttggcctggcacctgctcaattacctgaataaagaagcgattttggcctggcgtggtggctcatgcctgtaatcccagcactttgggaggccgaggcgggcggatcacttcaggtcaggagttcgtggccaacattgcgaaaccccgtctctattaaaaatacaaaaattagccaggtgtggtggtgcaggcctgtaatcccagctactcagaaggctgaggcaggagaatcgcttgaacctgggaggcagaagttgcagtgagccaagatcgcgccactgcattccagcctgggcgacaaagcg

SEQ ID NO: 2912 - DNA, 6000 bp, Homo sapiens
gttcagtgtgtctgagagcgcgagggcgcctagtgagcctttagtgggaagaaattgtcgaggaacaagagagtcttagtggagaggactgaaggattagggacccagaaatcgggatcttgtcatgctaccgttttggccattttcatatttccagtatttcacacgggctacgtctcagtgtaaatgctcaataaattatcacttgaatatttgaatgaatgaatacatgtgaatgaaggagaggccaggaaacttggcctggcacctgctcaattacctgaataaagaagcgattttggcctggcgtggtggctcatgcctgtaatcccagcactttgggaggccgaggcgggcggatcacttcaggtcaggagttcgtggccaacattgcgaaaccccgtctctattaaaaatacaaaaattagccaggtgtggtggtgcaggcctgtaatcccagctactcagaaggctgaggcaggagaatcgcttgaacctgggaggcagaagttgcagtgagccaagatcgcgccactgcattccagcctgggcgacaaagcgagactctgtctccaaaaaaaaaaaggtaatgtgacctgaacttagggactgggctgggcttacaggtgcctcaatttccatgatgagcccagtcaagatggaggaagggagggggagaaagttgttggtagctggggatgagatttgagtctgttgctgtcaccagggcaaggaggaggaggaggtggatagggaagtagaagaggaaggctatgaccagaactaccgtggagaaagtattggaagtatgaggggacggtgtgtgctgagttttgaaatgaccttggttttcatgggaacagcgggcagcaaggttttggagagacttatgatgaaagagaaagtctttataggagacagtccttggtaaggggcctgtttatgttgagagagctacatttgggattcctggattcatgtcttttttgtggggtggggatgcctagtcttctgcttgtagtctgggggtaatgttctatgctcctgggttccagcttcctataggagacggtaggtgggaaggttcacacagtgacagggaaagcttgtgaccattgatggccagaaagtctaaacgattggctccagagggaggaggcttcctctgggctggataactgcatgtcctctctaggggaagaagagaagaaagacctgtgggctgggcacagtggctcacgcctgtaatcccacactttgggagtccgaggtagaaggattgcttgagcccaggaatttaagactagccctggcaacatagcgaaaccctgtctctacaaaaaaataagaaaattaggccgggtgcggtggctcacacctgtaatcccagcactttggggggtcgaggcgggcaggtcatgaggtcaggagtttgagagcagcctggctaatatggtgaaaccccgtctttattaaaaatacaaaaaaaattagccgggcgtggtggcacatgcctgtagtcccaactactctggaggctgaggcaggagaattgcttgaacccgggaggcgaaggttgcagtgagccgagatcgcgccactgcactccagcctgggtgacagagtaaggctgtgtctcaaaaaaaaaaaaaaaagaaaagaaaagagaagaaaattagccaagtgtggtgggacacacctgtagtcccaactacttgggagactaaggtgggaggattgcttgagcctgggaggtggaggccacagcagtccagcctgggggacaaaatgagatcttatctcaaaaaaaaaaacacaaacctgtgggaaggaaggagacctggggatgggtggcctcggttagcatgctagcttcttaggcttccttttccttattagaaattatgaactattccaaagtgtcagaaaataatgtaacagacatgcaaagatccaccatccaggattgtttttttgttttttctttttttcaagacagagtctcactctgtctcccaggctggagtgcagtggtgtgatcttggctccctgcagcctctgcctctctcccatgttcaaatgatcctcctgcctcagcctcctgagtagctgggactacaggtgcgcgtcaccacgcccagctaatttttgtatctgtgtgtgtgtgtgtgtgtgtgtgtgtgtgtgtgtgtgttagtgatagagtcttgctctgatgcccaggctggagtgcagtggcgcgatctctgctcgctacaacctccgcctcctgggttcaagcaattctcctgcctcagcctcccaagtacctgggattacaggcacctgccaccacgcctggctaattttttgtatttttagtgtagactgggtttcaccatgttggccaggctagtctcgaactcctgacctcaagtgatccacctgccttgacctcccaaagtgctgggattacgggcgtgagccaccgtgcctgacctaatttttgtatttttagtagagacagggtttcaccatgttggccaggctggtctcgaacccctgacctcaagtgatttgcctgcttcagcctcccaaagtgctggtattacaggtgggagccactacgcccagcctgttgttttttttttttcttaatagctttattgagatagaattcacgtactacataattcacccatttaaagtatacagctcagtgttttctagtatattcacagacttgtgcagccatttccacagtcaattttagaacattgtcgtcaccccaaaaagaaaccccatgcctcttacctgtcaccgctaatccttccatacctcccatcttcagttctaggcagccactaatctttctctgtatatggatttgcctattgtggctacttcatatagatggaatcataccatatgtgtctttcgtgtgtggcttctttcagtcagtataatgttttcaaagttcatccacgttgtagcatgtatcagaactccattcctggccgggcgcggtggctcacgcctataaccccaacgctttggggtgccaaggcaggtggatcacctgaggtcaggagttcaagaccagcctggccaacatggtgaaaccccatctctactaaaaaatacaaaaaaatattagccaggtgtggtggcggacacctgtaatcccagctactcgggaggctgaggcagaagaatcacttgaacccaggaagcagaggttgtagtgagccaagattgcgccattgcactccagcctaggtgacagagtgagactatgtctcaaaaaaaaaaaaaaaagaaaagaaaaaagaactccattcctttttatgactgaataatattcctttgcacaaatagaccctgttttattttgccattcatcagctgatggacatgtgggttgtttctatcttttggctgttgtgaatagtgctgccgtgaacactcgtgtccatgttttgtgtggacctctgggggggtcctgaattgtcccgggtggtgtttactcacctccctcccccatgtgagaaggggtggtagctggctcctctctgtggagaactgtcaacatgggaagcctcggtatattcttgttgaatgagctcagcactttagagtatcacttagcaaaccacagacattgagtcccgaggtgaacaagagagaacaggccgtgcccttcatgggactcatgtccactggagcagagaatattgatccatccatctccctcgggaatgtgagatcacacagggagatcgggctcccagggaggcctttcatctgtctgaatgtctagaggtcctagaactagcctggcagggctgttggacagaaagggcctcccctagggggcagcacttgatctaattcagtgagagggcagggagagcagtctggactcaggggccagcatgtgcaaggcctggtggttgagaactggggccgcctggtacaagggatgctgggaaattagcaggggccagagcatgtccagctccatgcctgctcctcattggtgtctgtccttatggagctcacagttattagaaatggggaggacttgtctgggcacggtggttcacacctgtaatcccagcactttgggaggccttggtgggcagatcacttgaggtcaggagttcgagaccagcctggccaaccccagtagagatgggcgaaaccccatctctattaaaaatacaaaaaaaattagccaagtgtggtggtgtgcgcctgtagtcccagctactcaggaggctgaggcgggagaatcggttaaacccaggaggcggaggttgcaatgagctgagatcgggccactgcactccaacctgggcgacagagcagactccgtctcaaaaaataagaaaaaaaaaaaagaaatggggaggacttagccgggcacagtggctcacgcccataatcccagcactctgggaggccaaggctggtgtatcacttgaggccaggagtttgagaccagcctggccaacatggcaaaaccccatctctactaaaaatacaaaaattagccgggtgtgttgatgcgcgcctgtaatcccagctagtcaggaggctgaggcagagaatttcttgaacccaggaggcggaggttgcagtgagccgagattgggccactgcactccagcctgggtgacagagcgagacttcatctcaaaaaaaaaaaaagaaacagggaggatttcattcattcaccaaataaccaaatatgtgctggaccctgaggaccaagctgtcgatgagacagacagtccttgtcttcctggggctcaaccaaccagccattaggcagtgacaggcaagaggggtgggggtgactggtgcctgtcccatcgcctgcctgtgaggggaaggagtggaaaggaccatctcatgggagggacagaggaggggttggtgaaagctgggaccacactagtcctctgacacatcttcttgcacccccagacagccacaaccaaagtcccggagatccgtgatgtaacaaggattgagcgaatcggtgagtgagttgggtcaggaataggacctaagccctgcctgccatgtgccctgacagagcaaacctattgaggacccctaagatggagagggaggtggcctgcacaccaactgtgcccccactaccattcccccactcgccctatctaatgggggaggaggatcctcagttccagagttgggtcagatgatgcactggggaccaggctgctatcctggctatcctggtggggttcccgggtatgtttgcctggaagtcatagatatttactgggtgctttactgggtttggcctcgtatacccagtacacactgtggggtgagttccctgagggcagggacgaggtcgtgtcattcctagctgtgtccctagcacaggacctaacagagcagatgatcaagagataaccattgaatgcacgagtttgcgtcctgtggagccctcgcagtagccgcatgaggtgcatattgtaactgttagctgagggaactgattttcaggacagctaaatcactggccccggctcacacagagcaggaagttgagacgcagtgaggccagcagggtgcgctctcacaaagagctttaccggcagggaagtgaccgcattcattcatgcagcaggctcactgattcagggcatccgagaaaggcagtaagggcttctggctgtgaagatgggttttagaagcccagtgctggattcctggagcttagctctgccactttcccaccatgtggccagggactagttcctctctgtgcctcagtttccttatctgcaagacgaagctaagatagtttacctcatcagttaatgtaagattcagtaaggtagttcatataaagcattttgggtctgtgtgccaacactgtttcatctattaaaagtgctggggcactgggtgcagtggctcatgcctgtaattccagcactttggaaggccaaggtgggcggatcacctgaggtcagg

SEQ ID NO: 2913 - DNA, 6000 bp, Homo sapiens
cttcagggaggtggaggtggtggctgtggcagtggccgtggctgaggaggaggacacatggagcatggctaggtgctgcctggcctgggcctctaactcaggtcatccacagggctctttgtgatggatgaggacgccaccctccaggaccttccccccttctgtgagtcagaccccgagagtacagatggtgagtgtcccaggctgttcccctcccgacctgagggcaggcacacggccgacacaaaggcagggacagaagctgaagtccaccctctctttcagatggcagcctgagcgaggagacccccgccggcccccccacctgctcagtgcccccagcctcagccctacccacacagcagtacgccaagtccctgcctgtgtctgtgcccgtctggggcttcaaggagaagaggacagaggcgcggtcatcagatgaggagaatgggccggtgaggggcaaatgtggggaggtagggagggcagctggaagggctctgagccgcctcctccaggaagccctccagcatggatgctgctttccacccataagctaactgaatcctcccctcaacctcaagaggcgagttcttggacacgagccttgcagttttaacaattgcagccttaccatgtgtcctagtgccttatagagaaggcctctcctttccaggagcgtctctatttatagaacacctgctctgggcaaggcacaggtgttttggcatgccctccagtggagaaactgaggcttggagggttcagatcacctcccatccccaccctgcacattcctagccctttgcagaatttgtcccaccccctggtcccctgttcaccccttgtagcaacccctgtttgaagctcctgggctgggctctgctggcctaggtgggtcctcctcacccttcactgagcctccctgaagcagaggggaaactgaggcactgaggggacatgtgacttccctgagaggcagagctgggactggaacccaggtgtgtttcaggaaggagctgtgggctttgagggaggaggcctgggtccccacagtccccccctcaagcctcagtgtccttatatgcaaaccagcagtcacagtggtgaccttttctgtgcatcctccctcaatgaagcagtgagcactgaagaccaggaacagggcctggtgcgggcggggtccacctgctgctgctctctgtgcttgcgactcatggcaacacagttaattgaatgctctggcctcttgcgtgctgtgcccgggggctggtctcccactgggctcaggtccagttcctgatctgggtctccgggtcccatcctgcgaggggacaggcccagctccgggtgacgggggctgtagtggaggcagtactaggtgccagaactgcaggctccttggcgggggctgacacagcgagggatcttttctgtagcgcagtggccacatgataaggcagtaacagctgattatctcagccctcacagagaccctgttatccgccccatttttcagaaggggagactgaggcctagggaagcaaaacctcttgctcatagtttgtcagcggcagaggtctgattggaacatgactgaaaccccagcccagatcctcagacatgagacggtgcactcagccttaatggctagcaggcaacagcacttccactgtgtaggaagcaatgtcctaggccaagaaggggagagggagaggggcaggtaggcttcgtggaggaggtgtctgaaccgggtagaagggttcctacgtggagcaagacggggaggggcactgctggcagtgggcatcgcagggcacaggtggcagggcagggacgtgctagaagtgggcttggagcccgggtgcacccctggaccgcgtgtgggtgcagggggattgccctgccggcgctgacctcgccccgtcgccgtccccgcagccctcttcgcccgacctggaccgcatcgcggcgagcatgcgcgcgctggtgctgcgagaggccgaggacacccaggtcttcggggacctgccacggccgcggcttaacaccagcgacttccagaagctgaagcggaaatattgaagtccagggagggagcgccccgggccgcgtccgccccgtcccacactacgcccccgccccactcccggggcctgctaatctgaggccgatccgggaccggcctccttgcgtctcccattcccaagattgtcccgcctctgccaatccccgccgtccttccagcccacgacctgccgcgccgaggagcggcatctgtcccgtttcccgattgggtctgtcgtctctctccgcctagcgacagattccttctattaagggattggctcgctgagttctaagctctaaatgggtcaactcctttgttttccgcctagcgacaagggatttgctcgcacggcattggctccatcccctagtcgctggacagctctttttttgattggctcaaatcctgtaaagggcttgaccagtctctacatagtcaccgtccgcttttcctgagttctccctcccaattggctccagcttcctgggggcgtggccaagccctcctcttcccagaattggcccggggccttcaatttacgttctttacactacggggactggggtcgtctttgcccacgtcccgacaacttgttccctgaccccctcagggatggccccaaactgtccctgcctctggcaccccctttcattggttccatccatccccacaacagcctgccaatcgaagcccgtccctgcatccaggatggtaccagctcccgcccctcgccccccacctccacaggtgccttaaagggccctcgtccacccaaggtggggggcaggggccctcactctccggccctggtgtgggggagagagtgaggggttgggggatcggcagttgggaggggcgctctgagattaaagagttttacctctgagataaatgtgaagtgtgttgtgagtgttcattcaacattttctgaaaccgaatggcagcgtctgattatcagtgaatagctgggggttggaattactgtgcccattttatttacttttttgagacagggtcccactctcgcccaggttcaagcgattctcctgcctcaacctcccgagtagctgggattacgcgccactgccgcccgggtaatttttgtattttcagtagaaacagggtttcatcatgttggtcaggatggtcttgaactcctgacctcaaatgatccacccgccttggcctcccaaagtgctgggattacaggcgtgagccacggcgcctggctttgtgcccattttatagatatgaagacacaggttcatggggtggaggagagcatcccagtcttatgtgaccatggaacccaatcttgaggaggtgagtgttggagacagagcccacatattcaccagcaaagccaggaactccagccgggagtcttctattataaaaggactggagcaactgggcttggtgcctcacgcctataagcccaacacgctgggaggccaaggcgggaggatcacatgacaccaggaggtcgagatcagcctgggcagcacagtgagaccccttctccaaagggaaaaaaaaatggctggaggttagaaagcaggtggaacctcgtccgaaattaggactaggtaaacgtagtcccaccagaccactaccgaaagaatgctaacactaaataagacttaaacggatctgagcactttgggaggccgaggtgggcggatcacgagatcaggagatcgagaccgtcctggctaacacggtgaaaccccgtctctactcaaaatacaaaaaattagctgggcgtggtggcgggcgcctgtagtcccagctactcgggaggctgagacaggagaatggcgtcaacccgggaggcggagcttgcaggtgagccgagatcgcgccactgcactccagcctgggcgacagagtgagactccgtctcaaaaaaaaaaaaaaaaaaagacttaaacagggctcactaccacccattttttaaagcttttgtcacgtgttagctcctttaatcgtcatggtaaccccacgaagcggaaacgattatcctttttatagatgaggaaactagaacatcgagggtgaagccaaagaaggacttaggggcgctgtcgggggcggaggtttcctcgactgacaatgaccatcagatgggaaaaaaatcttcctccctgggatgaaaattagaagtcaaggtggaaagaggcaaatctgctaacggaggatccagtccccgctaccggcctgagcctcgcgttgcagcaagagagatgaaggtcagggctgccgagagaccctgggggccgggagtcggggaaggggcgtggctgctgtgggaggaggccaggccccgccccccacccacgaggggacgagtcatttccgtccgccgaggaaccgaccgccgccggccgggttgcaggcggggcacctcgggcaggacctccctggtcggaagtggccgtgagcccaagccgcggtcccgggtgagtacggggcggggcggaggcatgtgcgaggctctctgcctgtacgctggaaagtggggattgcaactcggggagggatggagcacgcgtcgtcgcctgggaaacgggtcgacccgcggaaggcgagcgggtgggacttccggagcagttaatggtggggaaactttctagtggatgtgggaggaggcgggacttcctgcagcaaattggggctgtgcgccgctcaagcccgtttacctgctccccaggccggcacccaggatgggcgaggtggaggccccgggccgcttgtggctcgagagcccccctgggggagcgccccccatcttcctgccctcggacgggcaagccctggtcctgggcaggggacccctgacccaggttacggaccggaagtgctccagaactcaaggtgagcggggcctgagctggagggggtgtggcctgctgcaaaagcgggaacaatccagagggacgcttggctgctacgcgggattgcagtggtgcagccagccccgaagtcggaaggtgctctctagggagtacaggaagataaagtttgtgcttgatttagaattagctagatcctttgggggagaggggatcgagccgatttagggaggatgttcactgcgcggatgatgctcaggccatcgggaaatccagaaacaggcgacgaccttcgtcaagagaaaaatgatcctgtggagaaaagtaaatgtcgctaggttgggatggatggtaacaggccaagccccggacctatatctagccacattttttgtcaaggaggaaaccaattctgtagagaaaagtacctccctgtcccttgcaaggaccagtgtcaggcaatcctagtgccactatctggctactgcatgtcaaggagccaatcccatgtagaaataaactgcctcttactccctggatgctatagcctgaagcaggccacactccccagaaatgagggacccaatcacacaaggatgcaaatcctgactccacccctccaatcctcagtggagctggtcgcagatcctgagacccggacagtggcagtgaaacaggtatcagtgcctctgcaagggccagcaaggcctggggatgggatttggggaggaattgcaagccgtcagtgaaggggtacattaggaaaatctgattggggccgggcgtggtggctcaagcctgtaatcccagcactttgggaggccgaggcgggcggatcgcttgaacccaggagttcgagaccagcctgagcgacatggtgaaacctgtctctctaaaaaattagcgggaatggtggcgcgtccttgtagttcctaatcgggaggctgaagcgggaggatcccttgagcccagtaggtcaagggtgtagtgagcagtgatcaccacactgtacttcagcctgggtgacagagcgagaacctgtctcaaaaaaagaaaagaaaaaatatggctggg

SEQ ID NO: 2914 - DNA, 6000 bp, Homo sapiens
gcagccaacatctgaggaagccagggagggagcagccagctgttttggggggaatttgggggtcgggcacttcccggaggctggactgtaacgctagggctttgcggagttagtaggagtttgatcagtcactaggaggtccttgtttgttgttattaccaatggcaggcctcctcaccattgctggagaaaacccgtgtagggtgaagggcaggcatcctgagttcaaatcctggtggtgtcccttagtagccatgggacctcgggcaagtgacttaacttctctgggcctccaggtctccatttgtgaaacagaggtcatagtcattgcatgtttctctaaggctgtgttttgagtcacattgtcccgaacagatcgtagaggtttcatgttagcagcccgttgtgtgcagctgagagggtggcagatccatagaaactgggttggtttttgccgatgaccaggcaggctgctagaggaagttgtttttgaggtgaaggaaatgggtctcagaagcttcagggaggtggaggtggtggctgtggcagtggccgtggctgaggaggaggacacatggagcatggctaggtgctgcctggcctgggcctctaactcaggtcatccacagggctctttgtgatggatgaggacgccaccctccaggaccttccccccttctgtgagtcagaccccgagagtacagatggtgagtgtcccaggctgttcccctcccgacctgagggcaggcacacggccgacacaaaggcagggacagaagctgaagtccaccctctctttcagatggcagcctgagcgaggagacccccgccggcccccccacctgctcagtgcccccagcctcagccctacccacacagcagtacgccaagtccctgcctgtgtctgtgcccgtctggggcttcaaggagaagaggacagaggcgcggtcatcagatgaggagaatgggccggtgaggggcaaatgtggggaggtagggagggcagctggaagggctctgagccgcctcctccaggaagccctccagcatggatgctgctttccacccataagctaactgaatcctcccctcaacctcaagaggcgagttcttggacacgagccttgcagttttaacaattgcagccttaccatgtgtcctagtgccttatagagaaggcctctcctttccaggagcgtctctatttatagaacacctgctctgggcaaggcacaggtgttttggcatgccctccagtggagaaactgaggcttggagggttcagatcacctcccatccccaccctgcacattcctagccctttgcagaatttgtcccaccccctggtcccctgttcaccccttgtagcaacccctgtttgaagctcctgggctgggctctgctggcctaggtgggtcctcctcacccttcactgagcctccctgaagcagaggggaaactgaggcactgaggggacatgtgacttccctgagaggcagagctgggactggaacccaggtgtgtttcaggaaggagctgtgggctttgagggaggaggcctgggtccccacagtccccccctcaagcctcagtgtccttatatgcaaaccagcagtcacagtggtgaccttttctgtgcatcctccctcaatgaagcagtgagcactgaagaccaggaacagggcctggtgcgggcggggtccacctgctgctgctctctgtgcttgcgactcatggcaacacagttaattgaatgctctggcctcttgcgtgctgtgcccgggggctggtctcccactgggctcaggtccagttcctgatctgggtctccgggtcccatcctgcgaggggacaggcccagctccgggtgacgggggctgtagtggaggcagtactaggtgccagaactgcaggctccttggcgggggctgacacagcgagggatcttttctgtagcgcagtggccacatgataaggcagtaacagctgattatctcagccctcacagagaccctgttatccgccccatttttcagaaggggagactgaggcctagggaagcaaaacctcttgctcatagtttgtcagcggcagaggtctgattggaacatgactgaaaccccagcccagatcctcagacatgagacggtgcactcagccttaatggctagcaggcaacagcacttccactgtgtaggaagcaatgtcctaggccaagaaggggagagggagaggggcaggtaggcttcgtggaggaggtgtctgaaccgggtagaagggttcctacgtggagcaagacggggaggggcactgctggcagtgggcatcgcagggcacaggtggcagggcagggacgtgctagaagtgggcttggagcccgggtgcacccctggaccgcgtgtgggtgcagggggattgccctgccggcgctgacctcgccccgtcgccgtccccgcagccctcttcgcccgacctggaccgcatcgcggcgagcatgcgcgcgctggtgctgcgagaggccgaggacacccaggtcttcggggacctgccacggccgcggcttaacaccagcgacttccagaagctgaagcggaaatattgaagtccagggagggagcgccccgggccgcgtccgccccgtcccacactacgcccccgccccactcccggggcctgctaatctgaggccgatccgggaccggcctccttgcgtctcccattcccaagattgtcccgcctctgccaatccccgccgtccttccagcccacgacctgccgcgccgaggagcggcatctgtcccgtttcccgattgggtctgtcgtctctctccgcctagcgacagattccttctattaagggattggctcgctgagttctaagctctaaatgggtcaactcctttgttttccgcctagcgacaagggatttgctcgcacggcattggctccatcccctagtcgctggacagctctttttttgattggctcaaatcctgtaaagggcttgaccagtctctacatagtcaccgtccgcttttcctgagttctccctcccaattggctccagcttcctgggggcgtggccaagccctcctcttcccagaattggcccggggccttcaatttacgttctttacactacggggactggggtcgtctttgcccacgtcccgacaacttgttccctgaccccctcagggatggccccaaactgtccctgcctctggcaccccctttcattggttccatccatccccacaacagcctgccaatcgaagcccgtccctgcatccaggatggtaccagctcccgcccctcgccccccacctccacaggtgccttaaagggccctcgtccacccaaggtggggggcaggggccctcactctccggccctggtgtgggggagagagtgaggggttgggggatcggcagttgggaggggcgctctgagattaaagagttttacctctgagataaatgtgaagtgtgttgtgagtgttcattcaacattttctgaaaccgaatggcagcgtctgattatcagtgaatagctgggggttggaattactgtgcccattttatttacttttttgagacagggtcccactctcgcccaggttcaagcgattctcctgcctcaacctcccgagtagctgggattacgcgccactgccgcccgggtaatttttgtattttcagtagaaacagggtttcatcatgttggtcaggatggtcttgaactcctgacctcaaatgatccacccgccttggcctcccaaagtgctgggattacaggcgtgagccacggcgcctggctttgtgcccattttatagatatgaagacacaggttcatggggtggaggagagcatcccagtcttatgtgaccatggaacccaatcttgaggaggtgagtgttggagacagagcccacatattcaccagcaaagccaggaactccagccgggagtcttctattataaaaggactggagcaactgggcttggtgcctcacgcctataagcccaacacgctgggaggccaaggcgggaggatcacatgacaccaggaggtcgagatcagcctgggcagcacagtgagaccccttctccaaagggaaaaaaaaatggctggaggttagaaagcaggtggaacctcgtccgaaattaggactaggtaaacgtagtcccaccagaccactaccgaaagaatgctaacactaaataagacttaaacggatctgagcactttgggaggccgaggtgggcggatcacgagatcaggagatcgagaccgtcctggctaacacggtgaaaccccgtctctactcaaaatacaaaaaattagctgggcgtggtggcgggcgcctgtagtcccagctactcgggaggctgagacaggagaatggcgtcaacccgggaggcggagcttgcaggtgagccgagatcgcgccactgcactccagcctgggcgacagagtgagactccgtctcaaaaaaaaaaaaaaaaaaagacttaaacagggctcactaccacccattttttaaagcttttgtcacgtgttagctcctttaatcgtcatggtaaccccacgaagcggaaacgattatcctttttatagatgaggaaactagaacatcgagggtgaagccaaagaaggacttaggggcgctgtcgggggcggaggtttcctcgactgacaatgaccatcagatgggaaaaaaatcttcctccctgggatgaaaattagaagtcaaggtggaaagaggcaaatctgctaacggaggatccagtccccgctaccggcctgagcctcgcgttgcagcaagagagatgaaggtcagggctgccgagagaccctgggggccgggagtcggggaaggggcgtggctgctgtgggaggaggccaggccccgccccccacccacgaggggacgagtcatttccgtccgccgaggaaccgaccgccgccggccgggttgcaggcggggcacctcgggcaggacctccctggtcggaagtggccgtgagcccaagccgcggtcccgggtgagtacggggcggggcggaggcatgtgcgaggctctctgcctgtacgctggaaagtggggattgcaactcggggagggatggagcacgcgtcgtcgcctgggaaacgggtcgacccgcggaaggcgagcgggtgggacttccggagcagttaatggtggggaaactttctagtggatgtgggaggaggcgggacttcctgcagcaaattggggctgtgcgccgctcaagcccgtttacctgctccccaggccggcacccaggatgggcgaggtggaggccccgggccgcttgtggctcgagagcccccctgggggagcgccccccatcttcctgccctcggacgggcaagccctggtcctgggcaggggacccctgacccaggttacggaccggaagtgctccagaactcaaggtgagcggggcctgagctggagggggtgtggcctgctgcaaaagcgggaacaatccagagggacgcttggctgctacgcgggattgcagtggtgcagccagccccgaagtcggaaggtgctctctagggagtacaggaagataaagtttgtgcttgatttagaattagctagatcctttgggggagaggggatcgagccgatttagggaggatgttcactgcgcggatgatgctcaggccatcgggaaatccagaaacaggcgacgaccttcgtcaagagaaaaatgatcctgtggagaaaagtaaatgtcgctaggttgggatggatggtaacaggccaagccccggacctatatctagccacattttttgtcaaggaggaaaccaattctgtagagaaaagtacctccctgtcccttgcaaggaccagtgtcaggcaatcctagtgccactatctggctactgcatgtcaaggagccaatcccatgtagaaataaactgcctcttactccctggatgctatagcctgaagcag

SEQ ID NO: 2915 - DNA, 6000 bp, Homo sapiens
gcccaagttgttctcaaactcctgacctcaagtaagccgccctcgtgggccacccaaagtgctgggattacagttgtgagccaccgcacctggccactatctctacaacagaaatatttcaacttttgttttaaccgtgacccacagtaacaccaccaatatgtagaataggccaggcacagtagctcacgcctgtaatctcagtactttgggaggccgaggtgggcagattacttgaggtcaggagttcaagaccagcctggccaatatgctgaaaccccgtctgtactaagaatacaaaaattagctgggcttggtgggacgtgcctgtgatcccagctactcggaaggctgaggcaaagaatcacttgaacccgggaggcagaggctgcagtgaaccgagatggtgccaccgcactccagcctgggcaacacagtgagactccatctcaaaaaagaaaaaaaaaaagtatcatgactactcaaacacacagtgtaactaaacaaaagcttcatgaagcaatacttaccctgcaatgtaagatgcactgggatgttttctattctagtctcttttattctacttcattaaaaaatcatagtcactgcccacctagttattttcatgacccataatacgcaaaactgtaccacagacatttttacccatttgtatccactgcgtggaccaagtagcacatatctgcggagtgctgaaagcatttcatatcacaaagcagcacggatcacttaacaatgacacaggtccacaaattcttcaaactccaaggccagatgtgctttgaaattcaacttttattttcaaaaggtgatatggcatatacatggcatatttcattaaaatcccagtgcagggctggccgcagtggctcatgcctgtaatcccagcactttgggaggccaaggcaggcggatcacgaggtcaggagatccagaccatcctggctaacgcggtgaaaccccgtctctactaaaaatacaataacaaaattagccaggcatggtggtgggcgcctgtagtcccagttactcaggaggctgaggcgagagaatggtgtgaacccgggaggtggagcttgcagtgagccgagatggcgccatgcactccagcctgggcgacagagcgagactccgtctcaaaaacaaaaacaaaaacaaaacaaaacaaagtcccagcgcagtgtggatcaggctgcatttcataattgaacactttaccctagagaaaagtatcatcgttcattctaggtagaataatttaaagttatatttaaaaaataccctgtagtagttcaggtaaggcacggacactaaatttatgaaaaaaaatttgttgttctgagttgtccagatttttgagactacaaatatgggaatatggtagacctacaataaatgctaattctactgaacaatgagtttttctacatgtcagaggttaagcctcaacctacgagtataactcagttgacagatatttggcccataatgtttgttggcagacagaatgttttgaaagaaaattcaagcatggctcactagtctcaaacttgaaaattgggaaatttcacctaaaaattatgtttccaacttctgaaacatcctaggatttggcaacattgggtctacatcccacgaagttagttcactggtgcccatttaaagctcccccaccagtgctaggcaagtgggggatgcttataatcccagcactttgggaggctgaaaggtgttcgagaccagcctgggcaacgtaacaagaccttgtttctaaaaaaaaaaaattaaaaatgagcaagttgtggtggcacgtgcctgtagtcccaactacttgggagactgaggtaggaggatcgcttgggaggctgaggtaggaggatcacttgagcccaggagttcaaggctgcagtgagctatgattgtgtcactgtactccagcctgaatgacagagaaagatcctgcctccaaaaaaaaattaaatttgtttttttttttttttttgagacggagtctcgttctgtcgcccaggctggagtgcagtggcgcgatctcagctcgctgcaagctctgcctcccgggctcatgccattctcctgcctcagcctcctgagtagctgggactacaagcgcctgccaccacgcccggagaattttttgtatttttagtagagacggagtttcaccgtgttagccaggatggtctcgatctcctgacctcgtgatccacccacctcggccttccaaagtgctgggattacaggcatgagccaccacacccggccaaaaaaattaaatttaagtttaaaaagcggctgggtgcagtggctcatgcctgccatcccagcactttgggaggccaaggcaggcggatcacctgaagtttggagtccaagaccagcctgatcaacatggtgaaacccccgtatctaccaaaaatacagaaattagccaggcatggtggtgcacgcctgtaattccagctgcttgggaggctgaggcaggagaatcgcttcaaccggggaggtggaggttccagtgagaccgaactccagcctgggtgacagagcgagactctgtcatcaaaaaaaaaacacaattctccccttcagatgaggcaagtgctccccaaggccccgcagcctcacctggaccagttctcttctttcctgtatgtcatctgcctggccctcacagacagctgagcttgagatccctgtctgcagttaccaaatcacattctgcccacatctcatatactctcagctctgggaggaaagaaacgagggcccagaggtggagcccaaggtcatccagcccagagtgacttaagccaaacaattatcaggctgagagaccttgggcccaagagtcttgcccttccttccagaccatttaccttctctaagccttagtttccacatgtaccaaatggaacaaatacaacagatctatggtcctttaaatgctccaaaaaccagaacttgatttataaactgaccgcaaaacttcacctggattgccacaggccatgtagggtcttaatgttctcataagtgtgaatattcacaccttgccccacagaaacattttatgaccaaaaactggcccagattcctcggggtgtgggggggtgctgcctaattataaaatatgcaccctattagctttctaaaatctgaaaaattctgattcccgagattgccttggtgccaaggggacctgcacttatgtctcagtgctgctgcggggatcagaagaggaaatgcaactccagcagggcgcctggcacacagaaagcactcaaatactgtaaatgttaagtacttcaacttcccgaagaactcccatccatcgtccagcaagattctgcctaaatttgccaacttcaggtaactcattcccctccttccccaaccaaaaccaaaataaaacagaaccactcctctcagggccatcagggaggcctggaaacccctttagcagttttcttttcttttcttttctttctcagctcactgcaacctctgcctcctgggttcaagcaatcctcccacctcggcctcccaattagctaggaatacaggggcgcaccaccacgcccggctaatttttctatttttttcttcttttgtggagacagggcttcaccatctggcccaggctagcctcgaaatcctgggctcaagcgatccgcccacctcagcctcccaaggtggttttcttcctttctttttttttttttttttttaagatgtagtctcgctctgtcacccaggctggagtgcaatggcgcgatctcggctcactgcaacctccagctcctgggttcaagcgattctcctgcctcagcctcctgagtagctgggattacaggcccccgccaccacgctcaactaatttttgtatttttagtagagactgggggttcgaggaactcctggctgtaagtgatcccccccgccaaggcttcccaaagtgctgggattacaggcgtgatctaccgtgcccagaccttgagcggttttcataacagactgtgaaagacggttcacaccttcaccctgacaaccgccgcccaaggcgacgcaccctttgccgaagtcgcccccacttgcattccgtcacctctcaggaaggaccgagcccgcaagtccctcagccccagcgtctccgtacctcgggattgtagtcggccgcgtcaacagacgcaaccccagcctcaagggagcgggagattcaactccccgcacacgcgcctcctcgcagcgacttcctgtgcgcgagaagcttctctgagcggctgcacccaggatcctccgcggcagcgccaggactctatttcccagagggctgtgcgggcgacttctttcgccttcccatctcctcctgcttcttcagccttagcactgtgggagtagagtagaaagagaatcaggaccaggcggcatcagtttgtagtccagatttttaccttgttaaagaatcatctaattagcttcttgcctttactagaagtcagggagtgttaaccttttccgaagagcaagcggtaggttgccatggaaacgcgttgtgacgggtttctgagaaaacaagcggaagtaaggggcggagttgaggcagaagtttaggtaatgtgacctctgattggtggagaggtacctcacggtgcattccgattggtctgacactgacacatgcgcagtagaaccagaaggcgttccaaagcggctagaacggaggggagggggatgagcaatgagggaataatccccattccgtctggaatcagagggcgggcctgccgcggaggcatctgggaaacggagttcccaggcaggcgaagcccaggggccgtcaggaagtcagcggcgcctgcgcgggcgcctcagattcaggatgcgcgcgcagcgctctccgcccagcggaagttttcgctgggcaactgagaaggtgagtccgggtaactgcggaggatccgagggtcaggctgcagaagcccagaatcccaccccagtccccaagtacagaggtgaggggaagcgaggcgaacgaggggacgtcccccgaccccctagccgcagctcggccggggcgtccgtgacgtcagcacgaccgtttgtgggaggcggaggcccctgctgtcggggttcggaatgagagcggctccgggtcgcggggttcactggcctcctcttgagcttcccaagccaccttgggctccgtgttgggcatggctaaggcggagatgggcggaacttgtgggaagttcgacagctcctccgctgtgaaacttggcgtctaagtcatcccgtggtttctatggaggtgcggccgaagggaggctctgtcgtcgcctaggcaatcgccccacctgcgctgaggtggggtctgacttttagcctttttgctgtgctgtttcctgaactttctaggaggaacactatacagtagttgacgcatagcagctgttccctaaacatttgttgaataagtcaaataaattaagataaagactggcctgagggttggagtcttagggtttcaagtcctgacctggccattgcataggtgacttcagcacatccaattttattgagcgtttactatatggaaggctccgtgcaaccgatattacactactataacctgggtttgaacggtgctagtctaataggcactgttcaagcccaggttattatagcagtgtctaaaacaaaaatcctgcccagctaattcacattctcagggtggttggggatgccagacactaaaaaagaaatgttaaagaatatttacaggtctgcagtcccttatctataactttaaaatccaaaacgttctgaaaactgaaaggtctttttctctgttttgcaacttacttggcaggccaacctcacctggctttgaacttgtttgctggcaatacccactctgaactgatgtgtgactatttagaatttttaaagattttgttg

SEQ ID NO: 2916 - DNA, 6000 bp, Homo sapiens
gagcgagctgtcaatatctgggaaggagtcctcaggcagacaactttctatgcattatcctgtttagtctatacaacagcccaggacgcaggttccagaattatcaccacttcataggagagtgtggcatttgtattttccaaagcaggtcacatgactatttctggtcctgtgtgctctttggaaccttgtaacccctcctcccaggagtcagggtctctgttcctccccctttggatctcggcagagctgtgactgctcctaccaatagaggaccggcagcagtaaggccatgagacttcccaggctgggtcataaaaaacaacttgcacctggctggctcgctcaggatgctcacccatggaagccagtttccacggcatgaggcagcctaaagtagcccaggcagagaaaccacatggagaggctcaggtggagaggaactgaggcccctggccaacagccaccatcagctgctgggtgagtgggcaagtcctcagaccacttaaaccccagccttcaagtcttcctgctaaggcacaggcactggggagcagaaacaggccacctcactgtgctcactctgaattcctggcccataggatccatgggcacaagaaatggtggttctacaccagtgaattgtgggacgatttgttctctagacatagtaaccgggacagggagtccctgctgcacagagaggtcaagtcactcacttaagacggttctcatttcatgacagttcagtatgtgcagaccactgtgctaagttctcggcaggtattatctacagaaccttcccaatcacccttttcaaggtaagaatgatttcccctttggggagatgagaagcagaggctcagagagcaaatgacttgcccagggccacaaacctcttaagcggcgagccagacacatgattttgtttaatctttccctccactctatgaggtagggatgattatcccatctttgaaacctacaaaatgatgctcaaagggtgacaattctccttcccccagacctgactccactcacctagaaaacagtggggacgcagctgaaatccagaacccaaaagcccatgttcttcacctggtgccaatttatacaacgaaaacgcaaaaccggactgggttcttggggcagcaggtcagaacattcttgtagatttaaatctggaagctgatgttgggtgtggaaccacggcaagagagtcttttaaccatgtgccacccccggttctgacaccgtcaccagcctggtctaggccaccatctctcccttgtgctactgcagcagcctcctaactagactttcggcttctacgcttgtccctacaatctattttcaacccagtagcttgacggatccacttaaaatctaagtcagaccctgtctgtgtccctgccctggcccatatggtgggtcggacacggtggctcacgcctgtgatcccagcactttgggaggccgaggtgggcggatcacgtgaggttaggagttccagaccagcctggacaacatggtgaaaccccgtctctactaaaaaagtacaaaaaaaaaaatcagccgggcgtggtggtgggcacccgtaatcccagctacttgggaggctgaggcgcaagagtcgcttgaacctgggaggcagaggttgcaatgagccaagattgcaccgctgcactccagcctgggcaacagagcaagactcagtctcataaataaacaaataaataaataaaatgtaagtcagaccctgtccctcctctactcaaaaccgtatggtggatttcattttagacagaataaatgctgaaattcctaccatggcccaggagccccctgtatgatctgccacttccctgttccctctctgacctctcccacctctccccttgctcacgctgagtcagccacaacagcttcggtgcttttccccaatcgtgacaagaacgtttcttccccaagacctttgcacctgctctcccatctgcctggaacgctgtccccctaagagtgcacacagttaacttcctcatcacattctttagctctctgttcaaatgtcaccttctcagagaccttcttggacacgattttactgtgttttttcttttcttttttttgagatggagtttggctcttttcgcccaggctggagtgcaatggcacgatctcggcttactgcaaactctgcctcccgagttcaagtgattctcctgcctcagcctcccatgtagttgggattacagatgcgtgtcaccacgcctggctaattttatatttttagtagagatggggtttcaccatgttggccaggctggtcttaaactcctgacctcaggtgatccccctcagcctcccaaagtcctgggattacaggctcgagccaccgtgcctggccctggacaccattttactaatagcatgttttatcctccttaccttgctttatttttcttcacagtgcttgtcactacctgacatactctgacttactagaatgtaagcttcatgatggcggggacttttccctgccttgtttgccacagtgtgcccagagcctcaaacaggcctggcacagagcaaatgctgggtctacgtctgctgagtgaataaatcattgtctcctttgcaaaagaaaatgtgccaagaaggtgggtggggggggtccccagctgtgtcagtacacattcatctctcaggcaaatctagacatccagccagagactcaaagctcagggccggaattatctagctggatggtccctaaaaaagacgtgccacttagaagcagatcagtacaggggttaagaggataaacttgggaaataatctgcctgggtttggatcttgcttctgccatgtattgcatgatggacagagttttgctatgtcacccaggttggagagcagtggcacgacctcagctcacttgcaacctccgcttcctgggttcaagcgattctccctgcctcaacctcccgagtagctgggattacaggcgcatgccaccatgcccggctaatttttttatttttagtagagatggggtttcaccatgttggccaggctggtctcgaactcctgaacccaggtgatccgcccacctcggtctcctaaagtgctgggactacaggcgggagccaccgtgcccagccaaattttttggattttagaacctattacatattacaacaccggcgagatccaggggcaactctccataagtatatgatttgcacaacaaaatctttaaaaattctaaatagtcacacatcagttcagagtgggtattgccagcaaacaagttcaaagccaggtgaggttggcctgccaagtaagttgcaaaacagagaaaaagacctttcagttttcagaacgttttggattttaaagttatagataagggactgcagacctgtaaatattctttaacatttcttttttagtgtctggcatccccaaccaccctgagaatgtgaattagctgggcaggatttttgttttagacactgctataataacctgggcttgaacagtgcctattagactagcaccgttcaaacccaggttatagtagtgtaatatcggttgcacggagccttccatatagtaaacgctcaataaaattggatgtgctgaagtcacctatgcaatggccaggtcaggacttgaaaccctaagactccaaccctcaggccagtctttatcttaatttatttgacttattcaacaaatgtttagggaacagctgctatgcgtcaactactgtatagtgttcctcctagaaagttcaggaaacagcacagcaaaaaggctaaaagtcagaccccacctcagcgcaggtggggcgattgcctaggcgacgacagagcctcccttcggccgcacctccatagaaaccacgggatgacttagacgccaagtttcacagcggaggagctgtcgaacttcccacaagttccgcccatctccgccttagccatgcccaacacggagcccaaggtggcttgggaagctcaagaggaggccagtgaaccccgcgacccggagccgctctcattccgaaccccgacagcaggggcctccgcctcccacaaacggtcgtgctgacgtcacggacgccccggccgagctgcggctagggggtcgggggacgtcccctcgttcgcctcgcttcccctcacctctgtacttggggactggggtgggattctgggcttctgcagcctgaccctcggatcctccgcagttacccggactcaccttctcagttgcccagcgaaaacttccgctgggcggagagcgctgcgcgcgcatcctgaatctgaggcgcccgcgcaggcgccgctgacttcctgacggcccctgggcttcgcctgcctgggaactccgtttcccagatgcctccgcggcaggcccgccctctgattccagacggaatggggattattccctcattgctcatccccctcccctccgttctagccgctttggaacgccttctggttctactgcgcatgtgtcagtgtcagaccaatcggaatgcaccgtgaggtacctctccaccaatcagaggtcacattacctaaacttctgcctcaactccgccccttacttccgcttgttttctcagaaacccgtcacaacgcgtttccatggcaacctaccgcttgctcttcggaaaaggttaacactccctgacttctagtaaaggcaagaagctaattagatgattctttaacaaggtaaaaatctggactacaaactgatgccgcctggtcctgattctctttctactctactcccacagtgctaaggctgaagaagcaggaggagatgggaaggcgaaagaagtcgcccgcacagccctctgggaaatagagtcctggcgctgccgcggaggatcctgggtgcagccgctcagagaagcttctcgcgcacaggaagtcgctgcgaggaggcgcgtgtgcggggagttgaatctcccgctcccttgaggctggggttgcgtctgttgacgcggccgactacaatcccgaggtacggagacgctggggctgagggacttgcgggctcggtccttcctgagaggtgacggaatgcaagtgggggcgacttcggcaaagggtgcgtcgccttgggcggcggttgtcagggtgaaggtgtgaaccgtctttcacagtctgttatgaaaaccgctcaaggtctgggcacggtagatcacgcctgtaatcccagcactttgggaagccttggcgggggggatcacttacagccaggagttcctcgaacccccagtctctactaaaaatacaaaaattagttgagcgtggtggcgggggcctgtaatcccagctactcaggaggctgaggcaggagaatcgcttgaacccaggagctggaggttgcagtgagccgagatcgcgccattgcactccagcctgggtgacagagcgagactacatcttaaaaaaaaaaaaaaaaaaagaaaggaagaaaaccaccttgggaggctgaggtgggcggatcgcttgagcccaggatttcgaggctagcctgggccagatggtgaagccctgtctccacaaaagaagaaaaaaatagaaaaattagccgggcgtggtggtgcgcccctgtattcctagctaattgggaggccgaggtgggaggattgcttgaacccaggaggcagaggttgcagtgagctgagaaagaaaagaaaagaaaagaaaactgctaaaggggtttccaggcctccctgatggccctgagaggagtggttctgttttattttggttttggttggggaaggaggggaatgagttacctgaagttggcaaatttaggcagaatcttgctggacgatggatgggagttcttcgggaagttgaagtacttaacatttacagtatttgagtgctttctgtgtgccaggcgccctgctggagttgcatttcctcttctgatccccgcagcagcactgagacataa

SEQ ID NO: 2917 - DNA, 6000 bp, Homo sapiens
gaggatcaggctagaggcgctattgcagagaaaagttgccaaaaaggcttttcagaggagttagcatttgaatcaaagtagggataacatataagtattgagcacgtgctgtatgccaggctctattccaagtgttggcatatggggcaaagaacaaagcagatcaaaccccgtgccccaaaccttgtgctcacctggggaaagagtatcctaaggagatggggatgcagcatgtgcggaagcctgaagtggagaaagagctcgggctgtctcacgtgatggctgcacgctggtgtggctgagagaacaggggggaaggggacaagggataatcctggtgagattagacccccatttgggccaggaggggagggactagcagctgaagggtcacagggctcaagctccccctcccgctgccgcccttagatcatgctgctagagacagccaggcgctacaaccacgagacagagtgtatcaccttcttgaaggacttcacctacagcaaggacgacttccaccgtgcaggtagggcccaggggaggcttcggggaggcttggcgcccctgctggctggaagacctggggccaactcatccctgttggagtctctgtttctttatctccaaagttggggtgagggttgagccaaggtgagagtgaggtaagagtgcatgtgccacgtgtggtggtgcacgccaatagtcccagccactcgaggctgaggagggcagattgcttgaggctatagtgagccgtgattgtgcgacggcattccagcctggtgacagagaagaccgtgtctctattttttaaaaaaagcatgtattgagtgccgactctgtacattgggttgcagtggaagttgagatgggaggagccctgttaccacatcaggcatcttggtgggcattaggaaaagcattccccgcccccgccaaaacgtggtctcacccaagggaggcgggctggagctcggtccattgtgaagcgggcagccttctttactgtctaggggagcactgcttcctgccctctgagagcgctaacctgcgtgggtgggcttctggaagaaggcctgggcagtgagaggcactgcctaggaaaagggtgggaggagcattgctagtgctgcagagcatgcaccagggcctcgctccctcattgtcccacaatctctgggggacctctctgtatttcccgacatctgtccaaaccccaccctctccccttcctcttactccggccctttcaccacccgagacggtcccagtaacccttttagtatgagcttagcagggcagggctgcagggaagcgtttctggcagaggagattggcgattgcagaggccctgaggttggggagagctggtggtttggaggaactacagggaggcccaggcagctggagcacaaggagatggggtggagaggaggtcgggaatcccaccctaccccttcccagccgctcctctgccaccaccctggaacactgccagggtccccttgaggggccgcctgcctccacccctgcctgatggggctgctcacagcacaggcagaagggtcctgtcagcacttaaggctgcccacttccctcctccgctcagaaccctccgcggctcccgtctcactgggagaagagctagagtcctctctgtggcccacaaagccctttaggacctggcctcgctcactctctgccctcagctctcaccctctccccctgttccagccactctggcctcttactggcacccatccagcatgctgcagccaagggcctgtgtacttggagtttcctctgcccagaactagggggaccaactggtcctagtttgcccaggaccttcccagttttaacactgaaagtctcatggcctgggtagcccccgtcccaagtcatgggaacagcagacgttggtcaccctcacaatccctcatctccttcggattggtcactgctccagcgtcacccagagcgcagccttccctgcccgccttgtgtaaaatagaaccatggctcagcagggcccttcacacttctctgcactgcctggttccattgaactcacagccctctgacaggctgggcctcttcctaatgtgtttgtctatgaccggtcccctaggctctcaaatgtaagtgctggagcctggcacgtggcaggtactcagtgacatttgatgactgaatgaacaagtcagttttgggaatgagtttgggctttaccttgagcagtggaagccagcgctgggaccagcacgatgtgacctaggttttaaaagcttccctttgcctttgtgaaggggacaagaatagggactcgggaagctgcagccaccgcccaggtgggaagggagggtggtgataggatagtagaaaatactgaagaaacatgcaccctcattcattccttcactgggcagcatgtgtggcacacctactacatgccagcactcatgggcacggggcacaggtggacagaaatgacaagaacgctgtaattactgctgtgttcccagccccagagactgtgggcagcgccagggtccaggatgtggggcacggtttcgggctgagggagtcacgggctgcctcccgccccgcaggcctgcaggtggagttcatcaaccccatcttcgagttctcgcgggccatgcggcggctgggcctggacgacgctgagtacgccctgctcatcgccatcaacatcttctcggccgaccggcccaacgtgcaggagccgggccgcgtggaggcgttgcagcagccctacgtggaggcgctgctgtcctacacgcgcatcaagaggccgcaggtagggccccgcagagcctctgcgcagagccaactacgtcccgcggcccacgtggtccgttcaggctgggttctgccagccacactgccctcccctccgcagagtctttcctcaggccccaccctgctcgactgggagccaggtctagtccaagcacagaggcgggccccacgctggctcccacgcctggtcggggaggggccctcctttctgttggggtgggcctcccaaagcctggcagggcaggggctcagccagcgcccacctgcctcctccctcaggaccagctgcgcttcccgcgcatgctcatgaagctggtgagcctgcgcacgctgagctctgtgcactcggagcaggtcttcgccttgcggctccaggacaagaagctgccgcctctgctgtcggagatctgggacgtccacgagtgaggggctggccacccagccccacagccttgcctgaccaccctccagcagatagacgccggcaccccttcctcttcctagggtggaaggggccctgggccgagcctgtagacctatcggctctcatcccttgggataagccccagtccaggtccaggaggctccctccctgcccagcgagtcttccagaaggggtgaaagggttgcaggtcccgaccactgacccttcccggctgccctccctccccagcttacacctcaagcccagcacgcagtgcaccttgaacagagggaggggaggacccatggctctcccccctagcccgggagaccagggccttcctcttcctctgcttttatttaataaaaactaaaaacagaaacaggaaaataaaatatgaatacaatccagcccggagctggagtgcaagatggagagggcgcgggcttctagggacctcagtgacactgggtgcccgaacctgattgagcaggtgggactgggtgtccccaggctgttgggaaaagggtggcacatagggtcccagtgttgggtggtgtgtcgcctgctgtgaaagttcaggacagaggcctcagcctcagggtcacctccctggacaaggtgaatcagaactcacccttgaaggataaacaggatttaagtgaatgaggggacctggacttctgtccgaacaacaagtgtttgctgaggcctcctgtgggccaggcactgggttggccattctagagatggagacattcacccaataaatgtttccagagcattaactacagttaggcacaattctaggcactggaaacatctgtgaacaagataaccatcctcctaccaagactcgggggatagggactttaatgagcgtggcactgtggtggggctagaggaaatcagggaaggtatcacaacagaggcaatcgctgggacctaaaacaagagcctgggggctgggcctccaagttgagggaacagcacgtgcaaagtttgaaaggagagacgccaggagttcggagcgaagcgacgaagttcctccaatccttcctgcccctgtgccagccctgaaggagctgaatgagcaattccaatcgagggcgaaaggggggttggatggagggatgcaacttaaaggtgtatttatttggggcggggaacagcggaagtgagagtagttaccaatgatcaccttatcctaagagtagtgtaccgggcgccccacaagtgtccctatcatgcgttgttgagtctaatttacgtatagggaaactgaagctaggatgaaggagaacagatcaagccaggactctaccgcttatcggccagcctctgcggggatcttgggcgtcaggtcaccagctggctgctgggcagcgacggggcagcgctccctacacggccccgggcgagaggcgggcggggggacgcggaggatgcgcgcgcaacacccgagggtgggaggagagagaacagaaccgcggcgcgcccagaccgcacgaggtcgtgaaggtagccgcgcggaggggcgtggcttcgggcagacaggtcatggggaggcggagttaagggaatttttcagcaagggggcgaggccacttcggaagctgagagagggggcggggcctgccctgcagtcgaacaagcggggcgtggccttgcccgcacttgggcaggcgggggcgtggcccgtctctgagcgccgcggctctgggcttgcgcgcgcgggagtcaggggtcacggcggcgtaggctgtggcgggaaacgctgtttgaagcgggtgagtagaggggaaaaagggagttcggggcagtgggcctggtagggaacggggcttgagcagccaggcacatagatctgagagacggttgcgagggcaccctttggcccgggggcgcgcaggagagggcaggggccaggggtttcctgggcgagggcgcggggacgagcaggaaaaggccggggtgggggtggaattcctcggcgggcagggggcgcatgcgccgggcaccgtggggcgggacgtggcccgggaggagctggggggactgggtggtgcacgtgcgggcttggtgtcatcctggattcgctgggtgtttgagtactctgtgccaggcacttttctggaagcaggaacaagtcagagaagtccctgtctcgggaagacagacggtagacaagtgatgagttttaatagatcagtaaagcagtgctctggggctgtgagatgctctcagaaggaaactaacgcagggtaacgtgataatgagcgaagagcctgttgctttagctggagtggtccagaatcgaccgctctgggaccctcaagtgcaaagccctgaggtggaaggagcttggcgtatttgtagcaggagccgaggggacgagagaaacacagatgaggtcggagtcatgatggggaactagatcctatagggccttgtaaaacttggtatggaatttctcctttattctaggttcagcggggagccgtgggagggtttgagcgtggaaacaacacgattcgccccatgttttgaaaaactcaccactgagtggaaattggattgtagcaggaataagaatggaaggagggagatctgttaggagggagagcgtcctgcaggcagagaatcaggctccggttacctttgcgggcggagacagggggactggctgatggactgggcgtaggagcaaggggaagagtccaggatgactcctgggtttgtggtttgag

SEQ ID NO: 2918 - DNA, 6000 bp, Homo sapiens
tcctcaaaccttctgtgagctctgctgcttggagtaaaacagcatttacctccccatctgcgaggcccaccccagcgctgtttcctgcgcctggcccctcactcactctactctgcctcaagggcctggctgctgttcctgaacacaccaggcacactctggcctcagggcctttgcactggctgttcctactgtctggaatgcttttcccagagatcatcccacaactctcacctcacttcaggtctctgatcaaacgtcaccccggggaggccttctctgccaccccacccatgccactttccctcttgtactctggggagtggcagtggacacccagaggactaggagagaaacagccatctcagagctgatcagggaagtgggggactccacctgccatgagggtgaggcagagccttgctccttatggcaatggaggcgaacaggctgatggtgagaaggcagcagggaggctgacggtgtgagccccaagagtaggggcaagagctgagaggcagcaggacatgtacagaggggcagaacgtcctggcgggggaagcggggtacctgcggcattgtccatgttctcacacaggtcggccagcagctccagggccccctctcgctcttgctggtcggccgcctgctcggcctccccagcagtggggggcatgggctgtgacagcactcggaggcagctcttcatctgctccacctcctcccgctggcctcggaaggcagccgacatggcctcctgcagccactgacgcctctggagaccaaggcgaggaggaaagaaggagatccatcagtcattcattacaaaggaacagccattaataaagacagccaacaactgagggctgatgttccttcagtcaacaaatatcggctgggagctgtggctcatccctgtaatcccagcactttgggaggccgaggtgggtagactgcctgagctcaggagtttgagaccagcctgggcaacatggtgaaaccccgtctctactaaaaatacaaaaattagccaggcctggtggcgtgagcctgtaatcccagctactcgggaggctgcagcaaagggaatcgcttgaacctgagagacagaggttgcagtgagccaagatcaggccactgcactccagcctgggcaacacagtgagactatctcaaagaaaaaggagatgagagctaatacgtgactgctggaatttttgggggtgagggaggggagcagaggtctccttagtcacagttctaagtaaatttgagtgagctatttaatgtttctgtgcctgtttcatgcctcactgttgtaaaggttcaatgatatcatatatgtaagtgggttagcataatgctctgtatacagtaattgtcgattaaacattatatataatagctatcgctatgaatctgcaaaacaactctatgaggtatatatcattgttatccccacttcgcagatgagaaagttgagtcacagaaaggttgagacttacccaaggtcacacagtcagcaattggcaaagcctgaaatcaaacccaagcagtctaggctgggcgtgctggctcacatctgtaatctcagcactttgggaggccgaggcaggtggatcacttgacgccaggagttcgagaccagcctggccaatgtagtgaaaccccttctctactaaaaatacgaaaattagccaggcatggtggcccatgcctctaatcccagctactggggacgctgaggcatgagaattgcttgaaccgggaagtcagaggttgcagtgagccaagactgcgcctctgcactccagccgagactgtgtcctccacccccaaccctgcccccaccaaaaaaaaaaaaaaaaaacagcagtctgactacagagcctgtgctcttcatgaaaacacactgctgccttcagaagcactgtctgtatgctgggcactgtgtgcagccctacttaaagtagaacctcagaactaccctatacggtagttattattattatcaatttgtaaatgaagaacttgagattcagaaagatgaagtaatatacccaaggtcacacagctggaaatgctgaatccaggttagtctggctctggagaggatatgtcccctcagactctcttgagatctgaccttcagtcaacgataaccccatctagcacaatttatagcccacaatgcctccacacctggttttctgcctcccacccaagaagaccctagtcttcttgtggctccccaagtcacacttcccaaggcaactctatctgtccccaggcccctcaccccagcttcttgggtccccatcctttacctcctcactcatcggttctggaggagggtctggctcttcagagcccgcggtgatggccatctgcagcaagccttggaggttgcgtgggggccgggaattgcccgagcccccagccgaggagccgccgccgccgccccctgaagagcaaccctgggaggccgggggcagcgccaggggcaggcggctcccccttgagccttcgtctgacatgggccgtttgtgaagaagggaagaatgtgttagagggagaaggtggtcaccgctgaagcagctctggcgtcctgatgggtcgattcttgagggtctgctgagaaggcggcgtttcaggggagctcggcgaccccccatgaccccaaaccactctgcccccagcccacttaaccacagccccttttccttccttcatacccacaggacccttccccaaagtcataagcctctcctttctccctagcaacaggccccacccactctccctggcaacaaccccccttccccatctccactgcgtgcgtcccgtctcttagcaacctcactgctccgcctccgtagcaacaagcccgccctttggtctccttagcaacaagtcttctccctcctctccgaagaggggcgccggaataaggcggatctcacctccccgggtcctcaagccgccgctgctcctacagacaaagtcgtccgcacctgactctgctgggcgccgccatcttaaccggaaatacgcacggtttcacccggaagtgccaggcgtacccacccaacttcgtgccgtggttgcggctgaagctgcttgcccgactcttatccccttctcacctggcgggatactgcactcggccccgcccctcccatccgggccccgcctccaagctgggacgccccttcgtgcgggcgccgccccttcacgctcaagtagctggtcaaagccctgcccctggcccagttttcgcacctcagcgagtcccgcccccgatacttttgcaagctccacccctcttctaacgtgtgccccgcccccaggtctgaccccgcccaccctacgattcccgcccctgctctaggcctttcagactctcccagttgggccccggcccctttacaggcccctcccactcattgctgtcagtcatccttagaaggtttgggacctcgccccaactaatctgactttcgcctccaccggggccaccaaccccatctacaggagccctggggtcgcaaccgtaatggctggcctgtgagccttatgccccccgcaacccctctctcggcctcagtttctccatctgtcaagtggagctgcggcgtggatccctctcatcacccagcctctccctcatggactcttccccatgtcctgccaggtggagaggagaggattcttgaggcctagagccggaaagcaaagtgccccagagcccagcaagattcagagcgccagaggagccagcttggtggggaggcccgaggcctctgtgctccagaagtggggtttaggcctgggcacgtgctggtgcgggccgatctgcagaggtgttggccctgggctgggcttaaagaaactcccgtgttgatcctggataggaggcgttttcctccaggaaaaggttgtgctcaacgcaaaacgggcacacagtcacaaacgtatcaatcacctgctgggcgtggttgtgcagggggatattttgggcagaaacaggaagaccaaacagataggttgtgtgtgtatgtgtgtgtgtgtgtgtgtgtgtgtgtgtgtgtggtgtttctagcactgtgctgtgagatgcatctgggcctgtggatgtgctattatattagtttcctattgctgctgttaacaaattactaagaatgtggtggcttaaaacagcacacatttattatcttgcagttatggagggcagaaatccaaaatgggtttcacggggctgaaatcaaactgtcagcaggattgcatcacttctggaggctctcggggagaatgtttttcttgccttttccagcttctagaggccacactctttctttgacaggtggccccatcaccccaagttctgcttccaccttcccatctccatcactgactgctcctcctgcctccttctcacaaatactcttgtgattccatcgagctcacccaaataactgggataatctccctatctcagtcacatgggcaaagtcccttcagccatgcaaggtaacttatgcacagatcctgggaattaggacacggacatctatgtacaagtctatcagtttataatacatggccgggggcagtggctcaggtctataatctcagtactttgggaggccaaggtgggaggatcacttgaacccaagagctcgagaccagcctgggcaacatagtgtgtccccagccctacaaaaaaatacaagaattagccatgtgtgatggcatctgcttatatcacagctaggcaggaggctgaggcaggaggatcacttgagcccaggaggtcgaggctgcagggaactatgactgccctactgcaccccagcctaggcaacagggggaagaccctgtctcaaaaaacaaaacaaaacaaaaaaaagagggtgatcatataatttttcatctatagcaagacatttgagagcaaaaagggactcaatagttacagaaccaggccaggtgtggtagctcacgcctgtaatcccagcactttgggaagctgaggtgggcaaatcacaaggtcaggagtttgagaccagcctgaccaacatggtgaaaccccatctctactaaaaatacaaaaattagccaggcatggtggcgggtgcctataatcccagctactcgggaggctgaggcaggagaatcgcttgaacccaggatgtggaggttgtagtgagctgagattgtgccactgcactccagcctgggagacagagcaagattccgtctcaaaaaaaaaaaaaaaaaaaaaaaaaaaaaaaaaaaaaggctacagaaccagcctggctaacagggtgaaactccatctctactaaaaatacaaaaaaagccggacgcctaaaattgtaccctgctcaacaggcccctcttaacccccttccctgctgtagtcacctcctcagcacggacatgattatctaacacaccatacattttgcctattgaccttgctgatcatctgtttcatccaccagcatggaagctccacaggacaggcctttttgctgatttaggtcactgccacgttcttaccaacaggaacagtgcctggctgagatttggcactcattaaagatgtgtggactcaaggtgttgaatgggggactgggaaatctcacaggagccaataggctcctgtgtgcactttattttattttatttttgttagagacagggcctcactctgttgctcaggctggagtgcagtggtgcaaacgtagctcactgcagcctagaactcactgactcaagcctcagcctcccaagtagctgggactacaggcacatgccaccatgcccggctaatttttaaaaaaatttttgtagggatggggtctcactgtgttgcccaggctgatcttcccacctctgtctcccaaagtattgggattacaggcatgagccaccttgcccagccctgggtgtgctttacaggggacttgagaattaaatgggtgtctaaca

SEQ ID NO: 2919 - DNA, 6000 bp, Homo sapiens
agcccccagccgaggagccgccgccgccgccccctgaagagcaaccctgggaggccgggggcagcgccaggggcaggcggctcccccttgagccttcgtctgacatgggccgtttgtgaagaagggaagaatgtgttagagggagaaggtggtcaccgctgaagcagctctggcgtcctgatgggtcgattcttgagggtctgctgagaaggcggcgtttcaggggagctcggcgaccccccatgaccccaaaccactctgcccccagcccacttaaccacagccccttttccttccttcatacccacaggacccttccccaaagtcataagcctctcctttctccctagcaacaggccccacccactctccctggcaacaaccccccttccccatctccactgcgtgcgtcccgtctcttagcaacctcactgctccgcctccgtagcaacaagcccgccctttggtctccttagcaacaagtcttctccctcctctccgaagaggggcgccggaataaggcggatctcacctccccgggtcctcaagccgccgctgctcctacagacaaagtcgtccgcacctgactctgctgggcgccgccatcttaaccggaaatacgcacggtttcacccggaagtgccaggcgtacccacccaacttcgtgccgtggttgcggctgaagctgcttgcccgactcttatccccttctcacctggcgggatactgcactcggccccgcccctcccatccgggccccgcctccaagctgggacgccccttcgtgcgggcgccgccccttcacgctcaagtagctggtcaaagccctgcccctggcccagttttcgcacctcagcgagtcccgcccccgatacttttgcaagctccacccctcttctaacgtgtgccccgcccccaggtctgaccccgcccaccctacgattcccgcccctgctctaggcctttcagactctcccagttgggccccggcccctttacaggcccctcccactcattgctgtcagtcatccttagaaggtttgggacctcgccccaactaatctgactttcgcctccaccggggccaccaaccccatctacaggagccctggggtcgcaaccgtaatggctggcctgtgagccttatgccccccgcaacccctctctcggcctcagtttctccatctgtcaagtggagctgcggcgtggatccctctcatcacccagcctctccctcatggactcttccccatgtcctgccaggtggagaggagaggattcttgaggcctagagccggaaagcaaagtgccccagagcccagcaagattcagagcgccagaggagccagcttggtggggaggcccgaggcctctgtgctccagaagtggggtttaggcctgggcacgtgctggtgcgggccgatctgcagaggtgttggccctgggctgggcttaaagaaactcccgtgttgatcctggataggaggcgttttcctccaggaaaaggttgtgctcaacgcaaaacgggcacacagtcacaaacgtatcaatcacctgctgggcgtggttgtgcagggggatattttgggcagaaacaggaagaccaaacagataggttgtgtgtgtatgtgtgtgtgtgtgtgtgtgtgtgtgtgtgtgtggtgtttctagcactgtgctgtgagatgcatctgggcctgtggatgtgctattatattagtttcctattgctgctgttaacaaattactaagaatgtggtggcttaaaacagcacacatttattatcttgcagttatggagggcagaaatccaaaatgggtttcacggggctgaaatcaaactgtcagcaggattgcatcacttctggaggctctcggggagaatgtttttcttgccttttccagcttctagaggccacactctttctttgacaggtggccccatcaccccaagttctgcttccaccttcccatctccatcactgactgctcctcctgcctccttctcacaaatactcttgtgattccatcgagctcacccaaataactgggataatctccctatctcagtcacatgggcaaagtcccttcagccatgcaaggtaacttatgcacagatcctgggaattaggacacggacatctatgtacaagtctatcagtttataatacatggccgggggcagtggctcaggtctataatctcagtactttgggaggccaaggtgggaggatcacttgaacccaagagctcgagaccagcctgggcaacatagtgtgtccccagccctacaaaaaaatacaagaattagccatgtgtgatggcatctgcttatatcacagctaggcaggaggctgaggcaggaggatcacttgagcccaggaggtcgaggctgcagggaactatgactgccctactgcaccccagcctaggcaacagggggaagaccctgtctcaaaaaacaaaacaaaacaaaaaaaagagggtgatcatataatttttcatctatagcaagacatttgagagcaaaaagggactcaatagttacagaaccaggccaggtgtggtagctcacgcctgtaatcccagcactttgggaagctgaggtgggcaaatcacaaggtcaggagtttgagaccagcctgaccaacatggtgaaaccccatctctactaaaaatacaaaaattagccaggcatggtggcgggtgcctataatcccagctactcgggaggctgaggcaggagaatcgcttgaacccaggatgtggaggttgtagtgagctgagattgtgccactgcactccagcctgggagacagagcaagattccgtctcaaaaaaaaaaaaaaaaaaaaaaaaaaaaaaaaaaaaaggctacagaaccagcctggctaacagggtgaaactccatctctactaaaaatacaaaaaaagccggacgcctaaaattgtaccctgctcaacaggcccctcttaacccccttccctgctgtagtcacctcctcagcacggacatgattatctaacacaccatacattttgcctattgaccttgctgatcatctgtttcatccaccagcatggaagctccacaggacaggcctttttgctgatttaggtcactgccacgttcttaccaacaggaacagtgcctggctgagatttggcactcattaaagatgtgtggactcaaggtgttgaatgggggactgggaaatctcacaggagccaataggctcctgtgtgcactttattttattttatttttgttagagacagggcctcactctgttgctcaggctggagtgcagtggtgcaaacgtagctcactgcagcctagaactcactgactcaagcctcagcctcccaagtagctgggactacaggcacatgccaccatgcccggctaatttttaaaaaaatttttgtagggatggggtctcactgtgttgcccaggctgatcttcccacctctgtctcccaaagtattgggattacaggcatgagccaccttgcccagccctgggtgtgctttacaggggacttgagaattaaatgggtgtctaacacttgcgggtacatgacatagagggatctatggtttatgcggaaagctaatgggggcaggcgggttactcacaggcagagcacatgcttgtggacctgctacagtggggatgtatgggctgtactggggtccacatgaagatataaaggaccctatgacgagcacagagaatatatgggggtctaaaaacataacacagggaaactgagggggttctggaagcttctctgtaaagagaatccaaaatcactctgggctgtgggtagatatggggccttgacattggtggggacacagacttacccttaccctgaatgggtggccttagggggctggggaaacagacatgaattttgggtcagcaactccaagaattctttcccctctctgtctctgtctccctccatatgtccccacctctccccagcacgtgtccctccacctgtgtgtacccccggccctctctacagctccatctgcgccccctctcccccacctctctggttggtcttcctctctctgtctctctgaatctctgactctctccatccctctgtcggcttccagcagctttctctccctctccctgtctgttttcccggcttgccattccttccttctcttctgtccctgtccatctctgcccttcctccctctctgcctcagcctgtctctggtggtctccatccctctggcgtctctgcctgtctcccgtctctgtgtcagccagcatctctctttgtgtatctccatctctgccccatctgttgggtcctctctctctctctccatccttccctccatcctctctcctgcatcctcccacctcctctccatccctccagctggaggcccgccccctgccccccctcgctccccctcccccctccgaaagggttaactttggggaagggcccggagtccccggatggtgatgtcagcgtgccggagagaaaggacgaggtggcggggggaggcggagaggaggaggaggcggaggagagagggcgcgtgggggggcgggggggacctcggcctgcagcatccgccggcccgcacctcagacccccccggcggggggaggcgcaggaagcggggggccggccagaaacgggctggggagggggggccccgcagcccccctgggccatgctgactcccggggcctgacccccccgggccagccccccctcccccagctccgcggcccgccgactggggggggccagcccagccccctggggacccccggagaggtggggggcagccgggggggccgggacggagcggtcgccggcccccaccggagagacggggcgacggccgcagggggggcggccgggggaccggtcgggccgggaccaagggcaccatgtcgtccggggccaaggagggaggtgggggctctcccgcctaccacctcccccacccccacccccacccaccccagcacgcccaatatgtgggcccctatcggctggagaagacgctgggcaaaggacagacaggtgagcctagcagaaggggacacctggggcggggggcagggtggaggtggcggcagaggcgggactcagggtattcaaatggcaggggctggctgcccagacccctgggcccctcatagagaagggacttgggattcagactcctgggtccctggatggagggggtggggggcgcagactcaggtcctggaggagaggggctgggggcctggactcctgggtctgagggaggaggggctgggcactggactcctaggtctgagggaggagggcctgggggcctggactcctgggtttcagggaggagggcctgggggtctggactcctgggtttcagggaggaggggctgtgcttggactccggagtctgagggaggagaggctggtggcctgcactcctgggtctgaaggagaagggcttgggggcctggactccagggtctgagggaggaggggctgggggtctggacttctgggtctgagggaggaggggactggggtcctggacttttgggtttgagggaggagggactgcggtcctggactttcaggtctgagggaggagggcctgggggcctggactcctgagtatgaaggaagagggtctggggtctggactcctgggtctgagggaggaggggcaggggtgctgaactcctgggtctgaaggaggaggggctgggggcctggactcctgagtctgagggaggagggcggtcggaaccttgagtgttgggacagggagtttggggccccagtgctccagtccccataggggcagaggctggaggggctccagggccagggaggggatggaggcggcctgcagagtggggccgggctgggacctgaggttcttgctgcagtacagctgcagaccggggtgcagtgcatccatcctgggaaacctcttccctccccact

SEQ ID NO: 2920 - DNA, 6000 bp, Homo sapiens
ttggccaggctggtctcgaactcttcacgtcaggtaatccacctgcctcggcctcccaaaatgctgggattacaggcgtgagccaccgcgcccggcctggaaactttttataatagacaatcacaaacgtgcccaaaactggagagaaagtaagaggaagcctcacttacccatcgcccagcttcatccatgatcatcttagggccaatctgatctcatctctgtcccttacatactcctccccaacccaaattagtttgtaggacatcccagatgtcatattagtttatctgtaagtatttgaatatgtacaaagtgagctattttgaggtaaagctgatatgcagctggttcttaaaatccttggttcctgtcttgggaccttcccacccttgaaccaaactcctcaaggtttaagggttggtgtctggggagagagggagtgtaggattctgcagttttcatttggcctggtcattaactgggtcaaacttgttaaatacgttgaatatctccccctagaggccagggtttcaatatcagggttttgacaatcttgtcaacaggaaggtgtggaaaatttaaacagggccgggtgcggtggctcaagcctgtcatcccagtacttcaggaggccgaggtgggtggatcacctgaggtcaggagttcgagaccagcctggccaacatggtgaaaccccatctctactaaaaatacaaaaaattagccgggcatggtggcgggtgcctgtagtcccaggtactcggaaggttgagacaggagaatcgctcgaacctgggaggtggaggttgcagtgagctgagatcgtgccattgcactccaggatgggtgacagcgagactccgtctcaaaaaataaaaaaagacaaaaaccgaaaatttaagtaggtggcctttttatcatcaagctttacccaaagtctgagtccctctaccgtgatccccaccccatctccaaaaacacatcttagtgagagagatgcgcaaatgaaggaggctaaaagatgaaggcattcattttgtacctgaacagttagaaaaacgttgcacatttaatatctgatttggaggctaaagtcaattcaatgaaaaaaataataacttttcttttttttgagacagggtctcactctgttgcctcactgcagcctcaacctcctgggctcaagcaatcctcctaccacagcttcccaagtagctgggaccacgggcacacgccaccacatccagctaattatttttattttttggagagatggggggaatctcactttgttgcccaggctggtctcgaactcctgagctcaggtgatctgcccgccttggcctcccaaagtgctgggattacaggcatgtgctaccatgcccagccaaaaaaaaaatctttaaaagtggacacataggccaggcgcagtggctcatgccttgagcccaggagtttgagacaagcctgggcaacatagcaagaccctgtctcaataactaaactaaactaaaaataaatgaataaataaataacccttactcaacccttacttcacaccatatacaaaaattaacttgaaatggatgccagacctaaatgcaagagctataactatacaacttctagaaaatatacagaagaccttagtgaccttgagttgggcaaaagtttcttaaataggacagaaaaagcatgaggtgtaggccgggcgcggtggctcatgcctgtaatcccagcactttgggaggccgaggcggacggattacgaggtcaggagattgagaccatcctggctaacatggtgaaaccccgtgtctactaaaaatacaaaaaattagccgggcgtggtggcgggcgcctgtagtcccagctacttgggaggctgaggcaggagaatggcgtgaacccgggaggcggagcttgcagtgagccgagatcgcgccactgcactccagcctgggtgacagagcaagactccgtctcaaaaaaaaaaagaaaaagaaaaagcatgaggtgtaaaataaaaaaatcaacaaactggaatttatcaaaatgaaaaatcttttgcttttcacaagacttataaaaatgtaaaaacatggcacagacttggagaaaataatttaaaaatgtatactgatgaaagacttgcatctagaataaacaattctttttttctttgttaaattttcccccttgttcttgctgtcatcatacagaataatttttaggaataattttgttcctagagtaatctcttgttcctagaataaaaaattgttacaaatcaataataaaaagactaaatcaaattttaaaaaataactgaattaaagatgggcaaagaggccgggagtggtggctcacgcctgtaatcctagcactttaggaggcctaggcgggcagatcacctgaggtcaagagttcgagaccagcctggccaacatggtgaaaccccgactttactaaaaaaatacaaaattagccaggtgtagtggtgtgcacctgtaatcccagctactccggaggctgaggcaggagaatcaattgaacctgggaggcagaggttgtagtgagccaagatcacaccattgcactcctgctgggcaacaagagcaaaactccatctcaaaaacaaaacaaaacaatacaaaaagggccatgtatcgtatgattccatttatataaaacgtctagaataggtaaatccatacagacagaacataggttgccgggggctgggggcaggaggggaatggggagtgactgcttacttaatgggtacagggtgagaaaatgttctaaaattccacagtggcagatgtataccactgcaaatatatcaaaaaccactgaattacacactctaaaaggaggaattttctggtgtatgagttatgtctcaatgggataaaggtttgggggccgaccacatggcttttgctcagccctccacatgcccccaagggcctgtctgctgggcagccctcagcccctcctccccctcaagctgcccactcaccagatggagtagctgtggcagaagtccagcgcagacacaatctggcggaagaactttcgggcctccttgggcgtcagtctccccttctttaccaggtagtcgaatagctcaccccccgagacgtgctccagaaccaggtacctaaaggatatagagggggcagagggctggaaggggcatgtggaggaccaaagggcctggtctcccacttccactggctcctggtggcagagaactccaattcccatgatccttgggagaaagagactccaattcccatgggtccctgggaggaagagactccagtttccattaattcctgggaggaagagattccagttcccatcactccctgggaggaagtgactccagtttccaccagcctctaggaaaccaaactcaagtcccattagccctgggcagtagagcctcccatgtcagcttcagaggggaaccaacactttgactcataatggtttcaggagataaggcgactctattagcacctgaaggtcaaagaccccaattcttataggaccctgggaagtgaagatacccctactcctattagcccctagaaagccaagcctctaattccctctggagtgaggaaactcaaatttgaattcattttcgagtattaacgattgcaaggttgcaccagtccaagccagcttctgtgaggcaatagacgacaactcccatcagcgcctagaagttaaaaacccccacttctggccagacacggtggcttatgcctgtaatcccagcactttgggaggccgaagtgggtggatcacttgagatcaggagttcaagaccagcctgaccaacatggtgaaaccccgtctctactaaaaatacaaaattagctgggcgtggtggtgcgtgcctgtaatcccagccactcgggaggctgacgcaggagaatcacttgaacccaggaggtggaggttgtggtgagccgagatcgagccattgcactccagcctgggcaacaagagcaaaactctgtctcaaaaaaacaaaacaacaaaaaaacccccaaactcccttcccataagcctctgggacacggggttccagtttccatcaaccatttttttttgttgttgttgttgtttggagtttttttttttttttttttgagacagagtcttgctctgtcgcccacgctggaatgcagtggcacgatcttggctcactgcagcctctgcctcccaggttcaagcaattctcccacctcagcctcccaagtaggtaggactacaggtgtaccaccacactcagctaatttttgtattttttgtagagacggggttttgccatgttgctcaggctggtctcgagctcttcaagaaatccgcccatcttggcctcccaaagtgttgagattacaggcatgagccaccgcgcctggccccaaaagctcaatttctatgagctcttagatggctgggattcctgcccgaagcataaactcccatggccctgcctccctacgccaagagtggagtgggagcgaccatgcaccggtccggacaatagcccctccctaccaccacacctgggaaagcctgagagcaggtcccatgagcgccgggcagacagcttcccgtgtggtgaaacctgcgccagcatcgacggacctgatgtcagttcatccgggggactgggtgccgggggggaacacgagggctgtcccctctccggcttcccagcccagctgtcctttgggtcaccagagtttggacaaagaggcccattctctggagtctggacagctggacccccacccccatccttcctggcgggtgattgactttgagatagtgactcagacctcctaaggcggcccattgttggggtgtccagccacggcacccgaagttatgccgggggaggaggggggctctccagtgctccagagttggggtttgggaagatcctttgggctttgctaggccccttgccttacaaacaggaggcatctgcccatagcagattgggtctggtcgagggcaccctgcttgtctagcagagcgcattccatgcagtgccacagggcgaggagctggagctggggacacggtaggaggatggttgcccttggcctcaggcccaacacagcgtgacaacagtggggttccctgtgtgtcaggggcttccctgtgcaacaggcaaggaactgggccttcagcggtccagcctggagagctgcaggtcccccaggtccccctaggccctgtttctggagaagtcccaccctggtaacctggagagggaggatggggtagggctgggtgtctataaatacctacaaatatttcttgttctcgtagacgtcgtggagcttgaggacatgtgggtgttcgatgagcttcaggatggcgatctcccgctccacctgagggtcaagaggggtggggacacgggaaaagaggtcagcacggccccgcccctgccctcagccccggaggcccccccacccgcaggcacactgcagcaggcgcacacaccttcatcagcaccgactccgacagcttctcccggttcacgatcttgatggcgaccttctgacccgtgatgcagtggaccccgagtttaaccagccctgcaggagcagggtgaaaatgtggggtgttccgccgggtccccttcgtccccagcgcctatgtccccccttggccaccctgtttgctccttcctcctgggctggctgtttaacaatggcctgaacacatcagacctgaactcctggggctgagagcccacactcccacaaaaccacccttcccctccctcctgccagtccgttcctcctgactgtccatccagccaggtgcccctctcctctgccagccaccccctggccctcaccctctccgtcctggggagcccgcctgccacgcattctttcctcaccgtgtctccccgagtctgtctcctccaagcccccgcccccccacttt

SEQ ID NO: 2921 - DNA, 6000 bp, Homo sapiens
ttgggattacaggcatgagccaccttgcccagccctgggtgtgctttacaggggacttgagaattaaatgggtgtctaacacttgcgggtacatgacatagagggatctatggtttatgcggaaagctaatgggggcaggcgggttactcacaggcagagcacatgcttgtggacctgctacagtggggatgtatgggctgtactggggtccacatgaagatataaaggaccctatgacgagcacagagaatatatgggggtctaaaaacataacacagggaaactgagggggttctggaagcttctctgtaaagagaatccaaaatcactctgggctgtgggtagatatggggccttgacattggtggggacacagacttacccttaccctgaatgggtggccttagggggctggggaaacagacatgaattttgggtcagcaactccaagaattctttcccctctctgtctctgtctccctccatatgtccccacctctccccagcacgtgtccctccacctgtgtgtacccccggccctctctacagctccatctgcgccccctctcccccacctctctggttggtcttcctctctctgtctctctgaatctctgactctctccatccctctgtcggcttccagcagctttctctccctctccctgtctgttttcccggcttgccattccttccttctcttctgtccctgtccatctctgcccttcctccctctctgcctcagcctgtctctggtggtctccatccctctggcgtctctgcctgtctcccgtctctgtgtcagccagcatctctctttgtgtatctccatctctgccccatctgttgggtcctctctctctctctccatccttccctccatcctctctcctgcatcctcccacctcctctccatccctccagctggaggcccgccccctgccccccctcgctccccctcccccctccgaaagggttaactttggggaagggcccggagtccccggatggtgatgtcagcgtgccggagagaaaggacgaggtggcggggggaggcggagaggaggaggaggcggaggagagagggcgcgtgggggggcgggggggacctcggcctgcagcatccgccggcccgcacctcagacccccccggcggggggaggcgcaggaagcggggggccggccagaaacgggctggggagggggggccccgcagcccccctgggccatgctgactcccggggcctgacccccccgggccagccccccctcccccagctccgcggcccgccgactggggggggccagcccagccccctggggacccccggagaggtggggggcagccgggggggccgggacggagcggtcgccggcccccaccggagagacggggcgacggccgcagggggggcggccgggggaccggtcgggccgggaccaagggcaccatgtcgtccggggccaaggagggaggtgggggctctcccgcctaccacctcccccacccccacccccacccaccccagcacgcccaatatgtgggcccctatcggctggagaagacgctgggcaaaggacagacaggtgagcctagcagaaggggacacctggggcggggggcagggtggaggtggcggcagaggcgggactcagggtattcaaatggcaggggctggctgcccagacccctgggcccctcatagagaagggacttgggattcagactcctgggtccctggatggagggggtggggggcgcagactcaggtcctggaggagaggggctgggggcctggactcctgggtctgagggaggaggggctgggcactggactcctaggtctgagggaggagggcctgggggcctggactcctgggtttcagggaggagggcctgggggtctggactcctgggtttcagggaggaggggctgtgcttggactccggagtctgagggaggagaggctggtggcctgcactcctgggtctgaaggagaagggcttgggggcctggactccagggtctgagggaggaggggctgggggtctggacttctgggtctgagggaggaggggactggggtcctggacttttgggtttgagggaggagggactgcggtcctggactttcaggtctgagggaggagggcctgggggcctggactcctgagtatgaaggaagagggtctggggtctggactcctgggtctgagggaggaggggcaggggtgctgaactcctgggtctgaaggaggaggggctgggggcctggactcctgagtctgagggaggagggcggtcggaaccttgagtgttgggacagggagtttggggccccagtgctccagtccccataggggcagaggctggaggggctccagggccagggaggggatggaggcggcctgcagagtggggccgggctgggacctgaggttcttgctgcagtacagctgcagaccggggtgcagtgcatccatcctgggaaacctcttccctccccactgtcctctggcctccagttctccaggcagcaggttggggtgacaggggccgtggggcctaagacattctccccttctctggcatgctggctcagagtgggaaacaggatggagggtgggaaggtgggctgcagcaggcgcgtctcctggagcggctgtggaaagggcgttcatcctctgctgttgctgaacgctggccaccggccgcggcctccttcctgccggatggatggtgggtggaggtgacatgggagctgaacgcccagagtctctatgaagctcagggccagagctggcaggagtggggaccgactgggccgtaactgggagctgagaccctagggaaaaggagagggtcaaagtcccagatcctgagtggtaagagtgtgaaggtgttgctgacctgaattcctgagttacaggagaagaaggggtcagacctggactgggtctgagggaggaggggctgggcctggagtgctgggtctgagggaggaggaactgggggtctggagtgctgagtctaagggaggaggggctgggggtctggagtgctgggtctgagggaggaggggctgggggcctggagtgctgggtctgagggaggaggggctgggggcctggagtgctgggtctgagggaggaaggggctgggggggctggattcctgggtctgagggaggaggggctggggtctggactcctgggtctgagggaggatggaatgggggcctggactcctgggtctgagggaggaggggctgggggtctggacgcctgggcctgcagctttaggggctagtcagggctaggtctgtggctttgggggctcaggtcctggagtcgagggtcctgaggagaggtgtgggctaggagaccggacatacccttggtgtctgtgtgctgtctgttagggctgccatgaagagaagacccaggaaggcagttgaggctgggggttcaggagaaggtggagggtgatctggggaggggcaaatgtgagattatattcactgggaggggattcaggaggaggtggagggtggtctggggagggggcaaatgtgagactatattcgttgggagtcatagggtctccaaaagattgaaaagcagagaatacaaggaattgatggagagagacagagaaagtgggggggcgggggcttggaggagacagactcggggagacacggtgaggaaagaatgcgtggcaggcgggctccccaggacggagagggtgagggccagggggtggctggcagaggagaggggcacctggctggatggacagtcaggaggaacggactggcaggagggaggggaagggtggttttgtgggagtgtgggctctcagccccaggagttcaggtctgatgtgttcaggccattgttaaacagccagcccaggaggaaggagcaaacagggtggccaaggggggacataggcgctggggacgaaggggacccggcggaacaccccacattttcaccctgctcctgcagggctggttaaactcggggtccactgcatcacgggtcagaaggtcgccatcaagatcgtgaaccgggagaagctgtcggagtcggtgctgatgaaggtgtgtgcgcctgctgcagtgtgcctgcgggtgggggggcctccggggctgagggcaggggcggggccgtgctgacctcttttcccgtgtccccacccctcttgaccctcaggtggagcgggagatcgccatcctgaagctcatcgaacacccacatgtcctcaagctccacgacgtctacgagaacaagaaatatttgtaggtatttatagacacccagccctaccccatcctccctctccaggttaccagggtgggacttctccagaaacagggcctagggggacctgggggacctgcagctctccaggctggaccgctgaaggcccagttccttgcctgttgcacagggaagcccctgacacacagggaaccccactgttgtcacgctgtgttgggcctgaggccaagggcaaccatcctcctaccgtgtccccagctccagctcctcgccctgtggcactgcatggaatgcgctctgctagacaagcagggtgccctcgaccagacccaatctgctatgggcagatgcctcctgtttgtaaggcaaggggcctagcaaagcccaaaggatcttcccaaaccccaactctggagcactggagagcccccctcctcccccggcataacttcgggtgccgtggctggacaccccaacaatgggccgccttaggaggtctgagtcactatctcaaagtcaatcacccgccaggaaggatgggggtgggggtccagctgtccagactccagagaatgggcctctttgtccaaactctggtgacccaaaggacagctgggctgggaagccggagaggggacagccctcgtgttcccccccggcacccagtcccccggatgaactgacatcaggtccgtcgatgctggcgcaggtttcaccacacgggaagctgtctgcccggcgctcatgggacctgctctcaggctttcccaggtgtggtggtagggaggggctattgtccggaccggtgcatggtcgctcccactccactcttggcgtagggaggcagggccatgggagtttatgcttcgggcaggaatcccagccatctaagagctcatagaaattgagcttttggggccaggcgcggtggctcatgcctgtaatctcaacactttgggaggccaagatgggcggatttcttgaagagctcgagaccagcctgagcaacatggcaaaaccccgtctctacaaaaaatacaaaaattagctgagtgtggtggtacacctgtagtcctacctacttgggaggctgaggtgggagaattgcttgaacctgggaggcagaggctgcagtgagccaagatcgtgccactgcattccagcgtgggcgacagagcaagactctgtctcaaaaaaaaaaaaaaaaaaactccaaacaacaacaacaacaaaaaaaaatggttgatggaaactggaaccccgtgtcccagaggcttatgggaagggagtttgggggtttttttgttgttttgtttttttgagacagagttttgctcttgttgcccaggctggagtgcaatggctcgatctcggctcaccacaacctccacctcctgggttcaagtgattctcctgcgtcagcctcccgagtggctgggattacaggcacgcaccaccacgcccagctaattttgtatttttagtagagacggggtttcaccatgttggtcaggctggtcttgaactcctgatctcaagtgatccacccacttcggcctcccaaagtgctgggattacaggcataagccaccgtgtctggccagaagtgggggtttttaacttctaggcgctgatgggagttgtcgtctattgcctcacagaagctggcttggactggtgcaaccttgcaatcgttaatactcgaaaa

SEQ ID NO: 2922 - DNA, 6000 bp, Homo sapiens
tagacatggggtttcaccattttgtccaggctggtctcgaacttgacctccgcccgcctcttcctcctggagtgctgggattacaggtgtgagccaccacgcccagccataagcagtttttttaatgtcaggcactgttctgatcatgttatttcacacaattccctcagcagtcccagggaggggaagtgactggcccacgggcacgcagctgataagccgcaggcctggggtcagtccttggtctcttaaccaccaggctacataacggatactaagggcaatgaggccagctccaagctggcttcctggggctcaccactccatggggagagcagccgaggtgctctggagacgagctaagaatgttcagaactcagcccttcttcacttggtggctaaaagcctggttctggagcccatccagccgagttccaatccctgctccctctccctgagcgagccagtcaccctacctcagtgtcctcatctgcaccgtggaaatacacatcatacctatcattgtaagggttttgttttcatttttattttatctatttattttttcattttgagacggagtttcgctcttgtcgcccaggctggagtgcaatggtgcgatcttggctcactgaaacctccacctcccaggttcaagattctcctgcctcagcctcccaagtagctgggactacaggcacctgctaccatgcctggctaatttttttgtatttttagtagagatggggtttctccatgttggccaggctggtctcgaactcctgacctcaggtgatccacccgcctcagcttcccagagtgctgggattacaggcgtgagccacttcccccagcccactgtgagggtttaaataaatgctgcacgtgaagcccctggcacaatgcttgatgattattattagtagtttattcttttttttttgtttcttcttttttttttttttttttttttttttgagatgaagtcttagtcttgctctgtagcccaggctggagtgcaatggcttgatcttcttcgcggcaacctccacctcctgggttcaagttatttctggctaatttttgtatttttagtagagatggggtttcaccatgttggccaggctggtcttgaactcctgacctcaagtgatctgcccacctcagccttccaaagtgctgggattacaggcatgagccaccgcacctggcctagtagtttattcttgttccaatagttcctcatcatttgcagattccatatttgcaaatttgcctacctgtcaaaatgtatctgtaacccaaaatagtcctggaggtgctttcacagtcattggcagacatgcccagagcaggggaaacctgagccgcccacccaaggtgcaggtttccggctgaggtcaaacaaagtgaccctgtttcagctctcatcctgtaaacaatccccctttcaccacctatttcgtgtcacgtttttcacatttttgtgttgttggtggcaatttcgttgtttaaaatggccatgaagccaagtgcttctgaagtgccgtctggtgttcctaagcgcgggaggctgtgatgtcccttctggagaaagcccctctgatgggcatgctttgttcaggaatgacttgtagtgctgctggccatgagttccgcgtcaatgacacagtacatatgaaaggtgtctttaagctgggtgcggtggctcacgcctgtaatcccagcactttaggaggctgaggcgggcagatcacgaagtcaggagttcgagaccagcctggccaatcaggaggctgaggcaggagaatcgcttgaacccgggaggcggaggctgcagtgagccgaggtcatgccactgcactccgggctacagtgctagactccgtctcaataaaaaaagaaaagtgtctttaaacagaaacacatacaaacaaggtcatgtaatgactggttgacaaaaatgtgacgagagggtcaaaggaagcttactaactatagttcctccagtagccgtgactcgttcactagttgagagtttgcagtgactttatagaacagaactctcaagaataacaagaatcaactgtattgttgttataatttgttttggtttttttttttgttttgttttttgttttttttgagatggagactttctctgtcacctaggatggagtgcagtggtgtgatctcggctcactgcagcctccgcctcctgggttcaagtaattctcctgcctcagccacccgagtagctgggattacaggcgcccgccactttgcccggctaaattttgtatttttagtagagatggggtttcaccacgttggccaggctggtgtcaaactactgaactcaagtgatcctcgccccttggcctcccaaagtgctaggattacaggtgtcagccaccatgcccagcctgttgttataatatttaatccagaccgtacccttcctggcaggatcattatgtccgtttcacagaggagaggaaactgaggctctgtgcttgagcatcaggcaaccagaagtcaaacccaggcttccgcaccctaagatcggcattcagaggtgccttctctgtatctccccattctccgtccacaggcctcagataccaggggcaactgggagcttgcaacacccggaaaagccctcaaaggctcacaccatcacctcccatgagtctttgtccatggggggtcaccttggctcccctccaacccttgccctggtgattggaagcattccctcccgtcccgtatgatacgttcgcttgtttgtttcctgtcccctctggaatgcaacttctctgctcattccaccacctttgctgatgacttgagtgtcgagtgtgtgtcaggcagcgtcccaggccaactccaggagggcagggatgtgattttgtcccctgcttcatggctggtggctacgtcagaatgcaggatgtggtggggtctatggtcagtgcgtcacagcagccagcctgtaacagtcctgactgtgggcccagcactgtcatgtactaggtcagttcattctgatgcagtccgtgaggtgggtgctgtgacgacccattgccattttcagagcagtgacttgcctgaggtcatgcaggtataagccccagagcaaggattcaaagcaaggcaggggaccaggtgcggtggctcacacctgtaatcccagcactttgggaggctgaggcgggcagatcacctgaggtcaggacttcaagaccagcctggccaacgtggtgaaaccccatctctgctaaaaatacaaaaattaggctgggtgtggtggctcacgcctgtaatcccagcactttgggaggctgaggcaggtggatcacttgaggttgggcatttgagaccagcctggccaacatggtgaaaccccgtctctattaaaaataaaaaaattagccgggcatagtggcatatgcctgtaatcccagctactcgggaggttgaggcaggaggatcgcttgaacctgggagaggcagaggttgcagtcagccaagaacacctcattgcacatcagcctgggcgacaagagcgaaactccatctcaaaaaagaaagaaagaaagaaaagaaaaggtgtcagcagggccctgcttcctctggaggctctagggaaggatccttccttgcctctcctagcttctggtgtccttggcgttccttcagttgcagctgtatcactcccatctctgcctccgtcatcacatgactgttctctgtgcctgcgtcctcgtctcctcttataaggacaccagtcattgatttagggctcagcctcattcaggtctctgctcccattgcacctcctgggagaagcctcactcagtcgctcgtcattgtatagctatttgtttggagctgtgcaagggcagaggcctgttttgttcactgctggatccctgacctgtaacggatgctcaccttttgttgaatgagtgaatgagagacaaccgtttcgaaactgctgtggggggaaagctgtctaaaaggaacagcctccacgctgcaattctagcttcgtaagcggggctccaagctgctccttgccaagtgcctgctgtgccacggacgagctaggggcctttggcaaattgctgagcctctctgtgcctcagtttccaaccccttaaggtggagatcaccgtagttccccacctccagtgcttgtggtgagggtgaaatgtgctaatgaggggtcctggttatctcttgcccagggggctctgccctttgatgacgacaacctccgccagctgctggagaaggtgaaacggggcgtcttccacatgccccacttcattcctccagattgccagagcctcctgaggggaatgatcgaagtggagcccgaaaaaaggctcagtgtgagttgagggggggaccggcggaggggggaacagtggccgatgaagacagaaccccctagaaaagtcatggggatgggtttccagaacctgctcgtcagtccccagggtgactgggatcgccagctgagccgcagcccaaggtccagcacagctgccgctccaaactggggagggggctacgcaagattggggcggggagctccaggcagcgggagggcgcaggagtaaggaggcgaacaggatgccactgcgcatgcggcaaagtaatgcggccggtccggggtacacggagaccgcgcgtgcgcggggcgatgcactcagtcgccactagagggcgatgtaatatgtcatcctgcccccggtggggtgggcggggagatgatcagggaccccaaaaccaccccagtctttcattgcgcgcctacatgtgcctacgacctcacttctgcttctctacgactcaccaccctcacagctggagcaaattcagaaacatccttggtacctgtgagtatggggtaactggactcttgggtccctggcggaaataggggaggggccaaagcagtagaagcggctgggaggggtgggatgccagggttcctgagaggcaacgggctagggactcggacttatgggtcctgggggaagaggacacagctagagaaggagtctaggggtcagaggcaggaggggctaagctaggagtccaggactcccaggtttgagggaaaaagggactgggggcctggactcctggatccgagggaggaggggctgggggcctggacttctgggtctgaagaaggaggggccgggggcctggacccctcggtcggagggaaaaggggctggaggtctggactcctgggtctgagatggggggcgaggtctggggcgtctggattcctgggtatgagagagaaggggccggggcctagactcggatttcggggtccgggatcattgagtctagaatgaagaatgctgaatctcagaagcccggttcccaataatgtttctccacttccccagaggcgggaaacacgagccagacccgtgcctggagccagcccctggccgccgggtagccatgcggagcctgccatccaacggagagctggaccccgacgtcctagagagcatggcatcactgggctgcttcagggaccgcgagaggctgcatcgcgagctgcgcagtgaggagtaagaccccaagacccctgcacccgtgtacccacgtggggcgagctgcagcagctccctgcgcacatgcagagtgctgggcgaggaaccctggcctctcatggggcatggtttgaagctcccgcctgggagtgatggaaccagcggagaaaacggcccagaaacacgctgagaaagtattaatagatgctgcgacatagtacttacatatacatagtacttacaaatagttcttgcctggatgttaggtgttacagtgttattataattgagtgaaacacagctgagatgtaccctaaaccagagaaactgaccatactgatacctagaaaaaatggaaccatgggcagaaatacagggagcggaggagacctcctctgagcattgatgt

SEQ ID NO: 2923 - DNA, 6000 bp, Homo sapiens
caataattctgaacatgtggcttgattttctcatctttctcactctttaatcttttgtccatcttccacacttaacttggctccctccaaggtctctctataagctccctacagagtaggtttttccaagttttttctcctctttgacttcttgtcatttcccctcattggccaccaaaacccttcctctccaaaacttttctctctaatccttgtcaatgcccttcagccaaagtccccaaggacatacccacacttacacaagttgactttattactgcttgcagtgagggaatcttggggcaattcagcaggagggtgttagaaaggacttctaggatctggactttgggagggtgatttggggagggttcggagaagcagaggtttactgtggattggttactgtcagggagtggggacacttctatgattagatacctaggaggagggcacacagaccaatgcaatgctcttaacgggtgaagaagcagtggtcactcaccatagcaggaagcagggatgcttggtgttttgtgtctgtgttcagacttaatgacagagtggtcttgtttttgccttgctccatcatggtcactggcattttgtgacattggttatgtttggtgtgagacctgactgtgagggctgggccagctcccggcagcaccaaggcccggtgggcagtccgggccatttcctggctgtcagcggctgcttttctttctcttagttcttccacgtttctccccatcacttctagctcttcctttcttctattcagagcttttatggattgatttctcacctgattatgggtcacattttcctgcttcgtgacacgtgtaataatttttattggttcctggacattatgaatgttgcattagagtgtctgtattttgttgtcttcatttatagagtgctgagattagttttgacaggcaggtaagttatatgtaaattagcgtgatcttttcgaggcagttttataattttaagcttttagagcagatggagagtaggttttctgtagtaagttagcccagtgcccaatttgtgaccattttggggttcttactgattttctcatacatttagtgaggtttctctactctggctggtgggaaccagccccatgtgttgtgatacttattcaggtatttaagtgaaagaggacatatcagagtataactagacagagaatataaatagaaaagaggtttccagaggactgaggtcctggggcaacctgatgtttagaggtgaggaacatgaggcacaatcagtaaaggagatggagaaagaattgccagaaaggtcaaagtaaaaaaggaaaagtgagaagtcctggaagggaaacacactgttttgtggggaaggaatggaatgtgcaatcatgtcaaatgctattgataaaagaagtaaaaggagaaaagtaatcactgacaattggaattggaaacctggaggccataggtgaaccagctgagaatagtttcagaggagttggtggcaaaatcctaaatagagcagcccaggagaatgggagaggaagaagtaaagacagtgactgcagaaaactcttgccagaagctttgctttaaaaagaagaagaatggacaacaggcttcctgaatgccaaggtatttagcaagctctttgcattaagaactagaatgctctgcaagcctgtgtgagcaccaagagttgttcagcttattgttcagaaacttctttgtgaacttttatcctctgtgtgcagcctagtttccagataaacattgaggagtcctcctaggcagatttctgaggctttctttctgcctggctccctctctggtcctctgccccgaaatttctggctatcttcaccttcctcctccaattgttgtctcctccagttggtgagtcagccctgcttgggacccttctccttgtgctgcggtccaggaaggactctgggctgagatcatagggttcatctactttgtttcccacctcttaggaattacagtcttgcactgtcagttgtaaagtctgaaaacagctatttcttttatttttatccagttttctagtttacagtgaaaggcaagtcagtacaggtccatcagggctggggaccacaggggcagtttcacacggagttccgagtctggcatgcccggcctttgtgatatgtaaaagtctgcatctgaaacggcccttcttggttgtcgtgttcacagtcccaattgtagggctgtgtcatggatacgattaatgagatcctgccattttcagagttgcttcctgaggtccaggagggacttcttgtgtttacatttcttattaccctgactttattaatagtgcacttgttttgctgccttcatacccactgcctcatgtaagggcttttgatttcgccttttaaaggccagggtgagagtggcagcttacatgtgtacgggccatttgtctctttttaaattccagacagtacacattccgtgcttttcctttgtgcaccactctggctactagactaatcaggaccttgtctaccaattatccacaaaatgaaatttcggaaagtctgcctcttttagagacaactttcttaaagtgttccatgatacatcaataccatctagctacaaaagtaaatacgcacaaaatattttatctcagtggacattttaacttgttaaataaagcactttctagttagtggtttgctctgattggcatttctaaaaacaactttatgagttataacttacagaccataaattcacccatgttaagtgtacaaattaaatgatttttactaagtgtacagagatatgcaaccatcaccataatgtaaatttaaaacatttttattcccccagttagatccctcatgcccaaaggcccgctcccaccccaggctcaggcaaccaacacatcactgtgtctccatggatttggctccctttctgggcatttgacacaaatggaatcacataacatgtggccttacatgtctggcttctttatatttttgagatttatccatgctgtagcatattcattctcttttgttgctaaaatagtatatatttttttaccgtatagctgtatcctatttgtttacagttgatgagcacttgtgtcatttccacattttggctattaataatactgctatgaatgttctcatgcaagtctttgtatagatgggcatttatttttaaagcacttttctaagaaaggaaataatttatactttggaaatttcatatcaagaattaattgtatacagttagttggtctggataattgaaatcttctcactctattctttaacttataaacagagtccctgctccacaactctccctaaactaacttcttgcagagttcaattttaatggtacaactggcttggttgtcttactagattctaagtttctaatcagttggccccacaattcttcttttcctaaatccccaaggctagtgctttttgactgtttcctgcacctagatgcagaatgtttaaaactgagcccatcatgttcctccctgaacctattcctaatccattatttctaatctcaccattgagccaccctttctaaccacttcctccagccaaaaacctggaagccaccccaaattcttctatatccagttggtcacaaggctcacccatatttgattatgtcatctcttattcaatagcatttaaggacttatttgaaataaagttaaattctttatcttatcctaggaaaactcggtgatctgcttctcatttccctctctccagcttcatctttcaacacttcacctggccctccctcctactgccccttgccccacatcccacgctccagcagctaaagctttttcatttgatcagtatttattgagacctgtgatgtgccaggcatcataccaagccctggacttacaggagcacgtgcttcctagctccatagaacatactctttagtggggaagacaaagcagttattttaataaaggtgagatgtattctgttgggggaaatggtatgggttgtcacagaaacttgcagcacaaggagtgaaactcctctggggaaagggaagctgaggcttggaggatgggtgggatcccgtcaggtgaaagggaggcaagaagagctctctgtcctcctgggtttctggtaatatcacctacaatgcttttttccccaaggctatctacaaaatggtaggcactgtgatcatgatgaaaatgaatgaggatggcctgacgcctgagcagcgagtagacaagattttcagcaagatggataagaacaaagatgaccagattacactggatgaattcaaagaagctgcaaagagcgacccttccattgtattacttctgcagtgcgacatccagaaatgagctgatgtcaatgctatggactgcacaaaagtctcaatgttccattcagtctgcagctattcacacacacacacacacacacacacacacacacacacacacacacaaatattgcttggactacctataaatggacttgcttcttgtgtttgaaacactcgtgtgcatgagaatgtcatttgctaatgaattttaaaagcatatataaaacaaaacaaacaacctgccacaatgtgatatgtgtaatatcatttcataaaaatccctcttcctccaaagcctgggcagaaatgtgctgcaaagagttatatgacttcttgttcatgttttgctaatgctcgtatctccttgattacataatgttagtagcactgagacccccatggtaatgtaacttaattataagctatgtcactaccctcctgtaaaatactattggacagacacagagggacccttggctcctgtgtctggtccacacaccacagaagcttgtattatcagtgaatataaatgtactacatttgcatgccttttgggtttgccttaattcttacctcatttgcatcctatcgatctggaaagagctgttttggatgaatgcagtataaaatgtaaaaaccctgctaaatgacttattgattaagtatatctatctatatatacatatacacaaagatattatttatcgaaagtaaaaaagatggaagtgtattggtttctgtttgaattttcaaaggcttccaatgtggtggcaataaatgtcccaaataaatttataacaattgattttccccctaattcttattttataattttaaaattgcagcagttgctagcaacaacttactaaatctactcttaaatatacaactttggaatttgaagaattaatgacaacaaaagggaaaaaagcaactttccaacttttcatccaggctcccaaaagagggacaacgaacatggcatgtgaaaagtaaaacagatttgttcattccgaaaaaaaaatgttcattctatgacaataaattttatctcagtgtgactttggtgctaacaacgtatgttcagtgcaactacgtggagctgtgcacacacagcaggtaggctgcaggtgtcccccaacataagtcagtaggaaagaagacatctgtcttcccaaatctaaagtaggcaaaaaataacagaagtagctatttttaataacagaacagaactctgactcttttgatcttgaaggaggcagaagagattccatcaaaacctctaaaagcaggtttgcattttcagaacatgcccccctagagagttgagttttttacacagcactacccggtagtactttctctgatgatgggaaggtctacatctgcacagcacgctagctataactgcacatatggctactgagcacttcaagtatggctagcgtgactaaggaactgaattttatactgtaattaagtgtaatttgccacatatagctagtggctttagtaacagacagtttagtgctatattatttattcaagtactttttatcaaattcgttttttaccgaattcgttttttaccattctttatttg

SEQ ID NO: 2924 - DNA, 6000 bp, Homo sapiens
ccaccacacccagccctgccatgagtattattctgtgtactcatttctatgaagtgtacagtgacatctatggatgtcactttacagataaaaatatacagacttaaaggtaaagaaagtatttggtagtaacagtggcccagaatattgtctatttcacatcctgaagccccactggttgaatgtaccattgtggcattaattcagttactgtgaaaagttgtggttaattctggaaaaagagtgcagtacaaatattctcaaagtcattattatgaagagaaatgagacaaattattaacccatcagaacacattaaaccaaaagtctgagaagaaagttattgacagttttgctttcctttgtgactcacggtgcacactggaatagattgctatcgaagacaattatgcaattcctttgttctaatttaatttaaatgtgaccctgaccctagcagtcaaaattttaaatgcaggttatcttctggtttagcaatatctcttccaggaacttaagatatgttacgtggtgtgtatggatttatacaacaatattcactgtagcattgtttataatagtagacactgagaagagctaggtctccatacaggactaattaagtaaattatggaatattcaaactaaattagatgatatagcaaataaatcagtaggatagaaatacatgtactaataaaaaaactgacccaacttttaaaatgaaaacaggtatgaatatgttagggatgattacagttcagggatggcaagaaccacttttcaaaacatatccctttgtgttgtttcatttttaaaataccatatgcctgtattacttttcaaattagaaaaaagttaaaaaatatgtgaccctatttattaggagttggagaaataaaccagaaatctttttagatggtttgcttcttggctaaatattaagtgacaaatttaaatagaattcatgggtcaaattaaaaagtactgttctgcaaatttacaagtacttgaatattaaatactacttcagtatagctttttgagggaagagaaattcacattttctggtttccttcagattgcctagaactagtcctgtggagttggccagggcacatattttctctggcaacttccggttctaaggttcaacattcctaccctgtttctaatgattcctttcgtaggttgactacacatacacaaatgaatagtagtgaagattgccacctagtgcagtgatgtttatgatggcacacataaacacacatttatatataggactgtgatgttaactgtattccttctgagggttatggtaaaaaaaaaaataaaacagcaataaggtagactcttgattttataaactgcagtcctctaagtatttcaagtatattaagatcattgtgtaaagctgttaattaaatatattattaacagggggcagccatgcctaaaaaaaaaaaaaaaaagtccagcactgattcgattattggaaacccctaagcaagataaagagggcttttaaccccataaataatatctttaatatcacatgattactacagttagaatttagtttttattatttcatttcttttgtcggaaacaaacctggtttaaagaatgattaaccatggttagttctgaaagaggaaaattatgtgaaatgtacattttattagaaagaacatcataatattttaagaacgcaattaactccaaatctctgtttccatcatcaattgttttccattccttatcacatgttctttgcaccagctgttccgcggaagtgatattaagaagcaatggttaagactgtaaaagcataaaacattccaaaaaaggacagaatgcaatagcttctaagatattaaagtacaactacactgaaagatagaacagatggttcttgcatgaggtcataatcaatgtgatgaggttatttgaaaatggctcagcattaagtaaaatttaaaaatactacactagccgggcatggtagctcatgcctataatcctggctctttgggaggtcgaggcaggcggatcacctgaggccaggagtttgagaacagcctggcaaaatggtgagaccccatttctataaaaataaataataaaaattaaaaatactacaccaagaactatgtataatttcatcttgctttttagttttttttactatggtaaaattttaaatttttttggtgtgggatttggtgagttcccactcaaatcttttataatgaataagtatattgatgtcaatctgttcatacaatcaacatatatatatcaaaagaagtctaacatcttcataattttttaagaattagctgtcacacaagtctacttacatgaatcaatgatgtaagaacaacacatagcaaataactttataaacctattaatggcttaaattgatttagcttacttatttgaatcaacaaagtcagaacacatagcaaaccacttcataagcaatggacttcagataggaagcctaggatttgggttttgaatataccactgattaggtgtatgaccttgggaagacatttaaccgttctacaaaatgacaggtattaaaccagatgcattacaagattctaatatctgtaatctagtatttaatatttgaattgcatgaccaactggtagcatggaataaaaaaaaatcactctatttcagaaagtattgcttggtataatagaaagaacataaatttccatcttaaaggacttaagaatccacttccagttaaaacaaaaacaagtcctttgatgtaaccatatggtgcccataaatcaatttaagttcctaaaacttccttaaaagctaataagcttttattggttaattataaaactgaatgaggtgagaaaaacacagaaccttgttaatttcactaatgaatcaaatttaaagaacataaagaggtcaggggcttaactgatgcaaaaatacacactttattaaagcaagttttgcaatttagttcagctttaagaaaaacattagaaaatttacttcggaaaagcagaaaatgcttaaatttcccaatttccatttagatgagtatatattcatataaagactggtaaatggtgaaaactatttcaatgcaagattatattttaagggatttaccacataatctcagtaactaatgctgttctttaaaattattttttcaattttattttcatatgaatttagcctaaacgttgaggcatacttcacgtttatcaataaatacttattaaatgtctactatttaacaggaaagctttataggtgctggagatacaataatggaagatcaagccctgcatttaaagaccttagtagggtaagtgagactgcagataaaaagggcttaagaggtaagaaagcaagctatagttgtatttaggaaaaaaggtcccccacttaggaatcaaggaacggttcctgaagcaagtgacatgtaagtagggacctcccaaccgtgtttcccattggttacaacaaggccagatgttttggtctattttgactatgtcatatttttcgttgatccatggcaagggccacagtaggaatataatatatatgtgattacttttagaaataaaaagtgactttgatgtaaagaattccattaccggaggccagaatttcaacatcaatttatttggaggtggagtgaggtggcagtcaatgcattattttccccacacagaagagaagattttggagtatgaaaagtaggttacttgttaggtcagcatattcatgggaagggttgtgtaaagactgaagcgggagtgtggggttgagaagggcgctgaaacctaagccaaggaagttaagacttcattacttctgacgtttatttagggggtttacactctaggttaccgtgggggaaagactgattgtaaataactacaataccttaaagtaattactataacagaactatatccgaaatacaaggttaacacggaaaagggaacacccaactgtgcctatggggaccagggagggctctcccgggatggctttgagcgaggcgtgggaattatccccatcgcatgcccgggggaagcacagcgggacccagcagcttcggccaagcgcaagcggccggagaacgcgcagctttcccgaggcggggtgacgcagggccctcgcgagtggaaaacaggggccaagtcgcggcctggcggctcggttcggacttcctactttattcaaagggagtcattgaaggcgttttcggaggagcagcgaacaaagagctcgtccgtaagccagatggtcaaaggaatcagtgggaggacccgggcggcgccgtctctccacgtcccgcgggacttacccggacaacccttcctccttggctctggaagaagccccttcgtcatttaccagtttggcctgaatcctaactactgtgcctccaaatttctgaattttctcaaaaggaaaaaaaaaaaggaaagtcctctttctttacccaagcaaagactagctccccgggctcaaccgccaggcccaggagcaccaggaagcgtttcgaatccagcgccgggcccgcgcggccccgcctcttccgggaagtgactgacccctttcccccaatggggcccgctcggctttcccttgccggctcccagccggcctagcggacgcatgcgtagaccagctgccgggggcgctcaattatctttcccttttacttaggcaaatcactcacctcccccgagtccggtcactgcggagccgcccgtgcctaccagcttcccccacccgctaaggggcacttccggcctctcagactccggcggcgcgaaaccccgcaactgcgcaggcgcgggcggagcccgaagggagggagggcggggcgcaggcgcggttagtaccgcggtgggcgccggggctcccgggaatctaccttctcctgcggccggcacgcggttcccagggggccagcggcggtcagccgaggtcgagacgcccgcagggtggccttagcggccggtcgtaccacggcagccccgccgatcaggttcctttgggagacttcgacttgttggcggtagggtgaaggcgcgcgctgtcgctttcccttgctccggggttcatcctccgcccgctgcccccttggctggcgacccccagccacccgggagaggcagggtcagctgagctgcggcggtgttcatggtcgtccttgcgggcccgggcgggagatgtccgttcctcgggcgggtcgggcggccggcggcaccttcgcgcgctctccgaggcggcaccggtctcctgagccgcgggaaacctggcgtctgctccgggccgtcccctcccaggcggccgtcccctcccaggcggccgtccccagactctcccgggctgtggcgaataactgtaaagcggggagaggtctggggaaagctggggtagggagtggctcttagcatgagtctgatgatatctcgcaggcggcaactggtgtgtttaaagggtgtatgcaaagatcactgaaatcggatttgtcattaaagcccagttttacgaaaatgcaaattgtattacctagaaaaattaacatgtgttcaaaggtttactgatggcatttctctgccctcatttcttacagaaatgaaccggagaagaatcccaattgggaattgcggaaaacaggactctagggtagagaaaggttgtagaaccaatagggtttgaggtaatactgtgaaaattcttagagcaatcatttggtgtttgagccctcaagacagaagttttgtgagcgcttattactctgcatatgtcacgagtagtagattaaaagccagtgttttaaaggcaaacttctcagtaatatatattcaaaggaaaaaagaaaaacccaaatctcctgacttttatatggttgcagtgtgatcttttaacatgtacaatagtatatacagtggcatgcagtttgttccatgggtgtg

SEQ ID NO: 2925 - DNA, 6000 bp, Homo sapiens
caaacactacgtgatgacgatgttttttatttgctgagaatgttttttatttgctgagcatgacctgggatttgcagtttgctattaggttgccacggtaacttgcatctaacagacactgaaggatcctaccttttaaaataggaatcactttgtaatttaatgatgatggattttcaaacacagattcgaatgtctagagcatcagatacagattaaaatagtaaaattgtttccaaaaggctaaagaaacatatttacagatgcaaagaaaaatattttaattatgctggaataaaaaaaggagaaaaaagcctcctctgggattttcaatttatccataaagctcgtcatagtttttaatatttctttacttatttataatttaaaaaaaacagaattaaagaacacctcatttctcccttacaggatacaagcaggaacaatgaagattatcaataaaataataagttcaagaagaaaaattaatggccgggcgcggtggttcacgcctgtaatcccagcactttgggaggccaaggcaggcggatcacgaggtcaggagtttgagaccagactggccaatatggtgaaaccccgtctctactaaaaatacaaaaattagtcaggcgtggtggcgcgcgcctatagtcccagctactcaggaggctgaggcagaagaatggcttaaacccaggaggcggaggttgcagtgagccgagactgtgccactgcactccagcctgggtgacagagcgatactccgtctcaaaaagaaaaaaaaaattaataaccaagagttcattattgcatgtagatgcataggaaatttgatagagatcatgcattttaacagaattctaaattttattaagtatataataattcatatttcctattaataccaaattaggaactaagagtagtgacacacataacagaattagaatttaataaaaaagtgttatcatttttttaaaaaggcaaattactactacttctgaatctgccctggcctgtgtttaccacatcctcaattctactctgcctatcacaacagacatttattctatggtaaacaacttcattttgaatgtgcttaattaagtacactgcttggaatatatcacgaaattatatgagacttattcattaagtccacccatctaaaatttcaggatcagcaaaaccgggaagtataaagcacagcatttcagttaataaaatctgaacacttagatttctgtactgaaaacatcctgtggctcaatatagaagatagatgaaacagaaagtaagaatagtagcagaagagatgagttgctaaacaaaagcagtggtaatatcagggacaaagggaagagataaaacaagagatttaaaagactgaattagtagaattggtgagtacaaatgggtgagtagaattaacatctgctgaataactacatacttagcttttgagatgaacactttctatttcctttgatccccaacatctttatgagataaatattgcccttatttttacaaaaggagagactgaggcacaagtaaatgacttgaatttatgtagctacaacttagttctaacatacaaaggcttctatagctctaacatagcagagctcagatccaaatccaggtttgtcaaaacccagttaaacctctttaacgcccaggttcctactggcataaactgaagtttgacagttaattattcatagagagtgaaattggctattaatctgtccttcatctcgtctatccttcattaaacttaaaaaaaagattctattattggctgggcgggtggctcatgcctgcaatctcagtactttggaaggccaaggcaggcggatcacctgaggtcaggagttcgagaccagcctggccaacatggtgaaaccccatctctactaaaaatacaaaaaaaaattagctgggcttggtggcgcatgcctgtaatcccagctactcaggaggttgaggcaggagaatcacttgaacctgagaggcagaggttgcagtgagccgaaatcatgtcactgccctccagcctggacaacaagagtgaacagctgtctcaaaaaaaaaaaaaaaaaaaaaaaagattctctaatgttactattaaagtcaatcaaaactttgggtgtgctttataaaacttcattttgtgtttcatcttcacacttaatactaaatgccattataagttcatggaacaggtttggcaagtagggagaatgaaatttattttatttgaaaacactgagtttgggctgggctcagtagctcacgccttgtcatcccagcactttgggaggccgagatggatggatcacttgaggtaaggcgctcaagaccagccagcccaacgtggtgaaaccccatctctactaaaaatacaaaattagccaagtgtggtggtgcatgcctgtaatcccagctactccggaggctgaggcaggagaatcgcttgaacccgggaggcaggattgcaccactgcactccaacctcggcgacaagagtaaaactctgtctcaaacaaaaaaaaaaaaaaaagaggaaaaaaaagaaagaaagaaaacactgagtttcaagtgctcctaaggtattttgagatagaggccagtcagtagtaaaggatactctgcaatggagaaagatttgtgggtggagctaaggaagctactggaagtagtttgaatttggtgaccaagaaaagcatgctcagagagaaaagatgttaacttgtttaaatagtgaatcaaaaatgctaacattaacctaagcaactacgcttgaccctcagtcagctggacttatcgttgtgtataaagaactatggcatttaattgtgtcttaaatataatgcaagctatcacggtaaaattttgagttacttactaattcctaaaagtaagccaagtacagctttaattatttttcctaactttggtctaaaaatgacagtcaagatttaggtaggttttacataaaattctacagattcagtaaaatacactcagtaaaataaacctttggggaataaaacttgtttttcactgtaatacctttaacatgacttgtgtactttttgccaggctcaatactaactggtttatacggattgcagacagatgtcgatatataactacataactttctcttcctctctgtgtccacatatttaagaatcctgtcagctaggtacagtcaatccctaagaattggttccaaaatgacagcccctctctctcactcagataccaaaatccacagatgctcaagtcccttatatgaaatggtgtcatatttgcatataacctccccacatacttaaaagttatctctagattacttatataacctaacacaatgcaaatgctatgtgaatagttgttatactgtactgtttagggaataatgacaagaacaaaaaaaagtctgtgcaaccatccactttttttcctctgaaatattttcagtcccttgattgagtccacggatacagaggatgcactgataactgtattatttcttccaacttgcataagaagaactgaaacttaaagaggtggtaccaacctgctcagagtcacacaattctggctttttgtgatataaatacacgcttttaggcaatatactagtggcctccaaacgttttgtacttgcacccattaagcaaaagaaatttgaaatacatgttccaacataaaattaataccctatgtttcacgtagaaatcaaatgaaataaatctaaatagaagttctaatatgttccctctctacccacacacccatggaacaaactgcatgccactgtatatactattgtacatgttaaaagatcacactgcaaccatataaaagtcaggagatttgggtttttcttttttcctttgaatatatattactgagaagtttgcctttaaaacactggcttttaatctactactcgtgacatatgcagagtaataagcgctcacaaaacttctgtcttgagggctcaaacaccaaatgattgctctaagaattttcacagtattacctcaaaccctattggttctacaacctttctctaccctagagtcctgttttccgcaattcccaattgggattcttctccggttcatttctgtaagaaatgagggcagagaaatgccatcagtaaacctttgaacacatgttaatttttctaggtaatacaatttgcattttcgtaaaactgggctttaatgacaaatccgatttcagtgatctttgcatacaccctttaaacacaccagttgccgcctgcgagatatcatcagactcatgctaagagccactccctaccccagctttccccagacctctccccgctttacagttattcgccacagcccgggagagtctggggacggccgcctgggaggggacggccgcctgggaggggacggcccggagcagacgccaggtttcccgcggctcaggagaccggtgccgcctcggagagcgcgcgaaggtgccgccggccgcccgacccgcccgaggaacggacatctcccgcccgggcccgcaaggacgaccatgaacaccgccgcagctcagctgaccctgcctctcccgggtggctgggggtcgccagccaagggggcagcgggcggaggatgaaccccggagcaagggaaagcgacagcgcgcgccttcaccctaccgccaacaagtcgaagtctcccaaaggaacctgatcggcggggctgccgtggtacgaccggccgctaaggccaccctgcgggcgtctcgacctcggctgaccgccgctggccccctgggaaccgcgtgccggccgcaggagaaggtagattcccgggagccccggcgcccaccgcggtactaaccgcgcctgcgccccgccctccctcccttcgggctccgcccgcgcctgcgcagttgcggggtttcgcgccgccggagtctgagaggccggaagtgccccttagcgggtgggggaagctggtaggcacgggcggctccgcagtgaccggactcgggggaggtgagtgatttgcctaagtaaaagggaaagataattgagcgcccccggcagctggtctacgcatgcgtccgctaggccggctgggagccggcaagggaaagccgagcgggccccattgggggaaaggggtcagtcacttcccggaagaggcggggccgcgcgggcccggcgctggattcgaaacgcttcctggtgctcctgggcctggcggttgagcccggggagctagtctttgcttgggtaaagaaagaggactttcctttttttttttccttttgagaaaattcagaaatttggaggcacagtagttaggattcaggccaaactggtaaatgacgaaggggcttcttccagagccaaggaggaagggttgtccgggtaagtcccgcgggacgtggagagacggcgccgcccgggtcctcccactgattcctttgaccatctggcttacggacgagctctttgttcgctgctcctccgaaaacgccttcaatgactccctttgaataaagtaggaagtccgaaccgagccgccaggccgcgacttggcccctgttttccactcgcgagggccctgcgtcaccccgcctcgggaaagctgcgcgttctccggccgcttgcgcttggccgaagctgctgggtcccgctgtgcttcccccgggcatgcgatggggataattcccacgcctcgctcaaagccatcccgggagagccctccctggtccccataggcacagttgggtgttcccttttccgtgttaaccttgtatttcggatatagttctgttatagtaattactttaaggtattgtagttatttacaatcagtctttcccccacggtaacctagagtgtaaaccccctaaataaacgtcagaagtaatgaagtcttaacttccttggcttaggtttcagcgcccttctcaaccccacactcccgcttcagtctt

SEQ ID NO: 2926 - DNA, 6000 bp, Homo sapiens
gctaaagaaacatatttacagatgcaaagaaaaatattttaattatgctggaataaaaaaaggagaaaaaagcctcctctgggattttcaatttatccataaagctcgtcatagtttttaatatttctttacttatttataatttaaaaaaaacagaattaaagaacacctcatttctcccttacaggatacaagcaggaacaatgaagattatcaataaaataataagttcaagaagaaaaattaatggccgggcgcggtggttcacgcctgtaatcccagcactttgggaggccaaggcaggcggatcacgaggtcaggagtttgagaccagactggccaatatggtgaaaccccgtctctactaaaaatacaaaaattagtcaggcgtggtggcgcgcgcctatagtcccagctactcaggaggctgaggcagaagaatggcttaaacccaggaggcggaggttgcagtgagccgagactgtgccactgcactccagcctgggtgacagagcgatactccgtctcaaaaagaaaaaaaaaattaataaccaagagttcattattgcatgtagatgcataggaaatttgatagagatcatgcattttaacagaattctaaattttattaagtatataataattcatatttcctattaataccaaattaggaactaagagtagtgacacacataacagaattagaatttaataaaaaagtgttatcatttttttaaaaaggcaaattactactacttctgaatctgccctggcctgtgtttaccacatcctcaattctactctgcctatcacaacagacatttattctatggtaaacaacttcattttgaatgtgcttaattaagtacactgcttggaatatatcacgaaattatatgagacttattcattaagtccacccatctaaaatttcaggatcagcaaaaccgggaagtataaagcacagcatttcagttaataaaatctgaacacttagatttctgtactgaaaacatcctgtggctcaatatagaagatagatgaaacagaaagtaagaatagtagcagaagagatgagttgctaaacaaaagcagtggtaatatcagggacaaagggaagagataaaacaagagatttaaaagactgaattagtagaattggtgagtacaaatgggtgagtagaattaacatctgctgaataactacatacttagcttttgagatgaacactttctatttcctttgatccccaacatctttatgagataaatattgcccttatttttacaaaaggagagactgaggcacaagtaaatgacttgaatttatgtagctacaacttagttctaacatacaaaggcttctatagctctaacatagcagagctcagatccaaatccaggtttgtcaaaacccagttaaacctctttaacgcccaggttcctactggcataaactgaagtttgacagttaattattcatagagagtgaaattggctattaatctgtccttcatctcgtctatccttcattaaacttaaaaaaaagattctattattggctgggcgggtggctcatgcctgcaatctcagtactttggaaggccaaggcaggcggatcacctgaggtcaggagttcgagaccagcctggccaacatggtgaaaccccatctctactaaaaatacaaaaaaaaattagctgggcttggtggcgcatgcctgtaatcccagctactcaggaggttgaggcaggagaatcacttgaacctgagaggcagaggttgcagtgagccgaaatcatgtcactgccctccagcctggacaacaagagtgaacagctgtctcaaaaaaaaaaaaaaaaaaaaaaaagattctctaatgttactattaaagtcaatcaaaactttgggtgtgctttataaaacttcattttgtgtttcatcttcacacttaatactaaatgccattataagttcatggaacaggtttggcaagtagggagaatgaaatttattttatttgaaaacactgagtttgggctgggctcagtagctcacgccttgtcatcccagcactttgggaggccgagatggatggatcacttgaggtaaggcgctcaagaccagccagcccaacgtggtgaaaccccatctctactaaaaatacaaaattagccaagtgtggtggtgcatgcctgtaatcccagctactccggaggctgaggcaggagaatcgcttgaacccgggaggcaggattgcaccactgcactccaacctcggcgacaagagtaaaactctgtctcaaacaaaaaaaaaaaaaaaagaggaaaaaaaagaaagaaagaaaacactgagtttcaagtgctcctaaggtattttgagatagaggccagtcagtagtaaaggatactctgcaatggagaaagatttgtgggtggagctaaggaagctactggaagtagtttgaatttggtgaccaagaaaagcatgctcagagagaaaagatgttaacttgtttaaatagtgaatcaaaaatgctaacattaacctaagcaactacgcttgaccctcagtcagctggacttatcgttgtgtataaagaactatggcatttaattgtgtcttaaatataatgcaagctatcacggtaaaattttgagttacttactaattcctaaaagtaagccaagtacagctttaattatttttcctaactttggtctaaaaatgacagtcaagatttaggtaggttttacataaaattctacagattcagtaaaatacactcagtaaaataaacctttggggaataaaacttgtttttcactgtaatacctttaacatgacttgtgtactttttgccaggctcaatactaactggtttatacggattgcagacagatgtcgatatataactacataactttctcttcctctctgtgtccacatatttaagaatcctgtcagctaggtacagtcaatccctaagaattggttccaaaatgacagcccctctctctcactcagataccaaaatccacagatgctcaagtcccttatatgaaatggtgtcatatttgcatataacctccccacatacttaaaagttatctctagattacttatataacctaacacaatgcaaatgctatgtgaatagttgttatactgtactgtttagggaataatgacaagaacaaaaaaaagtctgtgcaaccatccactttttttcctctgaaatattttcagtcccttgattgagtccacggatacagaggatgcactgataactgtattatttcttccaacttgcataagaagaactgaaacttaaagaggtggtaccaacctgctcagagtcacacaattctggctttttgtgatataaatacacgcttttaggcaatatactagtggcctccaaacgttttgtacttgcacccattaagcaaaagaaatttgaaatacatgttccaacataaaattaataccctatgtttcacgtagaaatcaaatgaaataaatctaaatagaagttctaatatgttccctctctacccacacacccatggaacaaactgcatgccactgtatatactattgtacatgttaaaagatcacactgcaaccatataaaagtcaggagatttgggtttttcttttttcctttgaatatatattactgagaagtttgcctttaaaacactggcttttaatctactactcgtgacatatgcagagtaataagcgctcacaaaacttctgtcttgagggctcaaacaccaaatgattgctctaagaattttcacagtattacctcaaaccctattggttctacaacctttctctaccctagagtcctgttttccgcaattcccaattgggattcttctccggttcatttctgtaagaaatgagggcagagaaatgccatcagtaaacctttgaacacatgttaatttttctaggtaatacaatttgcattttcgtaaaactgggctttaatgacaaatccgatttcagtgatctttgcatacaccctttaaacacaccagttgccgcctgcgagatatcatcagactcatgctaagagccactccctaccccagctttccccagacctctccccgctttacagttattcgccacagcccgggagagtctggggacggccgcctgggaggggacggccgcctgggaggggacggcccggagcagacgccaggtttcccgcggctcaggagaccggtgccgcctcggagagcgcgcgaaggtgccgccggccgcccgacccgcccgaggaacggacatctcccgcccgggcccgcaaggacgaccatgaacaccgccgcagctcagctgaccctgcctctcccgggtggctgggggtcgccagccaagggggcagcgggcggaggatgaaccccggagcaagggaaagcgacagcgcgcgccttcaccctaccgccaacaagtcgaagtctcccaaaggaacctgatcggcggggctgccgtggtacgaccggccgctaaggccaccctgcgggcgtctcgacctcggctgaccgccgctggccccctgggaaccgcgtgccggccgcaggagaaggtagattcccgggagccccggcgcccaccgcggtactaaccgcgcctgcgccccgccctccctcccttcgggctccgcccgcgcctgcgcagttgcggggtttcgcgccgccggagtctgagaggccggaagtgccccttagcgggtgggggaagctggtaggcacgggcggctccgcagtgaccggactcgggggaggtgagtgatttgcctaagtaaaagggaaagataattgagcgcccccggcagctggtctacgcatgcgtccgctaggccggctgggagccggcaagggaaagccgagcgggccccattgggggaaaggggtcagtcacttcccggaagaggcggggccgcgcgggcccggcgctggattcgaaacgcttcctggtgctcctgggcctggcggttgagcccggggagctagtctttgcttgggtaaagaaagaggactttcctttttttttttccttttgagaaaattcagaaatttggaggcacagtagttaggattcaggccaaactggtaaatgacgaaggggcttcttccagagccaaggaggaagggttgtccgggtaagtcccgcgggacgtggagagacggcgccgcccgggtcctcccactgattcctttgaccatctggcttacggacgagctctttgttcgctgctcctccgaaaacgccttcaatgactccctttgaataaagtaggaagtccgaaccgagccgccaggccgcgacttggcccctgttttccactcgcgagggccctgcgtcaccccgcctcgggaaagctgcgcgttctccggccgcttgcgcttggccgaagctgctgggtcccgctgtgcttcccccgggcatgcgatggggataattcccacgcctcgctcaaagccatcccgggagagccctccctggtccccataggcacagttgggtgttcccttttccgtgttaaccttgtatttcggatatagttctgttatagtaattactttaaggtattgtagttatttacaatcagtctttcccccacggtaacctagagtgtaaaccccctaaataaacgtcagaagtaatgaagtcttaacttccttggcttaggtttcagcgcccttctcaaccccacactcccgcttcagtctttacacaacccttcccatgaatatgctgacctaacaagtaacctacttttcatactccaaaatcttctcttctgtgtggggaaaataatgcattgactgccacctcactccacctccaaataaattgatgttgaaattctggcctccggtaatggaattctttacatcaaagtcactttttatttctaaaagtaatcacatatatattatattcctactgtggcccttgccatggatcaacga

SEQ ID NO: 2927 - DNA, 6000 bp, Homo sapiens
gaaaaattgaggaactgtcactgttggggagactaaggagacatgatgattggatcctggaacaaaaaaggcattaatggaaagactggcaaaattcaaataagacctgtagaacaattaacaatattataacaatgctaatttcctgtagtatttttgtagctttttggtaaatctaaatttgtttcaggaaaaaaaaaatctgttttttaatgcaacatttctaggtgtgagatcttgctgtttcaaccccattgtgagaaatgacccattttggctagctattataatattcacattaagagagtttaccaaatggtatcagattcagaatatgtttgttgctggactgcagcaaacacaataagaaaacaagccaatgaatgaaaaacacacttttaaaactctgacggcatgctcttcacaaagaaaaaacagaaaaaaagacatgaacattctagtcataaaacaatggtccacaacacaaataaaataacctgaaacataaaatgtcaagaactgaacaaaaccaactgaatcaacatatgatgagatgatgacttggtgggtttctgtggcagtcaatttttatgagtctggtaaggaagggctgtcattaggtaaaggttgaattggttctggtacattgactgaattcattctggtacatacccagattttaagtcagttatcctcaaacagtttgtagcatccagtcccacttttccattccggaccacgctagatatgaaaggggagagcattggagatattcggttcaaggccacttctggggacattttaacttgacttgtaaatcaccactgaaagcagaaggaaagaataatgatcagggcttacaaatggactagatacaacactctgcctgaaaactggacagcatacagcagttcctcttgcatgaataaataattcatttcccatctctagcgcagcctcttccaatgatcctccagaagaaaccacctcactgctgctcagctactcaggactgggactacatcactgcttttcaggaacagaaggaactcctgaaatacaattcccttttccttcccaaagctgatttctacactgccacactctactcaaagtggtcccactctatctcactcgttctaccttagctgagtccaaggagccctcgctaacaatcctctatcccaacacaaaaacacacacatcactgagttagcaatctctccctgtgtgtccccacaaggagtaaaaacttgatggataataccgtataaaactctacaacaggctgacctgcttgaagctattacttactagaaattatttactgctgatatatctttctttttttttcttttttttttgcgacagagtctcactctgttgccaggctggagtgcagtggcgcaatctcggctcactgcaaactccacctcccgggttcaagtgattctcctgcctcagccttccgagtagctgggactacaggcacatgccaccacgcccagctaatttttgtatttttagtagagacggggtttcatcaggttggccaggatggtctcaatctcttgacgtcatgatccacccaccatggcctcccaaagtgctgggattacaggcgtgagccaccgcacccggcctactgctgatacacctttcttaatacctttccgtccacagtgtagtataactacctgcttacgtgatctcttccctgcagggtctatgttttgaatccccagggtttaacagaaatacctggcacatgctaaacactcaataaacattttttaataaataaatgagtaaggggacaaaagttagagaaatatttcagtatggagagaagataatgtgccccctccccagaatttggtaggggaatagatataacaagatccaaggaagagatataacaaaaatctacttgacaattaaattatgaaaacatacatctatgcagctatcaagcaacacagactaacatggatcttaaggtatttgactttaaggcactaagtccttacacttaaaaccacaaaagtagaaccaatacatcatatctaaattatctggaaactcatagggctgggggagggagtacacgaattcttcttaatagatttctaaatgaaagcctcttccttcagaggaaaaagtcgattcaaatgatcgtttccttcctcaattttaaagaataatgccacatcaaaagaaaattaatttccagcaagttaccagtaaatgatgctctggttctagttttcatacattataccacatgaaaacttacaagtccttgctaaaataaatgttgaaaattaaaacctgtttcagtttattatttcagatagtaagtaataaatttatttgctaatttgatagctcaaaaaataagaacactttgaccctatatagtgatgacaaccagaagtatcttcgagattaacacctttatattcatacttcagttctaaaatcatcctttttgtaaatataaaacaagctcttcttctgaccgcttaacagatgaccgccccccgactagtctctcatttcaaagtaagactaaacatctaacactgtactaccaatcataaaaatcatgtacttttttaaacattttatcacttacaaggagcgtccatatatattactgcagttgatcttcacaagcctgaggtagtaaggaattttaattcccagtttgcagataatatgggtaattattataatttgattctgaacagtatactaatccacatcataattttgaagcctatttttttctattcgccaacatttccaccttcatgtctatgtcacaattcttgaagggatgcttatcaaagtcatatgctaagtacaaatatacctatcttataaaaaagcaaaagggtctcacctatattaccgaattgttcttctgtgtttttccccacagtacccattattactttatctcttgcttctacaaaagaaggaaacagaaccaacacattctagacacctatctacccattatcaggcattatattactcatctctatctgtaatttcatttacatttccccaactctgttccctgagaacaataattgttcccatttgacaagtggaagctaaagaaacttgacaaatagaaaattaaagctcagcaaaataaaataacttgttgaatgttggaagctggaggatcagaatccaaatccggattctccaagtccactatacccatctttctctcaaataaacattgataacttctatcaccaaagagaaaagcatcaaggtgattttgtaaagcgtatatcttataaaatgtgaacagacaaaaagtaaaaatttaaacaaatgattgctttaccactaaaaacaaactggactattgctgacctactgctgaacctggtctgagtgattcactagtcaaatgttaaagggaacagccttgctctagaagccaaaccatactaagtgacaacaatacattctaattcagcaacggtcgtgactttaggatgacacctgagggaatgaattctatttccagggcagccataatactatgttttaacagtgcaaggtttcacgcagtattaaaatctatttcaaccatgaggaggtgtgacttctctaaaaaaaaagggcggggggtggggagtggaacacaatgactccaaaatcagaagtcacttagccaaaaacactggtcctttggtgcagtgaaccgggtacatggacagggagtcaccaccggtagtaactcttacgcatggcagcactataatacaccccagatatacaaatatttacggtggtcagagtcccctgaatactactactgcaatttgtatttcctgattttgacgtattgcaaaaggaaaatgcaaaattacaatttttgcaagggtctgctaccccaaaataaagttacaaaaggtcctttgatgagaggcctggggattacaaagacgtctaaagcaccatccaggttcttgcaattaaaatgagatgacaaacacggaaacatgtgccctgctgacgtcatggaacggaaaggggtggcatcctgctgcgtcacgtcgacgtcatacagcgcacgagggaagttacactggggaagcaatttcccccaaggggcaacattcgagaaaaacaagttagctcagacccgaagaatgaccaccccactctaggggacgtcttaaaaagggacactctcccctcttccaaactgtatgattcccctcatcaggcaacaaggaactaatactcggggtttacaggaaccaggggatgggccagatatggagaaagagacgcctctggccttgggggctcgttcttgagggaatcagcgtgatggggatgagaagggcatctttggaacgggggccttctccataggaagaggaggcgagtcccctggccatatttaaaccacagttctccacgccacctgtgcgactcgggatccaacctccccgcaccagccccagtccaggtacctggaacttagtccgatcggtaaccggcgactacgtggggtacaggtacccgagcgcgcccccgacagacgcaccgacctgcgcgcgcgccgcgggcaggatgcgtgcgcactccccggacgtcccgccccgccccctctgcggccccgaagctgggcggcgtgcgcgcccccgcgccgcgccgagccgggcgctcggaaaggcgtccccgcggtgcctgacagttccttcctcagcgcctgccccgtgagtgacgaggagcgcggagtctcgccatatcaggagggccctgttacgtgaggctgtgcaccgagactattccaggaagaagaggggacacttggtgggcggggtgatttcgggcagtcaggtgggcgacccgcgtaggcgtctgaaaggcccgcgtcgttagggagggcaggagtggcgtctctggttacggggtcgggcaaagggcagaggtcaccgtccaggttggacagcagcacctttgagcgatggcggcgtctggggaaccccagaggcagtggcaagaggaggtggcggcggtggtagtggtgggctcctgcatgaccgacctggtcaggttagtccggggccagttactcagtctgcggctcgggggaggaggcgtgccgtgcgctatgcgcccagtggagcttttgggcgctgggtctccagggatagacagtgctagctttgggtatgagctgcaggttttcgaagccttcagcctaccttcctggcatgaaagaacttgagtatataaaggtaaatctcaggggaggggacgtaataggccagggtttagtgaaagctctaatattactcaaagcgctccccaaagacctgccctccaaagacttgcgcccccaaagacctttcttggcccggctgctgagcctttccccaaacgagccagggaactttgcccacgtcattttacctccgagaatgtgcctacctcacagggttgttgtgaggactaaatgaagtaaagtgttttgtcaagcgtaacattatccaaattgggtattattcgtctgagcttattgtataaaataatgagttgagcagaaatcaaaaagactgtcacctttcaccatgttgattgtcggcattactgcagtattttatatttacagcgtatttttcagcaagccaagtatgaatcaaaataaaaacataaacacagtatttacaacctctgaaaacgatgatcaaattatgatagaaaatatgccaaatgaaaattgttgagttaggtcagtaagattgagtagacagatccttctgatttttcttttttttaaattaaggtagcttttctgattacaaaagtaatgtatgttcactgtaaaattagtaataaattcagatattccaagaaaatcctaccactccaattactgcagttcagtcttttgatgaatatcttttcagttgtaatgctactttgtgttataaaaatgatcaggtatgctac

SEQ ID NO: 2928 - DNA, 6000 bp, Homo sapiens
tctgcacatcaggaagtgcctggcacatagtataaattcaataaatatttcttgaatgaataattaaaaaaatgggtgatacaggtcataaaaaataaggtttactaatgaaaacatgattaacaaaggcctatgagcctaacgtctaaaaatattcacacattgttgttttgttgtggaaatctgtctttggaaaatctttgactttatatcccataagaccagggttgattccttgtatctttgtaatgtgtaactttagagatgagtgttcaagaaggaagaggatgatgagaaaaatataagtgagtattaaataatttcaattgtttgccatgctgtatgagctaatgatttttaaaaattattactacatacgacttactattcatagctgactgaaattagaaatgaaaaaaaaggttattcattgattgaattagcagtgtctggcacacagtaatgtaatatataaagtaagttgggcttggatgccatctaaaagggcttagttattgaagcagttttatttctgaagtgatactaaagaataggcatgcgtgtccaggctagttacagttaaatttaggaataaggcacagtaataaagatactatctttagacttgaaaattataaatccttagttgttattccttatcagtttataaagttaacaatgaatgtacagactacaagctatcaaatgtactgtagatgaaaagggcaataaacactagtcagagttagaggtagaatgatataatggaaaggtacgaattggggccaggcacggtggctcacgcctgtaaccccagcactttgggacaccaagtaggaggatcgcttgagcccaggggttcaagaccagcctgggcaatatagcgagagcccatctttaacaaaataaaaaatagaaaatatatatttaaaaaaataaaaaagaaaggttaaggattgggagacctgggtagtagcctttactagccacttactagccagtaagtaaccacttactggctgtgtgatttggagtaagtcattgaagctctcttccttatctcacttgtaaaatgtgaggatagaatgataggcttcaaagagtctctgagaactaaatattgtaggattttttacttcaagcttaaccactgtggtagcaaaaataacatactctctgctcccctctcccaaagtatgtccacatccaaatccccagaatttgtgaatatgttgttacgtggcaaggggaaattaaggttcctaataagtcaccataaaataaagagattattctgaattatctggttgtgcctaatgtaatcacaagagttcttataatgtagaagagggagccagaagactggggatcagagtgatgtaatgtgagaaagacctgaacaaccattgctggctctgaagatggaggaaggggccacgatgagccaaggatgtgggcagcctctggaaggtggaaaaggaaagaaaacagatcctcctctagagtctccagaatggagcccagccctgctgacaccttgattttagcccagtgagacctgtatcagacttctgacctccagaacagtaaaaaaataaacttgcgttaattattaaatttggtaatttgttacagcagcagtagataactaatataatcatgatactaactgtaactagaaaagttgcacccaagtttatcacagatgcagggttttaaatgaaaatcctatacgcagatttttgtaaagatcttcagtgtcataagtaacgagagatcatgaaaagtttgttgaaaagctgtgggaattagcagagagagtctatatgggaatacagtttttactaatgattttttactgatgattttactaatgattttgctaatcatcagtaaaatttttactagtgattttgctaatcatcagtaaaatttttactagtgattttgctaatcatcagtaaaatttttactgattcatgtgaagagaagaaacttggatattttatgaaggaaagaatatggccaagaggagaaattcttctctgggcttcagtttatttatctaaaaactgaaggactagaataaataatttccaaatttttctagctctgaaataagactttaaaaccctgacggatgctaaaatgggcctttgacaccactcccctaccccaccccacaaagtactatagttatttttagtatctgatggtcaagcttcacagaaagctctcagtttggtaacaaggaagtagctctgaattttaaccctgacacttttattcaggtaggatgtatgagaaaattttcttttcttttctttttttttttgagatggagttttgctcttgtcacccaagctggagtgcaatggcgcgatctcagctcactgctacctccacctcccaggttcaagcaattctcctgcctcagcctcctgagtagctggaatcacaggcgccagctaccatgcccagctaatttttgtatttttagtagagatggggtttcaccatgttcgctgggctggtctgaaactcctcactcaggtgatctgcccaccttggcctcccaaagtgctgggattacaggtatgagccactgcgcccggtccactttagttttcttactcttctgccacttcacacataaaatcatggtaaacatttagcttggtggatttcccatggaatgaatcattttagatgaaggtttattcctttatgtaactcaactttatgaatttttgatgaaactttttctaaagtgaaatacatgctctatttttatacaaaatttagtaagtaccatataaccttttcttgaaaagagtcatcaccagtaaaatcaattgctatattgtgttgtaaacacagtaatgttctttctacacagatgtctgcaaactatggcctgcaggatgttcttgtaaggcttgggaggtaagaatggtttttacatttaaaaaatgttgttaaaaaaaaatgtgaccttgaccacatacggcttgcaaagcctaaaatatttactatctggccctttacagaaaagtttacttactcttgctctagaaaaagatgtacaggcctcttcaacaaatgtctccaactagattcaattttatgctctgtcaccaaaggaaagtatttttatcttggcacagtgtctgacagaatagttctaatatttgtggaaaaataaaggtcattggtatttaaaattcttttgttgcttcttctcgttacacagtctcctactcatcctcaagttttcgtcagtcactataactgcctctagcagtctcttctctaactcccacctttctaatctcagtggaaatttggtaacacagcttataaatattttaaggtaaggttaaattggttacatgaagaccctagacctattttctgagtagaatacaggtggtttggtgcagcaatttggtgacttattttgattgtcccaaagcctttttgtttagttccacgttctctattaccctttggaaaagcaacatttcaggacgaatgaggtgttactgtagcatacctgatcatttttataacacaaagtagcattacaactgaaaagatattcatcaaaagactgaactgcagtaattggagtggtaggattttcttggaatatctgaatttattactaattttacagtgaacatacattacttttgtaatcagaaaagctaccttaatttaaaaaaaagaaaaatcagaaggatctgtctactcaatcttactgacctaactcaacaattttcatttggcatattttctatcataatttgatcatcgttttcagaggttgtaaatactgtgtttatgtttttattttgattcatacttggcttgctgaaaaatacgctgtaaatataaaatactgcagtaatgccgacaatcaacatggtgaaaggtgacagtctttttgatttctgctcaactcattattttatacaataagctcagacgaataatacccaatttggataatgttacgcttgacaaaacactttacttcatttagtcctcacaacaaccctgtgaggtaggcacattctcggaggtaaaatgacgtgggcaaagttccctggctcgtttggggaaaggctcagcagccgggccaagaaaggtctttgggggcgcaagtctttggagggcaggtctttggggagcgctttgagtaatattagagctttcactaaaccctggcctattacgtcccctcccctgagatttacctttatatactcaagttctttcatgccaggaaggtaggctgaaggcttcgaaaacctgcagctcatacccaaagctagcactgtctatccctggagacccagcgcccaaaagctccactgggcgcatagcgcacggcacgcctcctcccccgagccgcagactgagtaactggccccggactaacctgaccaggtcggtcatgcaggagcccaccactaccaccgccgccacctcctcttgccactgcctctggggttccccagacgccgccatcgctcaaaggtgctgctgtccaacctggacggtgacctctgccctttgcccgaccccgtaaccagagacgccactcctgccctccctaacgacgcgggcctttcagacgcctacgcgggtcgcccacctgactgcccgaaatcaccccgcccaccaagtgtcccctcttcttcctggaatagtctcggtgcacagcctcacgtaacagggccctcctgatatggcgagactccgcgctcctcgtcactcacggggcaggcgctgaggaaggaactgtcaggcaccgcggggacgcctttccgagcgcccggctcggcgcggcgcgggggcgcgcacgccgcccagcttcggggccgcagagggggcggggcgggacgtccggggagtgcgcacgcatcctgcccgcggcgcgcgcgcaggtcggtgcgtctgtcgggggcgcgctcgggtacctgtaccccacgtagtcgccggttaccgatcggactaagttccaggtacctggactggggctggtgcggggaggttggatcccgagtcgcacaggtggcgtggagaactgtggtttaaatatggccaggggactcgcctcctcttcctatggagaaggcccccgttccaaagatgcccttctcatccccatcacgctgattccctcaagaacgagcccccaaggccagaggcgtctctttctccatatctggcccatcccctggttcctgtaaaccccgagtattagttccttgttgcctgatgaggggaatcatacagtttggaagaggggagagtgtccctttttaagacgtcccctagagtggggtggtcattcttcgggtctgagctaacttgtttttctcgaatgttgccccttgggggaaattgcttccccagtgtaacttccctcgtgcgctgtatgacgtcgacgtgacgcagcaggatgccacccctttccgttccatgacgtcagcagggcacatgtttccgtgtttgtcatctcattttaattgcaagaacctggatggtgctttagacgtctttgtaatccccaggcctctcatcaaaggaccttttgtaactttattttggggtagcagacccttgcaaaaattgtaattttgcattttccttttgcaatacgtcaaaatcaggaaatacaaattgcagtagtagtattcaggggactctgaccaccgtaaatatttgtatatctggggtgtattatagtgctgccatgcgtaagagttactaccggtggtgactccctgtccatgtacccggttcactgcaccaaaggaccagtgtttttggctaagtgacttctgattttggagtcattgtgttccactccccaccccccgccctttttttttagagaagtcacacctcctcatggttgaaatagattttaatactgcgtgaaaccttgcactgttaaaacatagtattatggctgccctggaaata

SEQ ID NO: 2929 - DNA, 6000 bp, Homo sapiens
tcctccatcttaaaaaaaaaggcaacatttctagtaagaaaggactcaaaaatgatggggatatgtcaaaaggacccaaaagccacttgatagcactcccaatgacaaaaagctggagcaactgaccaacaaaataaatgataataatatttaatttataacccacagaggaaaatacatacctaaaaattcatactggcataagtaaataactgaataaataaataactgaaggagaaggaagagtgtttctttacagtagaattcaaattaataaacggggaggaatgagaaaaagagaaaaagcacacttagacaagcaccagagtagtaatagttataggcaagaatcatccatggatgctgaaattaatggacaaaaggatgatgagaaaccgggtattggcaaagtctcaaagcatcactcagcaaaatacagtacttaactaattacaaggagaaaaatcagttaactttatagtgatcacttaaccaagttatcaaagttaacttagtagtaaaaaggcatatggatatcatatattccctgatctgatgcattgaggatggtacaacaacacatctgtactacacttgggaaaaaaacatatttttcactctaatgaaaagaaaacattagacaaacccatgtggatgcacattttacaaaataagtagccagtactctttaaaagtgtcaaggtcatgataggcaaagaaaaattgaggaactgtcactgttggggagactaaggagacatgatgattggatcctggaacaaaaaaggcattaatggaaagactggcaaaattcaaataagacctgtagaacaattaacaatattataacaatgctaatttcctgtagtatttttgtagctttttggtaaatctaaatttgtttcaggaaaaaaaaaatctgttttttaatgcaacatttctaggtgtgagatcttgctgtttcaaccccattgtgagaaatgacccattttggctagctattataatattcacattaagagagtttaccaaatggtatcagattcagaatatgtttgttgctggactgcagcaaacacaataagaaaacaagccaatgaatgaaaaacacacttttaaaactctgacggcatgctcttcacaaagaaaaaacagaaaaaaagacatgaacattctagtcataaaacaatggtccacaacacaaataaaataacctgaaacataaaatgtcaagaactgaacaaaaccaactgaatcaacatatgatgagatgatgacttggtgggtttctgtggcagtcaatttttatgagtctggtaaggaagggctgtcattaggtaaaggttgaattggttctggtacattgactgaattcattctggtacatacccagattttaagtcagttatcctcaaacagtttgtagcatccagtcccacttttccattccggaccacgctagatatgaaaggggagagcattggagatattcggttcaaggccacttctggggacattttaacttgacttgtaaatcaccactgaaagcagaaggaaagaataatgatcagggcttacaaatggactagatacaacactctgcctgaaaactggacagcatacagcagttcctcttgcatgaataaataattcatttcccatctctagcgcagcctcttccaatgatcctccagaagaaaccacctcactgctgctcagctactcaggactgggactacatcactgcttttcaggaacagaaggaactcctgaaatacaattcccttttccttcccaaagctgatttctacactgccacactctactcaaagtggtcccactctatctcactcgttctaccttagctgagtccaaggagccctcgctaacaatcctctatcccaacacaaaaacacacacatcactgagttagcaatctctccctgtgtgtccccacaaggagtaaaaacttgatggataataccgtataaaactctacaacaggctgacctgcttgaagctattacttactagaaattatttactgctgatatatctttctttttttttcttttttttttgcgacagagtctcactctgttgccaggctggagtgcagtggcgcaatctcggctcactgcaaactccacctcccgggttcaagtgattctcctgcctcagccttccgagtagctgggactacaggcacatgccaccacgcccagctaatttttgtatttttagtagagacggggtttcatcaggttggccaggatggtctcaatctcttgacgtcatgatccacccaccatggcctcccaaagtgctgggattacaggcgtgagccaccgcacccggcctactgctgatacacctttcttaatacctttccgtccacagtgtagtataactacctgcttacgtgatctcttccctgcagggtctatgttttgaatccccagggtttaacagaaatacctggcacatgctaaacactcaataaacattttttaataaataaatgagtaaggggacaaaagttagagaaatatttcagtatggagagaagataatgtgccccctccccagaatttggtaggggaatagatataacaagatccaaggaagagatataacaaaaatctacttgacaattaaattatgaaaacatacatctatgcagctatcaagcaacacagactaacatggatcttaaggtatttgactttaaggcactaagtccttacacttaaaaccacaaaagtagaaccaatacatcatatctaaattatctggaaactcatagggctgggggagggagtacacgaattcttcttaatagatttctaaatgaaagcctcttccttcagaggaaaaagtcgattcaaatgatcgtttccttcctcaattttaaagaataatgccacatcaaaagaaaattaatttccagcaagttaccagtaaatgatgctctggttctagttttcatacattataccacatgaaaacttacaagtccttgctaaaataaatgttgaaaattaaaacctgtttcagtttattatttcagatagtaagtaataaatttatttgctaatttgatagctcaaaaaataagaacactttgaccctatatagtgatgacaaccagaagtatcttcgagattaacacctttatattcatacttcagttctaaaatcatcctttttgtaaatataaaacaagctcttcttctgaccgcttaacagatgaccgccccccgactagtctctcatttcaaagtaagactaaacatctaacactgtactaccaatcataaaaatcatgtacttttttaaacattttatcacttacaaggagcgtccatatatattactgcagttgatcttcacaagcctgaggtagtaaggaattttaattcccagtttgcagataatatgggtaattattataatttgattctgaacagtatactaatccacatcataattttgaagcctatttttttctattcgccaacatttccaccttcatgtctatgtcacaattcttgaagggatgcttatcaaagtcatatgctaagtacaaatatacctatcttataaaaaagcaaaagggtctcacctatattaccgaattgttcttctgtgtttttccccacagtacccattattactttatctcttgcttctacaaaagaaggaaacagaaccaacacattctagacacctatctacccattatcaggcattatattactcatctctatctgtaatttcatttacatttccccaactctgttccctgagaacaataattgttcccatttgacaagtggaagctaaagaaacttgacaaatagaaaattaaagctcagcaaaataaaataacttgttgaatgttggaagctggaggatcagaatccaaatccggattctccaagtccactatacccatctttctctcaaataaacattgataacttctatcaccaaagagaaaagcatcaaggtgattttgtaaagcgtatatcttataaaatgtgaacagacaaaaagtaaaaatttaaacaaatgattgctttaccactaaaaacaaactggactattgctgacctactgctgaacctggtctgagtgattcactagtcaaatgttaaagggaacagccttgctctagaagccaaaccatactaagtgacaacaatacattctaattcagcaacggtcgtgactttaggatgacacctgagggaatgaattctatttccagggcagccataatactatgttttaacagtgcaaggtttcacgcagtattaaaatctatttcaaccatgaggaggtgtgacttctctaaaaaaaaagggcggggggtggggagtggaacacaatgactccaaaatcagaagtcacttagccaaaaacactggtcctttggtgcagtgaaccgggtacatggacagggagtcaccaccggtagtaactcttacgcatggcagcactataatacaccccagatatacaaatatttacggtggtcagagtcccctgaatactactactgcaatttgtatttcctgattttgacgtattgcaaaaggaaaatgcaaaattacaatttttgcaagggtctgctaccccaaaataaagttacaaaaggtcctttgatgagaggcctggggattacaaagacgtctaaagcaccatccaggttcttgcaattaaaatgagatgacaaacacggaaacatgtgccctgctgacgtcatggaacggaaaggggtggcatcctgctgcgtcacgtcgacgtcatacagcgcacgagggaagttacactggggaagcaatttcccccaaggggcaacattcgagaaaaacaagttagctcagacccgaagaatgaccaccccactctaggggacgtcttaaaaagggacactctcccctcttccaaactgtatgattcccctcatcaggcaacaaggaactaatactcggggtttacaggaaccaggggatgggccagatatggagaaagagacgcctctggccttgggggctcgttcttgagggaatcagcgtgatggggatgagaagggcatctttggaacgggggccttctccataggaagaggaggcgagtcccctggccatatttaaaccacagttctccacgccacctgtgcgactcgggatccaacctccccgcaccagccccagtccaggtacctggaacttagtccgatcggtaaccggcgactacgtggggtacaggtacccgagcgcgcccccgacagacgcaccgacctgcgcgcgcgccgcgggcaggatgcgtgcgcactccccggacgtcccgccccgccccctctgcggccccgaagctgggcggcgtgcgcgcccccgcgccgcgccgagccgggcgctcggaaaggcgtccccgcggtgcctgacagttccttcctcagcgcctgccccgtgagtgacgaggagcgcggagtctcgccatatcaggagggccctgttacgtgaggctgtgcaccgagactattccaggaagaagaggggacacttggtgggcggggtgatttcgggcagtcaggtgggcgacccgcgtaggcgtctgaaaggcccgcgtcgttagggagggcaggagtggcgtctctggttacggggtcgggcaaagggcagaggtcaccgtccaggttggacagcagcacctttgagcgatggcggcgtctggggaaccccagaggcagtggcaagaggaggtggcggcggtggtagtggtgggctcctgcatgaccgacctggtcaggttagtccggggccagttactcagtctgcggctcgggggaggaggcgtgccgtgcgctatgcgcccagtggagcttttgggcgctgggtctccagggatagacagtgctagctttgggtatgagctgcaggttttcgaagccttcagcctaccttcctggcatgaaagaacttgagtatataa

SEQ ID NO: 2930 - DNA, 6000 bp, Homo sapiens
ggaggtcattttcttgtgttttaaaaaatttgtttatcttttctttccatatctcctggtttggatcctaggacatcctggaccctggcactatgcactgggcaaggacagaaaattctccaatgaaaaccctctcccaggtcaaagacatagaaagggggactcttcaggatgtaatcttttttttttttttccccaccaactcttctgtccctaaggcaggcaagctctagtgatgaaacaggactcttgcagtagcctcttagactcttttcttttggggtttcttctccagattgacacagtaatggaaagtatataaaaacatggggagggaaaaactcccagtttcaagccagagtaccaagaaaaggtgccactgggaggcagagtacgggggaaatcacagagaagaggggctggagaaaaggatcctttaatctgtgtgtgaagtctcaggcttatccttgagcttcacacatggaaccggacagaatcagtatagcaaagtctttgagaactgagctacagcatagaacagtgcccagactagcctctgggtggtgcgtactttgggaaaaccagagtaacatttaaaggctttgaaaactattctgatgaatcaagtccacagaagatggtttagtgctttcactctgaacctaactttatgccaattcatttggcaattaagtgaaatgaacacattccttgaaagagataaactatcaagattcactcagaaagaaatagattatctgattaatcctatatctgttaaataaattgaatttatagttaaaaaaaaatctttcacaaatgaaatgccagacccagattatcttgggtgaattctaccaaacatttaagacaaaaagtcaccaattttatgcagtatcatccagaaattgaaaaggatacaacagtttctatcttactttatgaggctgacatttttctgatatcaaaatcagtcaaagaaagtagaagaaaacaaacaaacaaactataggccagtatccctcatttgaacaaagaagtaaaactttcgaaaaaaattagcaaattgaatttagcaacatatataaaatacatacatatatatgtatacaacatacattatctatgtatgtatacaagtaaaataatatatcataatcaagcaggttttattctgggaatgaaagccaagttcaacatttgaaaatcagtctatgcaagtctccatattaacagactaatacaagataaactgtatgatcatatcaatggatgcagaaaaaactaaaatttaaaatctgttcataataaatactcttagctaaataggaataaaagggaatttcctcagcctcaaacttataaaggacatctacccagaacctacagcttaatatcatacatggtgaaagactgaatgcttttcttctaagactgagaatgaggcaaagatgttcactttcccaaatcctatataacatagtactggaagttgcaggaagtcaagaaaaagaaataaaaggcatatggattggaaaggaagagataaatctacctaatttgcgtataatgattgtctatgtagaaaatcccaacgcatattcaaaaaatcctagaacttacgagttttttaaggttacaggatgtaagatcagcataggaaaatcaatcctatttctttatactagcaatgaacaatcagaaacagaaagttaaaaaatagtaccaattataataccttcctgccaaaaaaatgcttagttataaatctaataaggtatgttcagtatctatatgtagataaaggaattgaagaagacctcaataaatacagagatatataatatattcaaggatgggaagactcaacatagttaagatgttttccctaattagttttaattagtttcctaagtcaattttccctaaattaatgtacactatttagtgtaatccccatcaaaatcccagcaggattgggtagatattgacaagatgattttaaaatttacgtgggaagcaaagaattaaaatagccaaaacaattttggaaaagaacaataaaaatggaggagtcagactactcagtttgaagacttattatcaaggcagtgtgatattggcaaaagaagagccatagatcaatagaacaaaatagtccaataatagatccatataaatatggtcaatgattttccacaaaaacgcaaaggcacttcaatggcaaaaggagtcttctcagcaagtagacatctacatgcaaaaaaaaggaccttgacttatatttcaaaccatgttcaaaaattggtgaatcacattcttaaatggaaaatttcaaaccataaaaatccaagaagtaaccatagaaggaaggctttgtgacttgggctgggcattgagttagatacaacagtagaaacataatccataaaagaaaaaagttgataaattggatttcactgaagcttaaaacttttgctctgctgaagagactgttaagaggaagaggaggacaagaagcagtaagagaaaatatttgcaaatcatgtatctaacagagaacaaatttcaagaatatgtagctttcaaaagtcaacattaagaaaaccaacaacaataaaaaaaatggggaacagatctgaacagatactccaccaaggaatatatacaggtagcaaataaacacatgaaaagatgctcaactttattagtcattaggaaaatgcagattaaaatcattatgagatgccatgatgtacctgttagaatgactaaaatcaatgacaataataacaaaattgaccatattaaatgttggcacgaatgtgtagaaactggaactctcatgcgttgttggtttgctaaatgtaatagtcactcaggaaaaaaggttggcagtttgttttatggttaaagatacacttcatcatatgacctagcaatccagtcttaaacatttatctagaaatgataaatgtacattcacgcaaaacatgtacatatatgtttgtagcagcatcattcataatcatcacaaactggaaatcacctacatgtctttcattgggtagatggatatacaaactatggtacatctgtacaatggaatatactagtaggctataaaaaaggagcaagctattgatacatgcagcaatttgagtctcaaatgccttatgctaagtgaaagaagaagctggtctcaaaaggttacatactgcatgattccatttatatggcattctggaaaaatgcaaaactgaaggggccaagagcaggtcagaggtttccaggaataaggaatggtcggaatatttaaatacacagggatagcatgaagacatattggagagtgatagaattgttctgtatcctaattttggtgatgtttacacaaatctctgcatgttatacaactcttataggtgtacagaaaaagatgaattttactgtgtataaagttaaaaaatagtttataatttttatgtcaccttttttctttttactgtttgaatgtggctactggtaagtttaaaattatgtatgtggcttgcattattatttctattacatagcactgcttcagatattagaagtgcaaagaaggattaggtgtggtccgaagtctaggagagggatatggcagaaggaagtcttctaagaagaggaggcaaatttaaatgacctaagtttagcctctgccccctacttccatcctttgttctacagattttgtttgagagcctaattcatgtaaatatgccaactctcagatgtagtaattccttagagtctttttccttgatattggaaattaaactctaccactcaagatgaaaagaatgctgtgcaatggaataattagtggcatccttgcatttgtaggcacaacagcctacattgctgaggcagttgacaagttccttgacaaacttgtgatgaatgtttaagttcatattattattggttagacattattgtttaaattattgcacccaagattgtttattgtttataaattgtcataaagggaggtttccagaaggatgcctagccagtatgtttataatttgaagttaggagtgccaacccaaaattggagtagaatctaagaatatcatgatggactttaaataggtaaatctagcgatactgaaatataatacagataaatttaaaatttcaaaatggattctaaaatttagttgtcccagttaagaagagggatatgtagcttagcagtggtaaatacataaaaatgttagggcttttagttaataagaagcataataggagtcactactgatgaggctgccaaaaaagctattttaacttacaatgccatttatcaatagaagtttaatacataaattaaggcatggatttttgtatttgtttctgtgctctttagaacacacctagaatcttatcttgagatctgggtgttatcctctaagagagctatagacaaactggtacatattcagagaggagagagccaaatgatgaaggaaattgaaacaagtcagatgaggaatagtgaaggagactgggatagtaagcctgtctaagaggtgactcctagtggggttgaaagataggtcacgagaactgccttcaaataattgaagggctgtgatattacagataaattaaacttgtcccataaagttctcagaaccagcaaatggaattttcagagagatattaaatttcagtgtaaggacacactaagggttagagctaactcttggaaatgagtcacctcttcaaagtttttcgtaaagctctgaaatggtttggatatgtgtcacctccaaatatcatgttgaaatgtgacctccagtgttggaggtgagcctagtgggaagtgtttgggtcatgggggtggatccctcatgaatggtgtggtgctgtccttgtgataatgaaagagttcttgctctgacttcatgtgagatctggttgtttaaaagagcgtggcacctcctcttgctctcactgccactctcatcttgtgatgtgcctgctctcccttcacctcctgccatgattgtaagcttgctgaggtctttgccagaagcagatgctggcaccatgcttcctgtacagcctgcagaactgtgagccaattaaacctctttttataaattatccagtcctcggttagttctttatagtgatgcaaaaatggacggacacaaactctattgcttgaacttactttttgttgagactatctccttcaaactggcgtttccacaaagttcttgtctgactctcacttccatacttggagtttcagtcagtaatcatttaatgcagcaactgataagaataatctatcattggcagaaaaccagtcatttacctttttctttttttctttttcaagtttcattttaggttctggggttacatgtgcaggtttgttacgtgggtaaattgcatatcactggggtttggtgtacaaaagatttagtcacctagatagtgagcaaagtacccgattggtaggtttttgaccatcaccctcctctcaccctccaccctcaagtaggccccagtgtctattattcccctctttgtgtccatgtatactccaatgtttagcttccacttacaagtgagaacatgtggtatttggctttctgttcctggttagtttggtaggataatagcctccagctacatccatattgctgcaaaggacatgatctcattcttttttatggctgtgtagtattccatggtgtatatgtaccacattttctttttttctttttttttttttgagatggagtcttactctgttgcccaggctggagtgcagcggcacaatctcggctcactgcaacctccaccccctggattcaagcaattctcctgccttagcctcccaagtagctgagactacaggcatgcgccaccatgcccagccaatttttgtatttttttgtttagtagagacgtggtttcgccatgttaaccaggctggtc

SEQ ID NO: 2931 - DNA, 6000 bp, Homo sapiens
acctattggtaccagacactagttggacagtgttcccaggaggtccaggcccttgtcaataagagctgttcaataactgtttgttgagttaacgtgaaacaggaggtcctcaatgtgtgtgtgtccgtagctgtatgatggcagtggaggggtgggcaggaaggaaaccaaggcttgagttcttaccatgtgcctggcactgttgcctcataacaactggtcactggagagaaacagagacttgggggcttttccagacacacagctagtaagtaatagatccacatttaaattcagttttctcttactcgaaaatccatgttcttcccacttaatcagatagggaatgattgccacgtgttcctcttgccacagaatgacaccaggaggttccatctctaacccatgtttcttttcccaagcatccctcagatctatgacccaggccaaacccaagccaaaaatgatcacccctgattctaggccagaaaataggaatcgtgtgaaatctaagcagaatgaggctgtgtcaccactagccaaacctcttgttcatactgcgcaggttttaggaaaacaacagcctttaatgcatgctcgaaattccttccatggtaagccactgtgagaaaaatctcacccaaacaatgtgctcttggcagagggagggccggtgtcttttcaggcaaaaagcaaaccagcagggacccagaaatcactctagggagtgttggtttccccagaagatctagctttttaaaaataaacttagcaaaggatttcatttgcccctctgccccacctttgcctctcactgcttggagaggaggaggattgtggagttccttgtcccgggtcagttcccagctcagcattgatacatctgcttctcaagtttagcaccaaatatttattctgataaagtgagtttaaaaaaaaaaaaaactagatcgattattgtctggcttggtctccaaaaacaagtccctgcaattgacagtggttgcatgaacttaagaataatagatccttaggaaggaaggctgttcattcagtcattcaacagaaaattagggtacttctgtgtcactgaggtgcagccccagtgaaatgaactcagaagcctccagtgtttataccactgagactggggcagagtagtctggagtgctgcatgtaaagctaggcactccccagtgatggagcttccagctgcccctaccattcggtgcacaagtgtccctgaacttcggtgaagtatgagccaccaagctccgcccaagggtgaccacagaagtagacaacttacgaaccagaaacatcaaccagcaaccccagacagtttatgtaagattgcttcattccagagagcagaactgggatccatgggcagaagtttcaaggggacagattccagttcgggagagagaagaaccctgtaactcttagaggcgcctttgagcaacgcgctctcaaggtgttccagcagggtgaggatcaccccccagaagtgctgctgggccaagccctgccttgaacaagatcctgaggtctcgcccaacagcaaggttctctggttagcaccaaatgagtggctcaacagttcgtgttgtggagcttcagaggcaggacaagcagtcatgggctgtggttggcggccgcaggccccgatgcttaggccaggccttgagggtgggtaggtgtcaggtaggtgggagacccccagcatgttgcaggcccaggaaagcacccttcacctgcagagtaaaggggctcctgcttagctgactgccagacttgcaaaggggaattaattattgtttgtgatacaattaaaatcccccaatgaaaggccttgtataaatgtaaattatcattattgtcattaaaggggctagacgtctggcctgctggataatatccccacatacctctgagcagaaaagaaagccagcccaaggcaggaattttgctcctgctcttccaaagcaatagcagtaagaagcggcaggccaaggagggctctgcccgtggctgtgaaagcagagccccccactctcatccagggtgagcacgcagctctctctgctctgggagtcaagtgactgtgtgtcccctgagggccagggccctgcccaaatgcagtcccttacccctgcaggaaccagcccattactagcacaggagtggcccatgagtgtgtgaatatttagttgtctgctgatttgaagggtggaaggaacatgagcaggatggatactggccagcattcttgaggtcctaagtcagatctggagacaaaggggagatagacggctcagacccgtgcagcacctctgatgatgcttgtgaaggctcttgcctcttaacccctctagctaagcgctgggagaggtcatttgttacattactgcttccacttaagaaactgtctctggctaagtggttggattaataccaaagcagaaataataataatggataatagtatattagactgagcagtgacctcagaaaccatcccctcactttgcagatgaggcatctctggggtacagagaggtgaagtggcttctccaaagcagcgtagcagagaaaagcagagctggaatcacagctaaagctcccgtgccaagtccacagtttgactatgcgggatgatgttacctcccctgtgacagcaagtcacagagatattgcccctcatcaaccctagggagttttaagatgacctttatgttacaggaaccttctgggcttcctttgctcttctggggctcgttatttagagaacatttgtggtccctcacatgtcacctaggtggactgcacacaccctccttcttgaacttcttttccttcccccagacactcagagtagcctgcattcttcattagggtgccccagcacttccaagaaccacatgggcccgtgagagggaggtcaaggtcatcccttttgtctcttgttatcatagtcataattctgctgaaaagctacacgatgcagatcccaagatgagagtgaacagcaccagtcaatacctgtagacacacagagctaccagagggagggccatctagggggttttgtagaacaaatgtaggtgcaatgggggttggcagtaagtagccctcgaaattcattactgagctgttggcagctctaggaaaagtttaatggaggagactaaaatacagccacaatgaggtttgggatgggagagaacacgaaatcaaaaaattttagaaattatttatcttgctcccttactgcatagatgagaaaacagagcagtgattcaccacgatatagcagagccagggacagaacccaaggctcccgactcagtggacagtacacttgccactggaaatcatggtggcatggaaagaatgtgccctttggagtcaagcagctctggattcataactagcattgccacctattagctgtgtgatcttagaaaagttactttgggccaggcatggtggctcacacctataatttcagaactttgggaggctgaggcaggaggatcacttgagctcaggagtttgagaccagcctgggcaacatagtgagacccgtaacatagcaagaccccatctctacaaaaaaaaaaaaaattaattagctgggcgtggtagtgcactcctgtagtcctagctactcgggaggctgaggcaggaggatcacttgagccttggaggtcgaggctgcagtgagccaagattgcaccaccacactccagcctgggtgacagagtgcagacagagagagaccttgtctcaagaaagaaaagaaaagaaaacttactttccatctctgatcgtagatttatttttggcaaaaatagaatcacctgcctggtagtaagcctgttagaaggagtaaatataaaataatacacatgaaaataagtagcatgatatctggcatgtagtaggcacctccctttccttatactcatggcttccagacttttttttttaaccacaatctacaagatattttacatttgaatccagtatatataactaaaacaaaagtgccacatacagtgcactctgattttatttcactttattttaatgctgctcagaacccactaaatggattttgtgatccactgtttgaacaagccttctttacaccatgtgtggatatcattcatccacgttgcatatatgcccttcctttccttccctccctccctttctgtaacggaagcctggggccgcagggctacctgctgtcagcatgtgcagggcccgagctggtgcagtgtggagtgatccctgcagcccagcagagcagatgcatctcctcctcctgtgcttgcccccagcctctctactgcatgattacagaagacttgtaaggccccctcctgccagacgttctgtcatctgccagcctgcatggaacttccccacaccctaccccagcagagcccacctgaagttcctgttgtgagaattactcttgttaccaaaggccattgtctccagaaggccactgtaccccagcagggagagtggagcttggacaccctctcccattgagtagtttcttctttgggaattgctgcttttctgtctgaaagcccagagagccaggtgtctgcggtgtgatttcagctgtcagggggataagggtgaagagaggagggaccatggccatcttgctgcccctcccccacatcctcaaacacccagccaggggggtgaatgtcccagagtgttgggtgaccaaaagctgtgtccaaaagccagcatgcaggggcctgagcacctgtggaagccatgagctctggcctctggatgctgagatctggtggaagaaagtgaacttacaaccaggcaaataacacttcaaagccctagagagactcaggggaggggaaggttagaggcctcaaggagttgatctcctaagtgttcctgaggccctcctttgggagtcctgcactttgctgtggaggctgatgcctgaccatgctgcgcacaaacctcggagcactgttccagctggggtgtgacttggggcctggacccacattccaggttcagctctgctgggtccctgggcacttcctctttcagggtcaccctttggtttttcccctttcgatgactaaaaagtggagggtaatctgtgagcttggtggtgactcaccaccatccgacaggcggcccacttttcccagcaggtgagctgcgtgagtagccctcctcctggccgggactgtggtgagctccctgcaccccaccccaggcagccacgtggccatcagcacatcatggtctgtgctgagcgcctgctcttgcagccctgggcagagtgagcagaggactcaccatctgggcacaccaggcaggtgcagatggggagacaagataaacccagggctggggctcttctctgggttcccaggccccaggcagcagcacattccttagccccccacacccaccacctggcctcgttcccagccccagcccagccaggtgcacccatcttcccagcctctctcagtgccacacagccattcctgcctctcatcaagcaggttatgatgggcacggcagtctgagagggagggggatggagaggactggctcacgctccgcctactagctctggggcctcaggtcaaccccctgggcaggcaggcattcatttagcaccaaattgacattcatcttctgggagcttctgacagggtgagcaccaagggcactaagggtgaaccatccccaaattctgccctctaggcacttacagggatgacctatgctaacgtgccattaggatacgcagtgtcacaggaaccatcctaacctcccgcccttagtctccccttccccttccttgtaatgtttgacctcggcagtttcctttttccttctattaattacaacattctatcattctaaagtatatcttaagtaagccaaatgcttgcatttgagaaatatttattgagctggtga

SEQ ID NO: 2932 - DNA, 6000 bp, Homo sapiens
taaaagagtcacctgagcctggggaagtggaggcttcagtgagctctgatcataccactgcaatccagcctgggcgacagttagaccctgtctcaaaaaaaaaaaaaaaaaaattaaaaaaagaatttatcatgaacagttaatacacgcacatggttggaaacaaaggatactgttaaaacagtttcagctgggcgcagtggctcacacctgtaatcccagcactttgggaggccgagttgggtggatcatgaggtcaggagatcgagaccatcctggctaacacggtgaaaccccgtctctactaaaaatacagaaaaattagccgggagtggtggcaggcgcctgggaaggctgaggcagtagaatggagtgaacccaggaggcggagcttgcagtgagccgagatcacaccactggagtccagcctgggcgaccgagcgagactccgtctcaaaaaacaaacaaacaaacaaacaaaaaaagtttcttagacaaattgattacaattgcatatcaaattttaatttcaagcttatttcctttccaagcaggctaaatattcctcttagacattttgtaaaaaagaagcatattagaatcatcagtattagcctggagaaagcaaacaatgtctggaattattagctatcttctaagtctagttaaaggtaactgtcttgtgccaagactgacagtgagctaaatgaactgtttttttttgagacaggatcttgctctgctgcccaggctggagtgcagtggtgctatcatagctcaatgcagccttaaacacctggacttaaggaatttttccacctcggcctcccaaggattacaggtacatgcctggctggttttttaaacttttttttttttttttgagacagaatcttgctctgttgcccccactggagtgaagtagtgtgatcttggctcactgcaacccccacctcccgggctgaagctatcctcctgcctcagcctcccaagcaaatagaactacaggcatgtgccaccaagcctgactaatttttgcatttttagtagagacaaggtttcaccatgttgctcaggctggtcttgaactcctgagcttaagcgatcctcccacctcagcctaccaaagtgctggtattacaggcatgagtcgctgtgcctgccttacagttttttgtagagatgagatcttgctatgttgccaggctggtctccaactcctgggctcaagtgctcctctggcttcaagtcttctaaaatgttgggactacaggcatgaggtaccatgcctggccagctcattaaagtgtatcagaaatggtagtagcttctctaaagggatagcacatgacatcagactataatactcaggtttgaggctgggtgtggtggctcacacctgtaatcccagcactttgggaggccgaggtgggcggatcacttgagatcaggagttccagaccagcctggccaacgttgtaaaactcatctccacaaaaattacaaaaattagccaggtgtgatggtgtgcacttgtagtcccagctatttgggaggctgaggcaggagaatcacttgaaaccagggcgggtggaggttgcagtcagccgagattgtgccactgtactccagcctgggagacagagcgagactctgaaaaaaataaaaatataaatataaaataaataaaactcaggtcagaaacacatcttctttctcagtatacagtcttgctgcagattctgtaagcacacagacggttaagcatacagaatctggaagaagactggattctagatctatcacttactagctctgtgatctggcgcaaggccaggcaattgaattttaatctgtaggcccgagatttctttctttttttttttctatggagacggagtctcgctctgtcgcccaggctggagtgtaatggcgtggtctcggctcactgcaacctctgcctcccggattcaagcgattctcctgtctcagcctcctgagtagctgggattacaggtgcctgccaccatgccagggtaatttttgtatttttagtagagacggggtttcaccatgttggccaggctgatcttgacccgctgacctcggcctcccaaagtgctgggattacaggcgtgagccactgtgcccaccagagatttctaaattgagctgattgtcaggaacatccagggagctttcaaaaatgattccaggctgaggctgggcggggtggctcatgcctgtaatctcagcacttggggaggccgaggtgggtggatcaccggaggttgggagtttgagaccagcctgaccaacttggagagaccctatctctactaaaaatacaaaaattagctgggcgtggtggcgcatgcctgtaatcccagctactcagaaggctgaggcaggagaattgcttgaacccaggaagtggaggttgcagtgagctgagattgtgccattgcactccagcctgggcaacaagagcgaaactccatctcaaaaaacaaacaaacaaacaaacaaaaaacaaaaccaaaaaaaaaaaaaatgattccaagctgggcatggtggctcacacctgtaatcccagcactttgggaggccgaggcgggcagaacaggaggtcaagagatcgagaccagaccatcctggccaacacagtgaaaccccgtctctcctaaaaataccaaaattagctgggggtggtggtgcacacctgtagtcatagctacttgggaagctgaggcaggaggatcgcctgaacccgggaggcagtgagccgagattgcgccactgcactccagtgtggtgacagagccagacttcctctcaaaaaaacaaacaaaggttccaaggctctactccagaaattaagacccattatgtgtgggctgggcacaggaatatgtttaaatccccccccacctccccagggtgattctgctgctgaattaggttttggaaccacttccatggggaaagggtaaactaaactggagaatgcaaaaaccttttttttttttttttttttttttgagacagagtctcaccctgttgcccaggctggagtgcaatggcgcgacctcggctcactgcaacctccacctcccaggttcaagggattctcctgcctcagcctcccaagtagctgggattacaggtgcccaccactacacccggctaattttgtgtgtgtttttagtagagacggaggttcaccatgttagtcaggctggtctcgaactcctgacctcaggtgatctgcccgcctcggcctcccaaagtgctgggattacaggcgtgagccaccgcgcccggccagcaaaaaccttttctaagagttaattttgcaggatggatcctgagctccttcaggtgtttgataacattttatttattttttgagacagagtctcgctctgtcaccgaggctggagtgtagtggcgcgatcttcgctcactgccccctccacctcccaggttcaagagattctcctgcctcagcctctcgagtagctgtgattacaggcgcccaccactatgcccggtaatttttgtatttttagtagagacggggtttcgccatgttggccaggctggtctcaaactccggacctcaggtgatccacccgcgttggcctcccaatacgctgggattacaggcgtgagccactgcgcctggctgtttgctaacattttaaaatttcaaccttcctcttccttaactggtcttcccctaccccccctcaagacggggtctctcgctctgtcgccccagctgcggtgcagtggcgtgaacatagctgacggcagaagacctcctgggctcaaacgatcctcctggctcgtgctcccaaagtactgggattatggcgtgtgacaccacgcctggcgtcaaacgtttgtctttttatttattttattttgtattttttgagacagggttttcaatctgtcgcccacgctggagtgcagtggcacaatttacggctcaccgcagcctcgacctcccgggctcaggtgatcctttcgcctcagccctgctaatatctgggatcacagacgtgggttttaccatgttgcccaggatggtgtcaatctcctgggctcaagtgatccgcccacctcggcctcccaaattgctgggattacaggcgtgagctaccgcgccctgccacaaacgcatatcttctaacgtaccatttcatttacttgctatattcattatctgaattttctcatattagaatgtaagcagaataaaggcagtgatttttctttttactggcgatcctcagagccaagaagagtctgggacatagcaggccatataaatgttttcgaatgagtgaatcatcaacgagtggatgaaacgataatgtggctaacaggcagcagtaaggaggctgtgtagaataaacccgtaatcccgatgttggcagtttgcttagaaagaaaaagggaggcagtcggagaggggcacacgttttaacaaaatactgggaggaggaggaaggctagttttttttttgttttcaagtttccttctgatgttactcccatgcttccgggcacattacgagctcagtgcctgccggaaatctcccacctggtggcaacctacccttgcatacaccccacccaggggcttcaagccttgcagctgagtaaacacagaaaggagctctactaaggatgcgcgtctgcgggtttccgcgcgacctaggcgcaggcatgcgcagtagctaaagtcaccagcgtgcgcgggaagctgggccgcgtctgcttatgattggttgccgcggcagactcccacccaccgaaacgcagccctggaagctgattgggtgtggtcgccgtggccggacgccgctcgggggacgtgggaggggaggcgggaaacagcttagtgggtgtggggtcgcgcattttcttcaaccaggaggtgaggaggtttcgacatggcggtgcagccgaaggagacgctgcagttggagagcgcggccgaggtcggcttcgtgcgcttctttcagggcatgccggagaagccgaccaccacagtgcgccttttcgaccggggcgacttctatacggcgcacggcgaggacgcgctgctggccgcccgggaggtgttcaagacccagggggtgatcaagtacatggggccggcaggtgagggccgggacggcgcgtgctggggagggacccggggccttgtggcgcggctcctttcccgcctcagagagtgggcggtgagcagcctctccagtgcggaggcacgggggcggaacgttggtgcttgtgcggattccgccgtccccaggttctgcttggctccggagggacgcccccctcagccctgaaacccgtgcctctccagccgccccggatctgaacttgtgatcacggagtgtttacgtcgtgccaggcattttaatgcattgttctagttcattttccagcagtcgcattcctcgccttggccctacatgtagcgctcattacaaacacggccagaatctcttattaacaaacagcagccaggagtgagatttaaaatagactgggggtttaggagacccttttatgacacgtaattctgctcccacgacgctcccatttataccgccggtccagctaagggtctggtaatggagcgccgttgaagagcagtatgatgaagtggtcaggaccaacggactctggagctgggctgcttgggatcaagtcgctgcccctctgcttattaacgtgtgaccttgggccagtcatggacgctatctgcttcagctcagcattcagtgctctccgtcacccgaccccatctatccaggattatctctccctggaaagctacaaacgtctcaccctatgtgggccaaatgttctggataggcctagttaacctcttctctccctgttttctttgcgctttcttgcagctatgtagttatgctaatgaaaagagcatcctagggggagcagagttgtgga

SEQ ID NO: 2933 - DNA, 6000 bp, Homo sapiens
agtgttgggattgtaagtgtgagccactgtccctggccagttggtgatttatttgtataactgtccaatttattgaatacgtatggcgtgccaagcactgggctgagggcttcataatgccctttcactcaatgcttagcacaacccatgaagaaggtagtgttaatatcatccctgttttacagatgtagaaactgaggcacaggctaaataacttgcccaacaagctcgtgcagtttagtaagcagctcagctgggatgtgaacacaaactttgaatacagagctcttaaccagtaggccagaggttcccaaacacctagtatatttactaccttagtactttcctgccacatctcctaggccaaaacaactccattgattgttatgcaatttactaagtgtagccatttgaaaaaaaaatacatataaaagaaaaatatttttattcagttttcaaaataacccatatatagtcatggaatgtatgtgttggttgggcactgcagactaaagacagtttagggccgggcacggtggctcaggcctgtaatcctagcactttgggaggccaagtagagagaagggcttgagcccaagagttggagaccggcctgggcaacatagcaagacccagtctctacagaaaataaaattatcagggtgtgaggacgcacacctgcagtcttagctgcttgggaggctgaggctggaggatcagcctgggcaacagagtgagaccctgtctcagaaaaaaaaaaaaaaaaagacagacttttattcagatatgcatgcaggagttcacagaaaaaaaaagtgagtccaggaggctgttatttggcatttatacaactttttttttcttgaatctcgaaatctactttatatataccatttaataggggaagaggagggagaaaaagccttccatgggaagaacaaataggtttctgggggaacaaaagggagataagaatgtttgtttttgcaggtgcaagtggtctttgtctttttttctggccactaaaactcccctagagaggagatttacggcagcttcactcccagaaatttctgctgttagtcgcataagggaagctttgaaacggcatctttctgcatctgttggctctcaaatgtcttcagttccaagtaacattcatgccaattctgggggtctgagtgtccccacataatacatgtgttctcttgtcttttaatgaagtttgtgggaggcatctaactgtagcctccaaaatttggcccataggtactactgtccttatcaaagacgaggaaacaagttcagaaaagtattaattgctccgagttatctgcttggctagctaggatcagagctcagttctccatttaacccaaagcccaggctcttaacctcttacaactggcgcatcccctctgaacctccatttcctccctgtaaaagaataacatcggccgggcgcagtggctcacatctataatcccagcactttgggaggcagagatgggcggatcacgaggtcaggagtttgagaccagcctggccaacatggtgaaaccccatctctactaaaaatacaaaacttagctgggtgtgttggtgcctgtaaccccagctactcaggagactgaggcaggagaattgccttaacctgggaggcggaggttgtggtgagccaagatcgtgccattgcactccagcctcggtgacagagcaagactccatccccaaaaaaacaaacaacaacaacaaaaagagaataacgttatattcagttgaaccaaaatgaattaaatattaatatttgtacttcaaaaacggtccagcttggctgggcgcagtggctcccgcctgtaatcccaacattttgggaggccgaggcaggaggatcatttgaggtcaggagtttgagaccagcctggccaacatggtgaaatcctgtctctactaaaaatacaaaaattagctgggcagtagtagcgcgtgccggtaatcccagctattcaggaggctgaggaaggagaattgcttgagcttgggaggtgaaagttgtggtgagctgagactgcactactgcacaccagtctgggagacagagtaagaccctgtctcaaaacaaaacaaccaaaaaaccaaaaaggtccagcttgggcaacatagtgaaacttcgtctctacagaaaatttttaaaatactagcagggcaccgggcacagtggctcatacctgtaatcccagcactttgggaggctgaggcaggcgggtcacttgtggtcaggagtttgggatcaggcaggccaacatggtgaaaccgtgtctctactaaaaaacaaaaattagctgggcatggtggtaggcaccagtaatcctagcactcaggaggctgaggcatgagaattgcctgaacccgcaaagcaggggttgcagtgaaccaagatggcgtcactgtactccagcctgggtgacagaataagactcctcaattaaaaaaaaaaaaaattagctgggcatggtgttgcgggcctgtggtcccaggtactcaggaggctgaggtgagaggattacttaagcctgggaggttgaggctacagtaagccaagatcacgccactatactccagcctctgtgacagagccagaccctgtctcaaaaaaattttaaaaagggcaaattttggcaatttcacatagttcaacctagtataaggtggttgtaataactaaatgagataaaatggtgttaaattggaagtattatagtatttctgttaacaacatagggctccagaaccagcttccttgagtttaaatccaggctccaccacttcctagctatgcagtcatgggcaagttacttgacccaactgtgcctcagcttcatccatgatatggagatacaggataaccagcctcttacgtgcaattctgaaatccaaaaagctctgtaaaccaaaagtttgggggtaaactcatttggtagcaaattttgacctgaggctatttatagtctatattctgtattctttctacttagtatgaataagcatgtaagttttactgcatgtttgatttcagcatgttcccccagactctctgggggtgtttacgtatgccggtgggggaaagagaccaactctcaaatattatctcaaacagttggtttcactgtgcttgcttgggtagcacatataccaaaattggaatgacccctgcacagggatgaaatgcaaattcgtgaagcatactgtatttttcttagcacataccacctttggcaatattctttttttttttttgagagggagtcttgctctgtcgcccaggctggagtgcagaggcgcgatctcggctcactgcaagctccgcctcccgggttcacaccattctcctacctcagcctccccagtagctgggactacaggcgtgtgctaccacgccaggctaattttttgtatttttagtagaggcggggtttcactgtgttagccaggatggtctcgatctcctgacctcgtgatccgcccacctccgccccccccccgaagtgccgagtgctgggactacaggcgtgagccactgcgcccggcccccgccttttttttttagattgattttattacttgcctagcaaaggagaaccttctggcagaacagtctccaagaacaaggcaaacaactaattttacataggtttttaccaatgtacagctgttgattgtgactggtttccggcaatctggatttcacaatctggataaggggacaaacaattgtctgtcttccactatctttcttgaatttgaatagaacctttttattctcatagcctcttagctttctttcttttttttttgagacggagtttcgctcttgtcgcccaggctggagtgcagtggcgcgaccttggctcactgcaaacgctgcctcccaggttcaagttattctcctgcctcagcctcccaagtagctgggattacaggcgcatgccaccacgcccggctaatttttggatttttagtagagacgggggtttcaccatgttgactaggctggtcttcaacgcctgacctcaggtgatccgcccgcctcggcatcccaaagtgctgggattacaggcgtgagccactgcgcccggcctctcatagtctcttagctttctaaaatttgaaaaatcctgtaaagacacacctgggtcaaagggctcagataacggactgtggcccttaagtacttacgtcacaggttattgagaggatcgatttagttaccagatgtaaaatgctgggatcagtgcctggcaaaggaaaactttgtacagctgcaggctttcaccatacacaacagcatcgctaacgaatgctattacaatattcatttagcgtttaccaagtgcctactctatacaaatcttgagaatacaacgtgaaggtgaactgctgactaaagtttggtccctttcgctccgtctccttgcgaaaatgctctaacggcaggaggtcacgcgagcgctggacgcgtttctccccgcgagcccctttccgaggcctttcgggtccccccggttatccccgcccgggcggtgcgcgcccccgctgttcccgcttccgctccagagaggcagggctttccgagcctgctagccccgcggccgcaactaaccccgggtcggagtgttccggcccggccagccccgcggcgtgagggaaggggagctcagcagttccccgcgcggggcccaggcgtcggcggcagggcgggcccctcaccgccagcgtgccagccccgcccctacccaccagtgtgccagccccgcccttccccacgtcgccgcgcgcccgggggcggggcctggcgcgcaccgcccgcgcacggcgaggcgcctgttgattggccactggggcccgggttcctccggcggagcgcgcctccccccagatttcccgccagcaggagccgcgcggtagatgcggtgcttttaggagctccgtccgacagaacggttgggccttgccggctgtcggtatgtcgcgacagagcaccctgtacagcttcttccccaagtctccggcgctgagtgatgccaacaaggcctcggccagggcctcacgcgaaggcggccgtgccgccgctgcccccggggcctctccttccccaggcggggatgcggcctggagcgaggctgggcctgggcccaggcccttggcgcgctccgcgtcaccgcccaaggcgaagaacctcaacggagggctgcggagatcggtagcgcctgctgcccccaccaggtagcggggtgggggtggggtcgaaggcgggggcatagcggcggggcgcttggaacccggcgaggggaggctcgcacagggggttgggggggtgcacggcctggccctgggctcggaggaggcggggccgcagagttggcttgaatgagtgcaggggtcgagtctggagcatttgggggtgtagcttgtaaacagggtcggaggagagaggctgtgcaggaagagggctgcaggggagacgcggagagttcgggccttttggagggaggagacgcgtcccgccaggtgggggtgctgggctaaggaaggggcgacgcgcgcagctccgggtggggagggggcctgggaggtgggagcactgggggtggggcgagaaggggaaggcgcccggcccacttggtgggcggggcggggggcggggtggcgggaaggaggaatgcctgcgggaggccgaacggggagagtccggtggtgtggggtgcgaaaggaggttcctcggccggcgcggagatagtgagttggggctccagtagtcgatcgaggtagacacttagaggtagttaagagccgcggtcgccgagacgccttggggacggtgggccttcggcctaggtgaggggccgccgagggggtgggccacgagctgcgagcgcgggggggtgtgtcaccatggggaccgcggggcctaattgggcggggcggggccgtggggagccg

SEQ ID NO: 2934 - DNA, 6000 bp, Homo sapiens
accaccatgcctggccaatttttgtatttttagtagagatggggtttcaccatgttggccaggctggtctcgaactcctgacctcaagtgatctgcctgccttggcctcccaaagtgctgggattatagggatgagctactgcgcctggcccatgaatttggtacacacatacttgttaaaacagattgttgaatccttcttcccgaaatgagagatccagtagatcagagttggtgtgttcttttaaggtgatgccgatgctgctggtccagagatcatacttttgagaacctttcagcatcacctaggcacctatgtattaaaatattttaaaatgattttgatggtttagggacagtattagaaacttttattgagaatgagtaagattaaatctgtttcctctcattccctttgatctattagctcgagtttccagagtaaaagtgagggatttgtgcatcttctttcctctttggatgttggaaatccttttctcagggatggaattgctttccttttggtatcttagggcaagtgggattgactagcctcaagcagaatttcaaaataaacatagagtcatttttccctttgatttctcttgctgcatgcttcctcctcctcttaacaactactcttctctaatcctatgtacttattattctcttttttctcctaacctctacaactgtggccttctcaagcttgcaccccctgtaaataggtctcttctattctgccactgtcaactgcaacatttatttcctgagttgtaatttttgttagatgctagtaatctgaggacatttctcccagtggcttattaaaaagtacaaaagagctgttaatctctctaatcagtggctttcactgggtgtggggatggtgtttcttgggaagagggtcttcgtgctttgctaagaagagggttgtttaataatctggattcttctatacttttaaacggcccgtttacattcttatcctttctttagatgatgaccccataaatattcttctgattccagcccaatctttgtaacccatcaactcttttagcagacttaacccttaaatggtcttttgtttacctgtagttgggttgtgggtaccattgctcctcaagtctacagcccagagtgaagcagaaattgttattctgtacctgcaatggatctagactcattattggtaaaacctacctaccaagggagtgtgctccaaaagagttggggtagggttataggagccaggttgtcttctccatatatcaccctaccagactttggtcacataattaagtctttgtagtttatttcttatggatatggtcttttcaaggctgaaaaattattcactacatcgcaatttataaactgctgtttagtgcatggatagaaaaacaggcaagagcaaactgatctttcaaattaataaatgcttttgcgtgatcaaatccaaaggcctctctataattctcagttttttcaacctttaggtagcattttacactcctgatcatgccttaatcttgactatctgctgtcttttccattctatgacacagtgccacagagaataggatattattggcttgcttttccagtttttttgaaaactcttttaaatggctattcttccttcactttcccctaattttcattttccctttattttcacatttcgcaagtctcttccttcatctttcttctcagcagactcaaacaatctctcctttattaatcttattaatgttaatggcaggcatcctatcttcttccattactggtgggaactgggagaagaaactcttgggacatggctaaacatttgggctataaaataaggataacagatgctaattggaatggtataagcattttaaattttaatttttaattttaagactaataattctcctttaaaaaattaaaatataaaagataaaagtctccatgggccattatctccattctttgttcccatctccctcccctaaagtaaccattgctagtaatacagagcaactttacttatatatttgaatataaatgttataatagtaagcataccattctggaatttgtgctttttatttgtcaaaatgtttggatatttttctgtgttagaatataaagttcttcctcaggcaatagcatttaaatagtagtaatttttgtggcaaagtatataaatgaaatcctgcctaggatacctggtggaacttgaactttaatgaggatctttgtgcagtttgtcagagtgattccaaaattgaaatcatgctgatggtggtagaagtagttccttggctttctgatctttaaacatattgagcatttttgttttttttttttttggattttggggtggctgacttcaactgggctatatataaatggttccagcacaaccacgtatgaattgatgatggtagtgagtatccaactttcagtcttgaacacctaaggataatagtcgagtaattgaattaaaaagtttttatatggtatcttaccttgttccttggtcattggatttcttcaattatagattttattgataaggaatgctcatttacaagttcaactatcataacagtgacttggatgtcttttctttaaaatctaagatgataaattagcaataaacgtgctggaaatctttaagtctagttacctaattatggggattccgaatcaaggagccaactgcttttggcaagtggtcacactgtccagtgtatcaatagtaaaggtgaatgtgatgtaaggtcacagccaaaagactgtgttccaggaagtgactcctcaccagacaccaaatcttgtccttgcgtcttgattttggacttctcagcctccataactaagaaataattaatttctgcggattacctatccagtttatggtattctgctataacaacccaaattaagatatttagtaaataatttattagcacctacgatgcagcaggaaatatgctaaatgattagggagagcaataattttcagaagattaaaaaagctttccaaaaagacatagcacttgagaagaactttaaagaaagggtagaagttccatgggggaaagtgtggtggtggggaagtttaacatactggatacaataaagatcttaattcacagataaattataaagtgcttgaagtaagggactatatgttctcttaatctttgtgttgatcccacttttgcacagcctctactttattcttataggaaaacatgtagcatggccgtccttaattaccgagttgcaaaataaagcaggtgttatgtcctgcccctgcagagatcctcaaaccttagcatgcatcagaatcacctggagagcttgttaaaacgcagactgctgagccctattgccagtgtttgggattcccgaggtttgaaataggggcctgtagggaatgagaaacatctttctttcctgttgctagattcctgtttgagtcccttataagaaaagacagattaataagagaaaagcgtgcaaatttatttaagttttatgtggcatgggagccttcagagatgaagcccaaagaaacaggaaaacctgtgcatttttagaaggaacagtggacagttgtggggaagtacggttggacaaagcatggtctaatggtaataaactggggtaagttgtcaaaggtctttttgttcagattcttttctatgtctccgtttctttagagataaggatatttctttcctgtgggtataggaagagcacctctggattgaggatccaatgacccgcctcagggaagaaggatgggagaaggtcagagagtgatcttaggttttgttgttttctcaaatgtcaaggggccatattttggggtagcatatcctgaaccccatcagcggtgaaaacttgtatttctacatagttcccaggtgatgctgttgctaggttctaggatcacgttttgagaaccactgctttaatgtaatttatatctaaccactgctccagcattcttttctgtaagcatccagaatgctgtgacaaattcttgtcaaactttaagaatcttcaggatgtcaaattctgtcttgaggtcaataaagatgggtaggggacgaaataatctttgctcaacctttggcacattacaatgatgtttttcaaatagtagggctcaaacgtgatgcattggaaaattggaaaattggaaaatcaaataatcatatggtaaatattttagtaggtttcttatttaatcaactcttaataagatgggatggataacattcctgagttagaaaaacatattgcaagcgctgtcagaggaaaattaagttcaagtccatcagcaatctttactcatgttttgctttatatatttgtgagtgccgtacacagaactgagtccagtgttgacttgagtctaatcaatacacatatacgtatacatgtgtgtgcctcaaatatatctgattgaacttagtaagccacagaactgtaatatatatgatataatcaatgtgttatacattatattacaataattatacacaaaataatacattattctgtatgttaagggagagaggacaacagcaaagaagacagagtgctacaacgtccaggctgtaaaagtcattttattctggaggaaatgcaacaccaaagttgtaacagtctttcaataaagtaaaacagaatcatcgaaagggctcctgggacaattgaggctagaatgatcttggtcagtcagtcctgtggacttgagggcaatcttccctcccactaccggttggggagccctgatgtcgcctcccgcagagcgccacttggcctggcctgcgcttcaccttcatttccgcccgcggaatcctccaggatcttcccgccaaggctggggtttccgctccgcggcgtccgagcgccagcggactgcgcatgtgcaggacccagcaggtctagagcttttctgtgtttctccggacttcgagccatggcggtgacggaagcgagcctgttgcgccagtgccccctgcttctgccccagaaccggtcgaaaaccgtgtatgagggattcatctcggctcaggtacccgcccagtggttgctttctagctaagagagcctcttgcagcgtagctgcgcggagaagtctgtgacgggctaggaggttaggggcccagacttgtggggattgagaggggcggcgcgtaacggctcttgggagactaaaggtttgagaagcgccgctgtcgccgccaccccggtggtcgccgcgctggatggggagcgaggaggcgcgcggcgtggagcggggctggggccacgcctcctctctccctagcccttccccgagtttggcttccttcttcgttcagtgtcccgcaattgactgttttttaattttttttttgtaaattttgccttaactcgattttaacaccctccacctccacggatgttgatgagttcactcgggaatctgggctaattattttcgtgtttcctgtagaaagaacatttgggaagaaaaccttattttggccctttgccaagtcgtatgtacctgtacacccacagttacaatatcttctaggagaagcatgacagcaatggaattaattaactttgctgattccagtggcctctcatatggagtttattacacatactaacacatgtgtagggttttgaagtttacaaagcgctttccaggtaaatagttcacttaatcctcagccctttgaggcagaaatttttaaaagaatcatcattcccattttctagttgaagaaatcaaggtatgggaaaccggagacgttatttgctgatgatcacatcagaatcccttaaacgcaggctgtgtgatttcagtcctggatttttttctctttacattgcaccaggataccttaggttaggagtgtagacttttcctttctgaccattacactcaaccttgtgcccacttccccaccatcacgcatagtctttgag

SEQ ID NO: 2935 - DNA, 6000 bp, Homo sapiens
cagctaatttttgtatttatagtagagatggggtttcaccatattggccaggctggtctcaaactcctgaccccaagtgatccacacgcctcggcctcccaaaatgctgggattacaggcgtgagccaccgtgcccagccttcctcttttctttataaattaaccagactcaggtattcctttacagcaatcaaaatagactgagacatcaataaaatggtttattcaggccagaatcattaatagatgctgaaaccatatggtgaaagattgctgaagaggatatccacttggtaaaaaaaattaccactctagagccaccgcacctggcctggccctacctatttaataagcaaaactgttagatatagcttttggcaaaactcttagggatgctgggaaaaaattactgaggtactaaggatgccatgaacagagaatgtttgggaacctctgtcctaagaccactactatattagaatggaatatactgaatgatgttcatccttctgacctggagccatcaagatcgtattctggctcactgccccttgctccaacacgactccagtctttattcttgatgatttcgatatacacagagatgatctttctctcactctggcccctcatatccttgaacttctctcttccatgactttgtcctcccttgtatctcagccactaactccctctgcaatcttgtcattgccacatgtaatgtaatgttaatacctgactccaaagagcctttcaaacaacctccatgcctgcccttcagcccccgcccattgatatcatctttcagcaacctccacctacccttggcatgtgctctctccccttcagcttaagttccacaatcaatcattatgatttcccacttgcctacaccctcaacttccttgccttcttcttgtttcattatattgctttacagaccccctaccctggtgaaatctagccccctaatttctctaggctgcacctgtacacatggactattgcaagaccccgtgaccacctctcaaacccattctccatgcatcagccagagagactttcaaaactcactttattgcctaaaacctttcaagggttcattgcaccctcagaatacagtcaaaatgcagtaagatactttatggggcctgatatggtttgactctgtgtccccacccaaatctcatctcaaattttaatcctcatgtcgagggagggacctgtaatcccctcgccaccatgtcaaaggacggaggtgattggaacatggaggcggtttcccccatgctgttcttgtgataatgagtgagttctcactagatctgatggttttataagggggtcttcctcctttgctttctcttctctctcccaccaccttgtgaagaaggtgcctgcttccccttctgccatgattgtaagtatcttgaggccccccccagctatgtggaactgtgagtcaattaaacctcagtcctttataaattactgagactcagggaagttctttacagcagcgtgagaacagactaacaccaggcccttcatgcgctggaccctacttgcctccccaacctcccttttcaacatggacccttccccacagcccacaccactctgcactttgcactctgcagtttctaaaatgttccctgttctctctcctttctctgcctttgcacatctcgctccctctggaaatggcatttcctaaccaactggactagtctctcagaacttactgagatgtcacatttttaggaagcctccctgacacctgtcctgtgtgcttcatagattgccctcaagtaacagccctgagcctgtactgcaggtacctgtttgtttgcctccttcactacactgggagctttttgggggcaggcaatgtattttgtccactgttgaccctacagggtctggcacagggacaggcatatagaatgtacatgataactgattgttgcatcatcctaaaatctgtgaacagtgttgcttaaatacagatatatacacctgtccatgtatgtttgaaagagttcagtcatattgtcaaacatgatggtatgtttgaaagagttcagtcttggtgaaccaattccactgccaatttcctaagtttctgtgggtgtgagatcattctgccttattatttcatctttcagcataatgcactgaatccttattacaatcagcacactctttcctatggagtaaatcacatgttattgtgtctacatcagccaagggacttgagtacaaacctctgtttttagtagtttcatgctgtttgtttttggtatttgagagactagatgtaaatgtttccaaggaaagtttactgccagatacagaggtgaaaggacagaagtcatgtccttatccatggctgtccctccaaaggtcagtggttggcactttcataggccttttgagatagcagtaatgaaatgaattttaatgaggttcagaaaacggaaataaggtacagtgccccaaagcactcccccaagtgtaggggtccagcgcggccatctctagacccccagagtggcccaaaggtcagcctgactccccttacatgagaaagataatcctatgagaataaatataaatagataagtgggtgaataaatgtaggtgcatgaaattgaaacaagaggacttcattatgtgatggcataaaacataatattctggaatggacaaaaataaaactttggactgggtgaggtggctcatgcctgtaatcttagtgctttggaacacctaggtgggaggttcgcttgggaccaggagtttgaggttacactgagctatgatcttgccactgcactccagcctggacaacagagcaagaccctgtcacaaggatgctagaatttgtccataaatacatttttatttatgtattccccatctctctttttatcctattttatgtagacagcaacgtgattttttttcgtcctttacagaggctgcctactagtttgcagttaataccattttactgtattctataaaggtattgccaaggtcagttggctcaaggtttgtgtttcttccttgagaaaaatacaaaaagaagaaaaaaaaagatcttcggtttgaatacgagagtggaaaagaaaattgaaatacaatcgtgcaggaatgctgccatttagacatttaaaacaagcaaaagaacaacaaccaaaacaaaactcacccataacaaggggttaccactgtttttctgtagcatctcagcagatgacctcctggtgttgcagtcggcaactggtcgtgagtctgttaaaattatgggcaggcacggtggctcacgcctataatcctagcactttaggatgccaaggctggtggattacctgaggtcaggacttccagaccagcctggccaacatggtgaaaccccctctctactaaaaatacaaaaattagccgggcatggtggcgcatgcctgtaatcccagctactcgggaggctgaggtgggagaatcacttgaacctgggaggcggaggttgcagtgagccgagatcgcgccattgcactccagcctgggcaaaagagcaaaacttcgtctcaaaagaaaagaaaagaaaagaaagcaattacgcaatttgttttaaattatgacgtctttgaaaagtatgcaatctaaattcgttggattagcgacgagaatactgaagttgaagtgcatttatagaagtctataaaatggcaaaaaactgaaagggaaagaaatgagctatttgagtattctctgtgttgctagtaaacaagttccaactctgcaaatcagttttcaaaagaatactgattgtttcctaagtacctgcaaactctgaagcattttaggcaagggaatgagtgggaaaaaagtatcttcatgtttgtgcattacaacaataaagactattatgtaacaatgtggagtcttcaaagcgaccctgccaagagggagaaagtggtccttatggacggattgttttctgctagaaggccctcaattagaattgtacttacgcatacataatataggatattatttttatattcatagaaaactgctttctcgggtaactccagcgctgtacatgggatgggataccggccctccgtttacaaatactcaggcgcaatgctgcccgggcactcaaaggacagaagatagtgtctgtgccctgcgggagcaggccacgaatcccgaaaacgccgtggcgcagtgctccttcccgcgaacctgagtgggccgtggttctcggttgctctggacataggaaaatgtcagttcatgtgtgtccctttctccactagatgtcactgtaaatcaattgcttaaggagggaacccgggcgtctggcgcatcttcacacagtaccggggtttgaagcccggtcagtgtctgcacttgtgtccttccccactggggagccccaaggcggggcaggcgcggggactcgctgtgcacggagcggcgcgctgtccgaatggcaaccgaagagccgcgacccggtcaacgaagcgcgggggtgaccggagcaggacgggcgggcaggcggcgcagtgcgtgggcgggcccgcgctgcgctcccctccgcccagctagcgagacggtcacgtgccgcccaggcgctgccccttgcgggcggctgcagaacaacagggcggggccggggaggggaggaacacggaggccgacgccgggcgccgcggtgctacgcccgaggctggggtcgccccgggccggggggagcagagcgcgtgcgccgcgcggctgtgagcgcgagcggggccggggagcgcgcgcggaacgctagggggcgtggctgcggcgcgcgcgctaaccggagggggaggggcggagagccaccgcggagcgcgcgcggggttggttgccgcgagcgtgggggagcgtggaccgcggcgctgctcagcggtggggctgccttcccccggccctcctccctggtccctggcgagggcactggcggcggcggggccggggtccgcaaggccggagaaggccgccgggcccgggcatggtggtctggggcaacgcggaaggtgagcgacccccgggccggcggcggggtgggggaggggcgggatcggacacgcgtcgcccggaggcgccgcagacccgcccggcagcggccagagcgcggtcggcctgaggtggcgcgggggaggggtgcgtcgccccggccccggcccgcggccgtcctgtcgcggcctgggctgtccacggcgccttcccctgacgctcgcagccgccgggttatgtaatgtgtgacctcccctccccttcccttccgtcatggcgcggccggccccgcgccgccgccagccccatgggccgccccgcgccgacccctggcgcagcggcccttccctccgcgcccggccgcatcccgccggcccggtcagaccgcgccgcaaactccttcctcctgcgccggcgcctcggccggccattcagttccgcgccattcattcacgcgcgcgttcgggcgttcgttccacaagcgtttgtagaatgtcgacccggtcgagccgccgctcccacccgcactccagccacagcgtttttccgcaccccgccttcgacgtccccggtgcatcccagaaccggtcggaatgtccgaaggcggttgttgctcccttgtttttccttgctgcttgtccgttcgctaaatacgctgggcgccgttccccaactgtccttccgagagccccttgcccacttctgtactgttacagtgacgccgctctgggcgcaccgagccgcgctgtgtttcgctgctcttcctacctattctcagtttgtaaagaaataatctcacataacactccttaatgtactcctccgtaagataaattgcagataatatacgtctgctaattctctttatctccacgtcttctcacgccatgtactaagtagaaatggtttcatttaggtgaaaataatgcagactagcac

SEQ ID NO: 2936 - DNA, 6000 bp, Homo sapiens
ttcattcattgccattgctgtatggtgctcctttatccatccatcctcctatcaacagacaagttatttttgttgttaccaaaaaaaaatattgctatgaacatcctaatacatgtctcctgatgcactgtgcaagaccttctgcagggtatatatctaggaatgtaatcgatgaattgttgggtgtgctcatcttaagttgaataggttactagttatgtggttgatttcatgagagttgtaccaatttacactagtatcagcagcatctaatagctcctgctaccccacatctcaacaacacttggtgttagtacaacattttgattttcctgatgttcatttaacaagctgactttagaacaaaaccctcacattagacatgaccccactatattggatttttaggacctaggattcccgatgcctacaataggtgctccataagtgagaacaaaacgaaaagaatctaagctttagccatttggtaaagtacattttttttcttttctttcttttttttttgagacagagtctcgctctgtcgtccaggctggagtgcagtggtgcgatctcggctctctgcaacctccgcctcccgggctcaagtgattctcctgcctcagtctcctgagaagctgggattacaagtatgtgccaccgctcccagctaatttttgtatttgtagtagagacggggtttcaccatgttgcccaggctggtcttgatctcctgacctcaggtgatccacctgcctcagcctcccaaagtgctgggattacaggcatgagccaccacgcctggcccccttttttcatattttaaagattaatcagcacacttcaatctttcctatgtctccaaattatgaacctaatgtgaacacatagcagtgcatttgttcccaaattcaaaggttacacaggaaatttaatgcaggagtacaagtattgctcccagaggtggaaaatatactacgtttgctttactgtacgatcatgcattctgagaaatgtgtcattaggtgattttgtcactgtgcaaacatcattgagtgtagccacacaaatctcagtggtgtagccttctatacatcttggctgtatggtacagcctattgttcccaggctacaaatctgcacagcatgttaccggaatattgtaggcagctgtaactcaatggtaagtaaatgtgtatctaaacatagaaaaggtacagtaaaaatactgtataaaaggtaaaaatggtacatttgcataggacacttaccatggacagagcttgcagggctgtaagttggtctgggtgagtcagtgagtgagtggtaagtgaatgtgagggcctagaacattactgtttactactgtagactttacaaacacaatacacttaggctacaataaatttattaaaaaattacctttcttcaataagaaattcaccttagcttattttaactttataaactttttgatatttttaaagtttttaactcttttgtaataatacttagcttaaaacataagcacactgtacaggtgtacaaaagcattttctttctttatattcgttttcttattccttattctataagactttttcattctttaatttttttttagcttgttaaacatgtctgttaaaaacaaagacacaaacacacacattatcctatacagggtcaggatcaccaacatcactatcttttacctccacagtgtgtcccactggaaggtcttcaggagcaataagacgtatggagctcctatgacaataatgccttctggaatatctcctgaaggatctacctgagtttgttttacagttaactttttctttttataagtagaagcagtagactccaaattaacaataaaaactatgaggtatagcctggtaaataaataaaccagtaacatagttcattatcatgtattatgtattatacataattgtatgtcctttaataggactggcagtgcatagatttgtttacactatcatcgcgacaaatgggtaagcaatgcgttgtactattgtagcaggatgagccgcagacaacaacccctcagacaccgagttgtagaaggaaagggctttattcagctgggagcattggcagactcacgtctccaaaaaccaagctccccaagcgagcaatttctgtcccttttaagggcttacaactctaaggggatccatatcagagggtcatgatcgattgagcaagcagggggtacctgagtgggggctgcatgcactggtaatcagaatggaacataacaggacagggattttcacaatgcttttccatacaatgtttgaaatctacagataacacaagcagttaggtcaggggttgatttttaactaccaggcccagggcccagtgctgggctatctccctgtggattccatttctgccttttagtttgtacttctttctttggagggagaaatggggcataagacaatatgaggggtggtatcctcccttactatgatgtcttgatggctataaggtcattaggagataggaactttttagctctattataattttatgggaccactgtcttatgtgaaggtcactgttgaccgaaactgcataatgcagtgcatgactgcatgctagtaaaggactgtgacatgaatttcaaaaaagggaaaaatctccaccactcctaaccttaattttagtacttagttcttatatggtccaatatcaataattttttaatagtataaatcctgcttccacatactcactgttttctacttggttaaatttccacaattaagattttaaaaaatttttaaataatctcacaatgtgtaggaactgctgtttaaagacatctattttaatgagctataaagtcttggttctctgctgcaagcggtggctcacgtctgtaatcctagcactttgggagaccaaggcgggcagatcacctgaggtcaggagttcaagaccagcctggccaacacggcgaaaccctgtctctactaaaaacacaaaaattagctgggcatggtggtgggcacctataatcccagctactcgggaggctgaggcaggagaatcgcttgaacccgggaggcagaaggtgcagtgagccgagatcacatcactgcactgcagcctggacgacaagagcgaacttccatctcaaaataaataaaataaataaataaataaagtcttgattcccaaatgctagtttatccatccgttgacaaaaagagtcgaactctgtaaaatattttgaagagatttattctgagacaaatatgagtgatcatggcccatgacacagtcctcagcaggtcctgagaatttgtgcccaaggtggtcagggcgcaacttgattttatacattttagggaggcatgagacatcaatcaaacacatttaagaaatacattggtttggtccagaaagacctgggactgatagaaagggaatgttcagtttaagataaagattgtggagaccaaagttctctgtaagtcttacagtggctgcccttagagacaatggatgacaaatgtttcctattcagatcttagttaatctctttaggattgggagggtctggaagaaaaagatctagctatgttaatacagattctttacagatgcatatcccacccctccaaggacagctttgcagggccatttcaagatatggcaaagaaacatgttttggggtaaaatattttgattttcttccttgtcttgtaatgttatgccagagtcaggttggaaagtaagtcaccatatatagggttaagtaaaacccatctaataagaatttatgatttgtagggcatgactccccaaatcctgtagataggaatcttgggcaagataaaaaaatcagagtttagtcctccgacctctgccaatttctcaagatatcttttgctagtctaaaagctaataacaaaaagaacaacaggatgagcattttatacaagtaaatgtattccatttaaaagatttttctttattgtgaaattctgccattctacctttttaatgctaaaaagttctgtttcgtgaaatgatggtgatagtagacggcatttatttgcttgacaactttgtatgatctcagattttctgtgtgttttacttttactgacccttcaaatctaagtgtgtgtaaacccttttaaagtgcgttactacatcatttagtatgtgtttcgtagaaagcaacctgggagttaactgccaggagcacgcaagtttcagaaagcaagacatactcatctctattcaacaattaatcagttctgattgggtttcaagtaaggcttagtaccaacgcttagggaggggcgtgcaaaaacgagaaaggtagtgtttgaccttaccggtttaaggtttatcctgtgcattatacagttaagaaacaacgcaggagagtgccagggaaccgagaggggcttgacagttgctgcaggagagtcttgacttggaaccagacgaacgtggaaagttagaggaggggaaaacccctactaggataaggcagacaggaatcaaggcttggagcgcatctggggccccggccgccctgcccaggtggaggaagagccggctcgaggtgcagcaagggggctgggaaggaagggctggctaaagcgccacgtggatgtgagtgccaaagagactaggagagcgtggaagtgagtcccgaagagactgagttcaggacgtgaagagaaagaggccgagaaaaacgacccaccagcgatccttcttgaggtcgacaccgagcaggggtggagtcggatacgccccgcggacaccatgcacccaatcagcgacgagctgtcgcggatcgcgggacacgccccctgatccaaaggcccgagaagctcttgcacaggacagcctctggaaccccgcgccattagcgcctgcgccgtctctaggccccgccccctcacccctccggtcctggagctcccacagctaacatggcggcgccctgtgtgtcctacggcggagcagtttcgtaccggcttcttctctggggtaggggtagcctcgcccggaagcaaggcctctggaaaaccgcggcccctgagttgcaaacaaatgtcagatcccaggtaaggcctgggaagactggaagcggcttacctctgccgcgcgaggatgtggagccagcgcggacaccttcccccagcgtctcgcgtgccttcaggcagggactctaggatcttaggtatttagtggaggtctgaggttgggggggaggaggtgggtattggcgtgcagtagccgctctagaggttgttacttgtttttttgcggggtgcagcgaggggaacttacctgaaggtagaagtggagcgacctcctccttcatttggctgctgagctaagtaagggtcggtgcctaggtctgtgttgggtccagtcctaccctgccctgctgtctagggaggaggagggccgcgccagagaagaatgatgggaattggattcctgcaggtgcctggaagacaatggagaaagtcacgttgtgtagaggacagtgactttttgaaagtgccttcaatatgcgcaatttctggcttcttaattttcccgaatccccctctatggaaagatgcaggccagaacttgtacgtttcgtttaatccagggagaagtggggagtcaacagctggatggctgatgatgccagtttactgacatgcgatctcagagcaggaaaaagatttgagagggaagaaacgagtttagtatgggattatgtttttaggcatctgggatttccagtaggtctacggatagtcaagtgtatagctcaggaggagaactgatttcgaaatgccctgttaccttgtaaatggtaactgaggccttgtaaacaaattaaattacctagggagagtgtactgaggagtaggcagagggacagggccctgaaggacaaataagaaataagaggcctcaagagattgagaatga

SEQ ID NO: 2937 - DNA, 6000 bp, Homo sapiens
ccagaagccagatacagtgtggtacgtgcaacatttcatgcacattttgattttgtttgtcattcaaaattgtgcttgtaaaaatgtatacaatttctgagttttataatttctaggtacttgttttttcttgctggtaaatagcttttttttaaaaaaaaatctaatataaaagaaaccatgtttatattttgttagtgatcaatgactttgtttatatggaaatttgtatattgttggcacacattttgttgaggtttacgtgcatgaaggcctgcaataattagcacaatgaaaactgctttttcttacatgttcatttttttgaaagattgtggtgcaaaggcttactctaataagtaaccttctggactatggaatgaatataaatgaatggcactttgagtgttaataaagctaatatttatttccactgtgattggtttttccaaatctattcttggacacattttatttacagttattccctccttgcttgagttgagcactctctaggaaaccaagcgcagacaaatctaaaaacaatgaaactaaaccaaatctttccagtatctaagtctataatgttccacccaacttgtagtatatctttggctggacatcttgattacctaaatcagaactaatgattaaaaacaaacacaaaccctactatcaaacctactgagtataaggaatggtctctcacatggtgctggagattatttatttatttatttatttattttgagacagagtcttgctctgtcgcccaggctggagtgcagtggcatgatctcggctcactgcaagctctgcctcccgcgttcaggccattctcctgcctcggtatcctgagtagctgggactacaggcacctgccaccatgcccagctaattttatttgtatttttagtggagacagggtttcaccatattagccaggatggtcttgatctcctgacctcgtgatccatccgcctcggcctcccaaagtgctgggattacaggcgtgagccactgcgcctggcggagataatttaatactttggtatagagggcaacttaacacaacctcagaattgaaacctcagaatcagaatcagaaacctcagaattggccgggcatggtgatcccagcactttgggaggccgaggtgggtggaccacttgaactcaggagtttgagaccagcctgggcaacatggtaaaaccctgtttctacaaataatacaaaaatcagccacgtgtggtggtgcatgcctgtggtcccagctacccaggaggctgaggtgggtgggtcgcttcagcctgggagacagaggttgcagtgagctgagattgcaccactgcactgcagtcttcatgacagaacgagaccctgtcttaaatttcagaaccttgtatatcctctgacccaccaatttatacctaggaattaacctgtggaaatagattgtgaatgttttaagttgtatctataaaagcccaaacttaaaactctaaatgtccaacaataggggctattgtaacaaagtaccacacattaggtggcttataataaaaaatttattgtctcacagttacggaggctagaagtcagaaatcaaggtgtgggcaggaccatgctccttctgacacccataagggaatctttccttgcctcttccaacttatttttatatattagaaattgggtctcactatgttgcccaggttggcctcatacttctgggctcccacctcagcctcccaagtagctgggactacatgtgctccatggcgttgtgtccagctgcctcttccaacttctgatagcatcccttggtttgtggcagcataaatccgatctctgcttccatcagcacgtggtgctttttgtgtgtctattgacacaagtgtgtgtgctcccctttttataaggagaccagttactggattaggcccaccctaatgacctaattttaacttgattacctctataaagaccctgtttccaaataaggccatactctgaggtagtaggggttaggacttcaaaatatctttttgggtcaggcacagtggctcatgcctgtaatcccagcacttggggggccaaggcgatggacaacttaagtccagcagttcaagaccagcctgggcaacatggtgaaaccccgtctgtacaaaaaaatacaaaaagccaggcatggtggcatgcctgtaatctcagctacttgggaggctgaggagggaggatcacttgagcccaggaggttgaggctgcagtgagcccagatcgcaccactgcactccagtctcggcaacagcaagaccccgtctcaaaaaaaataactttttgaggggtgggggacacaattcaacccatagtctgtcctctggcccctacaagttcatatccttcccacatgcaaagtacattcaccccatctcaacatcaacaaaagtcagtcattctagcatcaactcaaagtccagtatcatctaaatatcagttcaaatctcatcacccaaatcatccacatcaattgactctgggttaggtttcctgttggagcaaattttctttctatctatgaacccatgagaacagacaagttatctgcttccaattacaatggtataggcagaggatagacacattccattccaaaagggagaaatgggaaggaaaaagacttggaggtgccaagaaagtctgacacctaacagggccaatgacaggattttaaggcttgagaataatcctcactggcttgatcctctgtcctcagggcccactggggttgcagccccgcaccctcagaactgaggaggtggtggccgtgggttcaaacccaagcctgtccctttcagtcctgtggtggcggaagcagcctcactggcctctgaactgcccctgccaatccctttcctacctgtggaatcctgggagtccaacagccttccttcatttcatcccatctatgtaccctagtcaaaactgtccaggtttctgtggagatgggtgattgggtctataagccacacacctaatctcttgcaaataaatggttgtccacatccttagtgtttctccagagcatactttctctctctcttttttttttttttttttttttttttttttttttttacaatgtgagtataagaatgatccaaatcttcaagttctggttcctttttgttgaataattccaccttcagtgtatctcttctcacatttcactataagcaataaggagaaagcaggcctcagttttttttttttttttttttgagacggagtcttgctctgttgcccaggctggagtgcagtggcgtgatctctgctcactgcaacttctgcctcctgagttcaagagatcctcctgcctcagcctcctgagcagctgagactacaggcgcgcgacaccacgcccagctaatttttgtatttttagtagagacggggattcaccatattggccaggctggtattgaactcctgaccttatgatcccctgcctcggcctcccaaagtgctgggattacaggcgtgagccaccgcgcctggcccaggcctcactttgaaccatcatgtagaaatttcctcagcaaaatgtccaagcttatcacttataagttctactttccacccaacagaatacaattcaggcaagctctctaccacttgcctccagtttcaataacatatttctcctttccatctgagccgtcaccagaatcacctttaatgcccatacttctaccaaggctcttcaagacaatagaggcttttctatcatgcgcctcaaaattctttcagcctctaccgattacccaatttgaaaaccacttccccattgttaggtatttgttacagcagtaccctattccccgtaccaaaaatctgtgttacgttctccagagaaacagaaccaagaggcccactgagcaagcgagattgattgattgattttaaagaattggctcatgcaattgtgggggttggcaagttgggaattcaggtacgagttgatgttgtagttttgagtccaaaggctggaaactcagtcagaactttctgtgttgcagtctggaggcagaattcctttttccttgagaaacctgtctttgctcttaaggccttcaactgatttggatgaggcccacccgcattattgagggtaatctgctttatttaggctgagacatgagaatggcatgaacccgggaggcggagcttgcagtgagctgaaatcgcgccactgcattccagcctgggcgacagggcgagactccgtctcaaaaaaaaaaaaaaaaaaaagaaaaaaattttttttgagacgaactctcggcctgtcgcccaggctgtagtgcagtggtgcaatctcagctcagtgcagcctttaccttctgggttcaagagattctcccatctcagcctcccaagtagcttagactacaggcgtgtgccaccatgcctggctacttttttttgtatttttcgcagagatggggtttcaccatgttggccaggctggcctcgaactcctgacctcaagtgatccacccacctcagcctcccaaagtgctggaattacaggcgtgagccaccgtgctcagccaaattttttttaattaaaaaaaagaattcttccttacccatggactcaggtcacattctctctctctctctctcacacacacatttattgcccacatggcttcattaaaatttaagttccagaaggatgaggcctttaattcgcgcactacacaggtgctcaacacacagtattttccttcagttgtagagaaatgaacagtggaggacccccgccgctgggtcgcacgagctaacagatcggcggtcgctggctctccgctcttccagccacccacatcacggcgcctagaggcgggacatcctgtgtggacaacagggagcttccggattgagccggaagtccccccagagcggatgccgcggcgggcctgtgggagcggggtcatcttctctctgctgctgtagctgccatgggcaaaagagaccgagcggaccgcggtgagacgttgcgcgggcacgctcagccacgactgcccttgccggccctgccccccgctctgcctcggagctgctccgggcctctgcgccggccgaccctgctggccctcccgcgcgcaccccgttgggacaggcctttgggcgggagagatgctggacctgggcgcagcccagcgaactcggcctaggggagacgggtgaggggcgcaacgcctgcgggatgcaggtggctcttagctaggagtttgcggcggcgcaggtgaaatgctgccaagcggtgcggagggaaccctgaaggctcctgctgggcttacttctgtgttggtatcttgcagacaagaagaaatccaggaagcggcactatgaggatgaagaggatgatgaagaggacgccccggggaacgaccctcaggaagcggttccctcggcggcggggaagcaggtggatgagtcaggcaccaaagtggatgaatatggagccaaggactacaggctgcaaatgccgctgaaggacgaccacacctccaggcccctctgggtggtaagcatgcccttagcttgggcagggcccaggagtgtgcggagcggcagctaaatcttgggcatcctcagagtcaaaactgacattcaggatactgcccctagaactggccgggagagaattttcatccacacacgttggaacagcccaaggcaacagcgagcagttgcgcacacgtgtggcggccggacctgggcttccaacagctctaacccctcggtttactctcactccttccccagccctaccccatgtagtgaatccttttatctgccgaataaatagcatttatcatgtaacagtttgtttcctcaaataatggaagacatgttcggtagcaagcttttgctctactttaaataattaatgttatacatttagttgaaatctagccaaaaggtaactt

SEQ ID NO: 2938 - DNA, 6000 bp, Homo sapiens
tggcacagcaagtatttaaacactcatttctttgatccaaagctgagctcattgcatttactataataatttggattacagatgaatacttgattttactaaacgaattactatatgagccctttacataatgggctcccataggactttacactttatttttcttacaagattcagtaataaatctatcatgaaagccattttaccaccgtgccttgtgcagggtagagctcattacatgttgatgaatgaaagtagttcaagtagacttgttgttacacatggctagattaaagttctctgttttaatttactctttaagctttacatggcctatgtgtaaatccaggaaagtaattcatcttagaattattgtgagaaataaatgagataatgcttgcatgggctgggcgtgttggctctctcctgtaatcccagcagtttgggaggccaacgaaggtggatcacttgaagtcaagcattccagacgagcctggtcaacatggtgaaatcccgtctctgacaaaaatacaaacattagctgggcatggtggtacacacctgaaatcccagctatttgggtggctgaggcatgagaatcacttgaacactgcaacatttgaggttgcagtgagctgagattgtgccactgcactccagtctgggcaacagaacaagactctgtctcgaaaagaaaaaaaaaaaagataaggcatgtatggcaccaggcactcaataaaaactttttttgttttttttttttaagaaataatatgtttaggtgtatttaggctataaattgagattttagatacacattggtgggtagatctaagaattattgagaagggagaatcattaggaccactggggacaagtaagagaaaggagtcattgatagatatagattataggcttgacgtttgctgagtaatgtgtgcttaatgtggctgggcatggtggttcaagactataatctcagcactttgggaggttaaggtgggagaattgcttgagcccaggagtttgagaccagtctgagcaacatagcaagactccatctctacaaaaaataaaaattagccaggcatggtggtgcattcttgtagtcccaactactcaggaggctgaggtgagaggatcacctgagcccaggaggtagaggctgcattgagccatgtttgcaccactgcactccagcctgggtgacagagcaagtccctgtctcaaaacaaaacaaaacaaaacaaaacaaaaaaacataaatgaggaagttagaaaggaatattggattgcagatataaggcatctagaaagggaagatgatctggggagaagagatataggatttagagagggaaagatagaaatcgtgtattagttagatgatagatggatgaattaatatatgaacaaattatttcaaattatatttattgagtgctaggtactatgaatttattgcccaaaggtagcagatccatgagggtggctataaatatttctatataaatttatatggaatttctataaaagagaagttttggggtagcaaccaagttgtaaaggtgtgtgaagaggggtctgggtggggaagggtatttgttttcattctgtaatcccttagcactctagatcagattgagaaaatgtcaaataggagggaggggcactgatgagatgagattacagatggaattaatccccatcaggataactctcaactctgccactgcactcaaacacctataaccaaacaataataaattaatgagatactcattttatcagatctatagcatgataggagggaggcaggagcatttaattctccatgaagagaatgtgtgtggttggagagtagatgagggaaagatttcacaaaaaggtgtgattttagttgattttttttttttaagatggagtcttgctctgttgcccaggctgcgatgcagtggcacaatcttggcttgaatccgcctcctgggttcaagcgattctcctgcctcagcctcctgagtagctgggattacaggcatgcaccaccacgcctggctaatttttgtatttttagtagagaaggggtttcaccatattagccaggctggtcttgaactgacctcaggtgatccacttgcctcagccttgcaaagtgttgggattataggtgtgagccacctgactcttatttattactcttgaagaaggtaattaatattctaaatacatgctctgaataaaagtcttcaaagacacagagaagctggagatcttagcagactgttcagaatctgatgaagtgggagtaatctggagatgaaggacaagcagtggcccaatcatgataggcttgcatgttatgtcaaaagttttgaaatccatcctgttactgatgggaatggctggagaactttaggcacaggaatgacaatgataaaatcttacataacatttttgagctacttataaggctgaggcaggaggatcatttgagcccaagaagttcagggctgcagtaagtcacaatcacaccactgcactccaacccaggtgacagagcaaggccttgtctttaaaaataataaaatttaaaacataacatttttggaagatcaaagaaccatacatatgaaagaaatacaagcaacatgaccaccgtagtcctttcattacaaatgggaaattatgaaaaaaataaagcaaaatccctgttctcacagaatttatgttctaatgaatgggtagaggcaggcgtggtggctcaagtctgtaatcccagcactttgggaggccgaggcgggctgatcacgaggtcaggagatcaagaccatcttggccaacatggtgaaacctgtctatactaaaatacaaaaaattagctgggcgtggtggcgcatgcctgtaatcccagctactcgggaggctgaggcaggggaatcgcttgaacccaggaggcggaggatgcagtgagctgagatcaggtcagtgcactccagcctgggtgatagagcgagactccgtctcaaaaaaaaaaaaaaaaaaaaaaaaaaaaaaaatatatatatatatatatatatgtatatgtatatatgtatgtgtgtgtgtgtatatatataaatatatgtaaataaatataaatatatataaatacatataaataaataaatatatatataagcatactatgtatgtactgcgtcgtttggcagtcattttgctaagtgcagatgacacaaagaagagcaaaaagcaacatcccacttctagagctgagagttgcagcacatgtgagtgagggctcaaatcctgggccaggaacccatgatggagagttccattgctgctgggcttcatgtgtctgatttagagttaatgcaatcctgtctgttgtggagagtgcacgaaggcatatgaaaaggggagaagcagaccgggcgcggtggctcacgcctgtaatcccagcactttgggtgtccgaggcgggtggatcacgaggtcaggggttcgagaccagcacggccaagatggtgaaaccccgtctctactaaaagtacaaaaattagccaggtgtggtggcgggcgcctgtaatcccagctgctcgggaggctgagtcagagactcgcttgaacccgggaggcagaggttgcagtgagccgagatcgcaccactgcactccagcctgggcgaaagaacgaggctccgtcttaaaaaaaaaaaaaggcgggggaggagcagcatattcacagtaaggagaaatgactgtcattgtgtttactgacgtttctctagggaagaagccctggccaaatcccacccttcaaccccccaggggcctaacagaagaatgcacatcctcgggagctacctaaatctactgaattacaatgcatatgggcggggcccaggaatctgcagtttaataacgaatatccccaggccattgttatgtacgcttaagacctgagaaccattggcctctccaaccttttctcacttcacctattaaaagccctattttatagaggaggaaattgaggcataggttaattaacttgctaaagtcacatggaacctagaccagctggaatctagaccagcttgagatacagttcttttctttttctttctttctttttttttttttttgagagacggagtcttactcttactctgtcgctcaggctggagtgcagtggcgtgatctcggcccactgcaacctccgcttcccgggtttaagcgattctcctgcctcagcttcccaagtggctgggactacaggcgtgcgccaccacacccaactaatttttgtatttttgttttttttaagtagagacggggtttcaccatgtgttggccaggctggtctcgaactcctgacctcagactcggcctcccaaagtgcttggattacaaggtgtgagtcaccgcgcccggccagctcttagtcttaaacccaacagtacgttatctccttttgctaactgatttgttgctaaaacttcaacaagcactggacttggagtttgaacacttagtctgagggcccactatgttcagtctagtgagtctgagcaattaactcacattttgaatttcaagtctctcgccttaggcaaaacaccaccacctgatgctcaccagaggggcgtgacgcggcagctgggcagggaagggatgggaagggatgggaagggaggcgatcgataactccggtgtgccgctgactgttggattggctcgaacttctcccgccaggcctaacctactcccgcgcactcctgggcccgcccagccgccatcttggtctaggagggagcgcgccgcacgcgtgagtaaacagccggagctgggaaagtcgagctctggcagcgtctgggtgctgaggggcagaggcggagagaaccctgtcctgatcttcctaggtgggataaatatcggggtgacagtggtaggccgcggggaaccctcagtctgcccaccctccgccccctcgcggcgagatgcctcgttccccgggcttctcccgccctccgccgatctcctccctctgttgaaagctgcccgggaaagtggtggcgggagcgggcccaggcccgaatgtggcgtgggctcaggtgtctggtgtcgggcgccggaggaggttcgcgctggggtttggtgattcggaggcctggggtgcagacgcggcgtggctgtgaggcccgggcgggcgtgcgggtgtgagggccggactcacactgggccgccgcggggctgtttccatcggtcactggattttctcctcttccggttcgggcctcagggtggccgacatgacggccaggggtcagagccccctcgcgccgctgttggagactttggaagacccttctgcctcccatggagggcagactgacgcttacctgactctgaccaggtgaggtccgccacggggcgtagcggagagtggggcgctctatagtggggagaaagaaggtggttgggaggggcgcgtagaatgaatgtgagttctagaagtctagcaaatgtgaggacgcccgagtcgcggacgccttggggggcgggggagatgtattctaggtgacgttcccgggtactgctgctgctgcgcttgaggtgtgtgtttggaacgagggagcatgcacgtgtgttttgcaagcgagggatttttaaaagtttcggttggaagtagttgttggaggaggggtcttcagtgtaaacctccgatgtgttgggaaaatgtggctacccagagtttttttaacagagcaatacactgatttttattaattgcaaaatgcttcaaagtaattttcatagaaatgtactaaagttttgtaaaaccctttggaaaggcttagcaaatcgttagtaactaggaatagggatccctgttctgtctttttggagtcaggttgtcacaacttgcatgtactcgatgtaaaaacttattctgagggtttttctactttcatttctgatatatattgcattatat

SEQ ID NO: 2939 - DNA, 6000 bp, Homo sapiens
ttccagaatggcttctcctgattttacttacgtgttttactattgctcaaattacagatactaggaaacactactactttataagtacacttctttttcctacttaaactctcaaactacagttacgtatttgccatgatgttaagggaccttgatggtctgtgaattatcagttgctttctgcactacctcctgtagatagacctgactgatagcacttacaaaaagactgatagatgccaaatcagtcatttattaaccctctaatattgttgtcccgatcatttggtaaacgctaagagagcttagttttacattcacaaagtatttgtatttgataagtcttaaaaatgatttaagttgaagcctaacagaagtacttgttcattcctcagttacctgcaaataatggaaataatggtgcagtcagttttatttgattgtgtaatgctttatactaggggtctcaaacccctgggtggcattagattcttacaggagcgtgaaccctattgtgaactgcacatgcaagagatctaggttgtgcgctcattatgagaatctaatacccgatgatctgaggtggaacagtctcatcctgaaaccatctaccccaacacctgtgtctgtggaaattgtctccacgaaaccggtccctgttgaaaaaaggttaggggaccactgctttatacagtgtttgaagtaggcacacttacagttactatttctggttctttatgactgttgagggggggcagaattctatgtttgattcacagtaaaacttttcatgaatcattgagggttaactgttatcacttgccaatggaaactggatattgaaacatttttttaagaaatgcacttttacctgaaataaaactataaaaactaaactctggtacttgtttttgttggctacattttggttttttgttttgttgttttcgtgagatctgaaatgagtatgaatagtttaattcaaataccacaaagtgtatgttatattcctccacaaacatgaacccttccttttctttttccccttttatggcctgctttttaaccacagaggttttctgatttatgcatagttttatgggttccactggtttctaaatccagaggtggtggtttttctgttgttgttgttgttaatgagttcagtttctcattgaacttgttagaagagaggtttcgtcaaataagggctgagtagatgcaggcaagcttggagaggcagtccacatggtgtgggcgagggcagaggtggcactgccaggctagtcaccagatgaagtaaatgcctcaccccaacatgaccttaacttcctctgcagaaccaagcatgttgatggcagccgaagaaaagctccatagttttaaggaaaacaacaacaacaacaattagggtaaacagtgatgttgaaagacactgtattagtttcctagggctgctgtaacagtaccacaaacctaataagttaaacaactgaaatgtattgtctcagttttgaatagtagaggtctgagatatggtatcagcagggtttgttccttctaaggactgtgtggaagttatctgtcccatacctctccccagctagcttggtggtgtgctggccatttttgacaggtagaggtatttccccaatctcccatcttcatatgactttctacctatgtgcctgtgtatttgtctaaatttcccttttataaggatagcaaggccattggattagggcctcatctgaattaacagcatctgcaaggatcctatttacaaggtcacattctgaggccttgggggttaggacttaacatgaatttgggggtgggagggtgggacacaatacagttcatacatttgagtgagatttgattgagatgtaacccatagacctaatttctcccttttatagtttcttgaagatggctctttgcagcctacgtggtagtggagatatatacaaaggacttccctagtatcgttggaccaacaagcacaagcagatggcaggaagattagaacattggatattgattgccagtttttaaggtgtgttaattttcttgtgattaatgttttaagagtcctttataagatacacactgaaaggtgactaatctataatgagattcagtataaggaagttacaaggtaatgagaggagtgcattggtttggtggagaggaaacagggttaaccatgagttgataatttttgaggctagttggtggatgtaggattattctctacttttatatatacagtcatccctcaatatccatggggtattggtttcaggaccacccctaccttatggatattaaaatccctagtgtaaaatgacctaatattagcatataacctatgcacattctcccatatactttaaatcagggttccccaacccacgggctgtggagtggtacaggtccatggcctgttaggaaacaggctgtacagcaggaggtcgagtggccggtgagcaagcattaccacctgagctctgcctcctgtcagctcactggccgcagtaaattcttcatgaactgcacatgcgagggatctaggtttgtgctccttatgagaacctaacacctgatctgaggtggaacagtttcgttccccactgtgtggaaaaattgtcttccacaaaactggtccctagtgccaaaaaggctggggacctgtgctttaaatcatctcttgattataatacctaatataatgtaaatgtatgtaaatatgttatactgtattgtttaaggactaatcacaagaagaaagtctagctgttcagtacagatgtgaccatctttttttttctgaatatttttgattcatggttggttgaatttgtggatgtggaactcaaggatcttggaaagccagctgcatgttgaacattttccaggctttaaagaaaaatctgtaagagacaaaggttctgttgttctttgcaatagcacctgcaaagtgtgccttggcaaaccgataaagtaaataggaaatttaaaactaaaccagccaggccaggtccagtggctcaggcctgtaatcccagcactttgggaggctgaggtggtcggatcacctgaagtcaggagttcaagaccagtctggccaatatggcaaaaccctgtctgtactgaaaatacaaacattagcccagagtggtggcgcacgcctgtagtcccagctactcaggaggctgagacacaagaatcacttgaacccaggagggagaggttgcagtgagtagagattgggccactgcactccagcctgggcaacagagggagactctgtctccaaacaaaaaaatggctcattgtaatggagatagcatatactttagtattctaaaagtttgggagttggaaatcacaataggattgttgcctacttgcatttttatccagtttaaggcaagatggaagacttgggagcaggagagtagcaccatttggcaccatttggatggttaagcataatctgccttttcttgggtctgcaaattccctaagggcatcaactgtctcttgttcttcacttgagcttcagcctctaacccagtgcctggcatagaggtgtacgttggtcattcgcaagtgagtgcgctctcttcacaagagcattttctccctgtgagtctcagacacattaagaagcttgaggcagcattactacggctgtaaagttacagggacttacctaccttctaggaagaacagtctgtaaacttaaacattaagccattatggttgcttcttctccctttgcctttgccacatgctgccatcctactggatacagatgggaaagatgcccttgaagttaggattggagtccacagatgttcttaaaactgtaatagaagcttgctgaatgcaagtatagatagaattttgagaatgtctactcttaggcataacagtacattttttaaatttagataattttttagtaattttatgtacaatttgcttcattgaatttttataggtagatattaaaaccattaaacataaataatgctcattccatccacagagttgcagaattagaggttttattagttgctggtttgtattgattataagtttataacttcagaactgaattagaaataataagcattagcaatcagcaaggaaaaggtgaacatctctgctatttttcctttaatgtgtttggcatattcaaaatccctgttttagaaaagaaataatgttaaaacatgtttataatggagaaagactctaggcacagaaataatattgcagaagcttttaaagtgtctgttctgcaacttattttaaaacccaaaggagaaaggatggtactaccataaatcacattgacacagaaaaaccataggcagcttgagaacttaggtaacagtggagagtctaaaccgaaacattgactgcaggatctgtaagtcctgcagacaagtgtgatgctttgaaatgcctaaatagcttcaacgtagttggctgggagcattccggtcctgccagtcctctgcacagtgccatacatccagccttcatcaattgcttgaacatttatgatggcatctccatccttgaaggacacctcatctgcatcagcagccatatagtcatacatggcacggaagattttctattcgtggggatggaaaaggggaaatattatatgttggatttgcaacagttaacacacatctatttgtaagatctctcatgactgactccacaaacttaagttgaacaaaagagaatgtgcaagcatcaacaaagtaaaaggaacccacaaaataggaaatacttgcaagtcatgtatctgataggcaattaatatccagaacatatgacgaactcctacaactcaatgccttcccccaccaaaagaggcaaaggatatgaatagacatttctccaaaaaagatagacaaatagccaaaaagcacacaaaaggatgctcaaaattagtcatctggaaaatgcaaattattaaaaccacaatgagataccccttcacacatgccagaatggtgatgataaaaaagacagacaataacagacattagaaaggatgtggagaaattgggtccttcataaaccactggtggaagtggaaaagagtgcagccaccttggaaaagaatttggcagttatcacatgttaaatacagcattaccctatggcccagcaaattccactcctaggtgtatacccaagaagaatgaagacataggtctgcacaataatttgtacatccatgtccgtagcagcattactcataatagccaaaaagtggaaacaacttaaatgcccaccaactgatgaatgcataagcaagatctggtatatccatacagatctattattgggtagtaacaagaatggggtagtaacaagaatgaagtactgacacatgatacaacatggatgaacttcaaaagtaaaggacgccatgcaccaaggtcagtatattgtatggttttatttatatgaaatgtcttaggtagccaaataatatagtgacaggaaatggatacctaggattggatggagcagaaaggggatggagaatgaatgccaatgggcaccagcatttgtttgtttgttttaattcaccagaagagttttgaatacagttttttttatggtgatgaaagtattctaaaattagattatggagatggttggaaaaaaagcttaaaatcattgtacactttatgaacttcatactaagttatgtatgcatgaaattgtgtgtgtgtgcgcatgtgcgtgtgtgtgtactgacagaaaagacagaatatgctgctaattttatttatggcctttttctacctttcgaagaggtcagtcttgtattttagagaagaatttgaaaacccgtagcactattgcatgtcatctttcactctgggaatttgggagcatacgagtagtaaaagtttctcaaagctatcctccacagtgttaaaattgtaataa

SEQ ID NO: 2940 - DNA, 6000 bp, Homo sapiens
tgggctaatttcttgttggtttgggggaaaggggcttaggtggctcagacattaattttttcccttgaatttagaagttaagagtataaaatgcattttagtatgtctataatattggatgctttgtaaatatttttactatggtatagaaatagaaaatagtctattaaacatagttataaattatgatcatcctatagatcggggctcagaccttcaccttttgcatctgaccttccatcaggagacccttgaagacttctcctgcattgccctatcacctgaaacccagctcattgatcgtcatcattcattaattccacaacattgacagagcccttggtctgtactagaggcttaaggccctgtcctcatggagcactcagaacgttctctctagtctcttcctgattctttctaggcaggtttactaccttttacttgctcagttcatttctgtgttctcaagctggctttccctctgggaatattcctccatggaagattgccagaaagcttccaatgatctcttcttgctcttgagatttcttcttccctacagagtggcacgtgtctctttctgtctgaatctgaactcttctgacttttctatattttttcctattgtgtaatctatcactctagccatctaatctttttcttttttttagatagaggtggggtctcactctgttgcccaggctagtctagaactcctaggctcaagtgatcctcctgccttaacctcccaaagtgctgggattacaggcgtgaggcaccgtgcccagtcttgatctatttttttatcggacattttttgaatgcccatatactagcaaatttcaaggtgtggaggagcttctccttgccatttaaaagttttcatttatttgacataatcattttataaaattatgtatttgcacaacttatgtccagaggccttctttatgcttcaattacttcaattacttaaaacgtatttattgaactttttctgaatataaaaagaaatacatgatttgttttacaaaatttggaaaagcatacataaagaaataataactatgtgatctcacagcccaaggctagttattattaactttttggggcacatccttccagttttttttctttttaagagatggggtctcatcatgtcgcccaggctagtcttgaactcttgtgttcaagtgatcctcccaccttggcctcctgagtacttccagtgtttttgatgcatacttaggaataaatccagatcatatccattttttcacttactatagtgtgaaaatgttatcttctctggtattctttgaagacatgattttaaataatggcatgacattccattttcaggctaagctgcagtttgtttaaataactccccattgccagtaaaagccttttttttaaaggttggtgagtgctgtcttatcaaaaaccacatgaagacaggaatcaaacatttaattgtccttctaaggaagtatccacaacaaaaatataactaaagtaagttgatcatgtatatgctgtaatcctctagttatcattaaaaataaacatagccaatctgcattaaatataacatgagttagggtggacgtggtggctcatgcctgtaaccctagcactttaagaggccaaggcaggtgtactgcctgagctcaggagtttgagaccaccctgggcaacatggtgaaaccccatctctactaaaatacaaaaaattagccgggcattgtgataggcatctgcagtcccagctactcaggaggctgaggcatgagacttccttgaatctgggaagcagaggttgcagtgagccaagattgcaccactgcactccagcctgggtgacaattaaaaaaaaaaaaagtactatgaattggcataaggataacttaaaaacttgaagctctggagaaggttgggagaaagataacctaccatcatcaaacctttttggttgggctttgtttaccatttttgagaggaactgagctctgtacagtctcagaattggtaggagctttaaaaatcactcagtgactctaacctctttctcgtagatgaggaaattgaatcaagttacctgctgagactaatactcaggtctcttaacttccttcctgtcccatgttcttttcaccgcaatctgctgactaagcttactcttaaaaatacagaaagagcatacatttatcaacatgtcattacagaaactctgttcctcttatagtgcatgtatttaggtataaaaatcgaatggcaagatcctgggtatgtatccaagggaaaggaaagcctatgtccacagaaagacttgtacatgaatgttcttagcagcattattcgtaacagccaaaaagtgaaaacaatgcaaatgtccatcaatagtttaatggataaacaagtgtggtacactcattcagtgtaatactacttaaaaataaaaacaaactattgataatgcaacaatgtggacgaatctctcaaaaaaataatgtcgagtgaaagaagccagacaaggcctggcacggtggctcaggcctgtaatcccagcactttgggaggccaaggtgggcggatcacctgaggtcaggagattgagaccagcctggccaacatggtgaaaccccatctctactaaaaatacaaagttagctggatgtagtggcacgtgcctgtaattccagctactcaggaggttgaggcaggagaatcatttgaacccgggaggcggaggctgcagtgagccgagatggcactccagcctgggcaaaacagagtaagactctgtctcaaaaacaaaaaacaaaaaacaaaaccaaagccagacaagagtacaaattgactgtatggcctgcatttatctaaaattctatgaaatggaaagctacccatatgacagaaagatctgtggttggagagaatggaagtagtgtggaggaggaaccacaaagaggaaactttggagggtgatagatacattcaccatcttccttgtagaagtggtttcagggaggtatacacatcaaaacttatcaaattgtacactttatttttatttttttgagacagagtctaggagtctcgctctgtcgcccaggctggagtgcaacgttgcgatctaggcttaccgcaacttctgcctcccgggttcaagcgattctcctgcctcagcctcccgagtagctgggacttcaggcgcgtgccgctacacccggctaatttttgtattttaagtagagatggggtttcaccatgttggccaggctggtctcaaactcctgacctcgtgatccgcccacctcggcctcccaaagtgctggggttacaggcgtgagccaccgcacctggccaataattgtacactttaaatatgtgcagtttattttgtcaattatacctcaataaagttgtttgtgagatgtccctcttaagtttgaaaagcagacaagactaaaaactcactgaagtatctaaagcacaaggcaactacaattacttctggagataactgacaatcaaggttcttttctagtatgatagtttatctgaacaaaacattactatgagaaatgcgaagtcataaaaataaaaaatagaaacgacatttttgtccccctggtaatcatgccatttcctcttgtctgtgcagtagcgctatatcataatctttttagtgctctattcaatttggttttctaaagagagaaataaccttgttgtacttttcctgaactagagtgctcttttatgtacaagaagcccaatccctggtgtgagtatacttgtgtgggtctgtagaaagctacactctatctataaattttagcaaatgctgttatttattttgggatttttgtagtcgggactcagcggagacactagaaacaaattataagtttctagaaaccataccttctgcaagatgaacgctgtatagttttcctaaatatgtgattcagtaatcacatttttcatttagattttccacttactgttttaaaacaaagaattgctataccatacagtctacaaaactggtaattttcaatttcctcattaaagattcttcactcttttttagaaaacacgagaaagttttatttcccaactctcccactacccatgtttattttcatagctcttttattcggtcattattcccattctgcagacggggaggcgcacatacgtttttctgcacagtacagaggggcaagaaagaaggaactctcaacttttcagttccattttgagaaacgatcacattgaactcccgagaagcggcagctgagcgagagcagcagcatttctccccgtgttgggtgtgggtcaggagagaggcgcgcttccgcgggagacagggggagtcaggtggcagcggcgctggagcccgagcggcgcggcgggggcgcgcctccctccggccggcgcggggacgctgcccccgcgcacgcgagtccggcaaccccgggctcccgcgccgcgcggcgatccgcgggtgcggcaggggcgccccggcgctctagtctcttccctcgcgcgctcgctccttccccatgcccccaccccccagcccctggcaggtccctcccccaagcctgctcccgcggccgccgctgccgccgccgccgccgccgccgctaccggaggcgcaggagcctcgcgatagtgtttgcacaggcggcgcgtgacgccgccgccgcctgtaactgatgcagaggttaccccaccgcctcagccgccacccacagcccgccgccgccgcctcccgggcgacgccgggggccgacgcactgcagaggtgccggcaggttccgcccgcggaagtgtcctcggccggcgcagcccgcgctccgcccgcgctccgaccccggcccggctggcaccccctcgacgcctccgccgccgcgctcctttcctcctcctctcctctggcgcgcccgctcgctccctcgcttctccccctttccctcctccctgtcccctctccttccctcacctctttcctccccacctcccctcttctcggtttcctcccccatccccttgactctcccctcccagccctcgctctctcgctcgccctcagcgcggcccccgccatgacggaggcgggtgccggtgccgttgccgccgctgccgtcgcagggggggagtcgggttcccagaaagtagcttgatgagtgtccaaagtagcagtggaagtttggaggggccgccatcttggtcccagctctccacgtctccaaccccgggctcggcggcggcggccaggtccctgctgaatcacacgccgccatccgggaggcccagggaaggtaagcaccgccgcgcccgcgcccgctcgcgggcctcctctcccgcgccgcggacccccgcgccccccccccgccccccccgccccggggcttctccgccagaccctggggtgggggatggtggcgaggtggacgcgaggccgcccggctccccggctctggggaggtagtgccctggctgtggatggtggttcgcgggtggcggaggagacggacgagggggtgcgcgctggtggggacggggcgaggcgcatagactcgcctggggttcctgggagccagtcctgcgagggtgggaagcctccccccagacgcgagcccctttctgctccatttgccagtacactcagtactcttaacctcctggcctccggtctctggtgggttttccctcccgctggagccttcgtcctcgagccccctccccttctcccgcgcactcctcccatagaggcggtccccactttgcgagctttgctgcccgggacctggaggatgcccctcgcttgctgggtttctcctttggggagagacgctgaaattatctgggcagactttgatcccctgtgtggccccctagagcaatttaaacgacagactgactcgtgggcaggcttttaaaaccgcccctccagatggttgcaactttctctccttcgcc

SEQ ID NO: 2941 - DNA, 6000 bp, Homo sapiens
caaagggtgagtctctgttagcaaagcctatagtggcaattccatttttattgccattgattctttttttttttttttttttttttgagttagggtcttgctctgtcacccaggctggagtacggtggcatgatctcagctcactgcaacctccgcctcctaagctcaagccaccctcccacctcagcctctcaagtagctgggactacaggtgctcaacaccacacctggctaatttttgtattttcagtagagatggggtttcaccatgttggccaggctggtctcgaactcctgacctgaagtgatccactcgcctcagcctctcaaagtgctgggattacaggcgtgagccaccgcgcccagctgccattgattctttagaatgagcatgtgaattaattctagagaatcagacttgaaagaaatttttctgggataagtagtagcttctggaaaaagttttcctccaattgggagggcaaactgccctgttgggatgtttcaacattgctgtatgagaagaagatgcctggagatggggcagccagcctgcaaccatcatgagataacctggggacaaaacccagcacactgcggataggagcaagaaaacatggcgggagacagaatccctgatggcgctgtcgagcttgctggggctcagagcacgatagcccaaagtatggcaccttggcctgctgagtactttcaactgagggacattgtaaaggccccagaagcaaggtgtccctgactgtctcctgtcctcctatctcctgcacagaagccaaattcctctttcctaaggtgagtcatagaaactagaacccttctgcctcaaagcaagctatgaagcctagacaggtcactctctccattttcccttgaaaccctcattccagagggttctgccccatgcccgggaggaaagaatactacacagacaggccgagaagaatctgaacagacaggctttgctgggcttcccctatcagtctgttaccattagattgtccagccacatttcgacatgtgtctattcttcatggaacctaagtgtaaaaacagacagtttcctccgagtctttgggtcttcatttctgaaggttcctatgccacataaatctttggttaaataaattggctatgcttttttgttaaccagtcttttgttatcagagtgtcagctgtgaccctcacggtgggtgaggaaaaatagctcaccttcctgcccctacaatttcttaaattaactgacctggaaatcactctgtctccagaattcctaagtggaaaaataaattcctttaacccatttttagctgggttttctgttataaacaatgaaaagagttagaattgaaatctgggacctcatttatcatcagatttacatcaggaaatagcatatttatttggaaaatcagatttctttatctgaggaataaatgaagaatgggaatattagcaattctaaaatcagctagagcacctctaacctcagaatcacccaatattgttaggtcagctgccacccataatctgatatcaacatagatttagatcaaatacagacaaggcagatgtgcatctctttatacatggatatagccttgaaaatagatttctaccttttcaaagcaatgtcacttgccagagacagacatagacatttgaaatgcattatagccttcacagtccatgtgggcatctctcatttggaatgccatctgctgagctcttccaaaactgagctcgacaggtaattctatctgtgaggaacacattcaactgacaagcagctatttggtttccctctacaggaatgaagatacacacacacacacacacacacacacacacacacacactctctctctctctctctctctctctctctctctctctccacattgatagcttccttttatagttttttcattttggtccttaaatatactctgattctttcattttacctttttaaaatgtctcttctcgttacaatttccgacaaggtcacatggtagagaaaatatgtgctttgagacctcagaatcagcctaaaatcttggttctgccacttaatgctttgcaactttgggcaagttcctttgcttctgagcctcagtttctcatctataaaatgtgaatgctaacgtgtcttctcacactgccatcactcacttttatataacattttaatctataagttgtcacattttaaaatcacactgatcttaagtcacacagggattttggctggaagagaatgttattccttgattcttagtgctagggttctcggtggaaagcagttggctcttcatttcttcttcatgatctcacagaagagtaaagaggattcaggaccttctgattcatcactatggaggatagagctgacaaagaacctcttcccaatataaacacatacaaatgctagataaaatattactacatcattttttaagtggaagaaatgaagaaagaaaaaggtaagagaaataaagcaatccattctagcaatgaagcaaaaactcacagccaaagtagcaagattcaggagttaccaacagctcaggggaagaccaaaccagcatgtcggccctatgagataggtgctgagtggcagcctccacacagccctgggactctgcaagaatctcaagtccagggtcaataaatacagatctacctagaacatcataatgaataacataacattaaagataaggggaaaaaaatcttaaaacaaacaagggaaaggcagattgtctacactggatcaacaggcaacaaaatagaggtgaggcacaaaagcaataaacatcttaaaagtactaggaaaaaatcactgtcatccttctatatgcctaataagcaaacattaaaatatagaaagcaaaagcaaatgggaacacgagaaaattttagaaatccagagtcatagtagaagattttagtgcctctatccaaaactgatagattaaagggtcaaaaaatcagtaaacttctagagaattcgaaccacacaattatcaatttcatatataaatagtaccctaccaccaataatataatatgcaatattatgttcactttttaagcgtgcatgaattttttaaaaaatgaattacatactgggccataaaagaagagaaataccaaaaattggtatattatctctgaaaaaatgtaatataattgaaaatgaattattaaaaagatgctaaataaaaccttaatgtttataaaaactaaaaagtacacttttaaataatttacttttcaaataaaataagttagaaataaaaacatgttgaactaaatgacagtaaaatgactacttattaaaatttggatacagctaggagagttaaagccttaaatgtaggtacatcagcatttaaaagtattaaaaatctgtaagatcaatattcatctaaggaagttagaaaaggagcaacagagtgcattcaaaaatggtagcaggaagaagaaagaaaaacaaaagtagaaattaataaaataaaaaataaacaataaagataaatcttatgttttgaaagactaataaaatagagaagtgtctggtgacaaaccaaaatatacaggaggcacaattaatcatattaggaatgaaagaagctcataattacagatgaagggaaatttaaaccacagaaattattatgttgagtaacattaaattgctgatattcaaccttttgactttgcaaaactgcaatttgatgttaatatgaacaatcatagtcctaacatttgaaaatataaagtgaataatttttcagataaatgacaaaaattcaccaaagaggaaattttaaaactttaatatacttataatcattaaagaaattgaattatagtaaaaaaaagtttccccaaacagcatcactcaatttacaacccagtgttagcaaaccttcaagaaataacagtttatacctaccttattgtcttccaaagaatagaaagatagagaaaagaaatcattggttcatttcaaagtatcaatcttagagaaattctcacacatgtgtataatgataggaagataacatccaaggatgttcataatcagaaagtttataatatccaaaatcataaatcactaaatgtctttcaataaagaaacatataagtaaattatgggatattcataccatagtcaaaataaataaatcagaggtatatgtatcagcacagaaaaatcttttttctttttttttttttccttttttttggagtcttgctcttgttgcccaggctggagggcaatggcaccatctcggctcaccgcaacctccacctcccgggttcaagtgattctcctgcctcagcctcccaagtagctgggattacaggtatgtaccaccatgcccagctaattttgtattttcactagagacagggtttctccctgttgtcaggctggtctcaaactcctgacctcaggtgatccgcccaccttggcctcctaaagtgctgggattacaggcgtgagccaccacacccagcctgaaaaatctttaactattaaagatcagttaaaaaacaagttgcaaaagaaaatgtacaaggtgatatcatttataaaaatattttcatcttataaaggtggtatttgtataaaaataactacaagttccttgtggatatagaggtagtaaaagtatgaaacatacatgacagtgacactgaggatagttactatatctggggatgaagggaagtagatgggaggggcttaaggagggaatttcaatatctgtcactgtttatttgtgagggttaaagtaaatacttgtagtgggtggaatggtggtcctccaaaagctatgtccaccaaaagcctgcgaatatgaccctatttggaaaaagggtctttgcagatataatcaagttaagggttttgagatgagatcatactgggttagggcgggctctcaatgcaatgatcagtgtcctagaagagaagagagggagaaggcacactgaggaatgccaaggactgccagcagcaccagaagctaggagagaggcacagaacagactcctagcttctcctaggctccctctgagcctccaggaagaaccaatcccggtgacatcttgattttggacttctggcatcagaactgtgagagaataaatttctgttatttttaagccatcaaatttgggataatttgcaatattgtatttctttcctagagctgctgtaacaaaagttaatatatgtcaaacctgggaggtttgtgtgtattttctgtatttctctccatattttaaatacccgaggaagaggtttgcaggtgcaaaccttcagtaaaatgccctttaatgtctctcagctgcttttggctccagatatacgggtacacttgatagtggaaactgaagtcagttctctgttccattttctcctttgcctaactctggccatttaccaaagagttgctagcgtcttggcttttggtgttctctatagcatgttcaaaagttctgacatcaagcccagaatcaacattttccagaatgattatgtaactgtagtaggtctgttgcctgatgaattggggcaggtcaatacgccaagacaccaggttgcagaaaagaaagcagtttaattgtacagctgttgaacaaggagacgggaggaaatctcaaatctatctccctgaggagtctggggctagggtgtttaggggttttagagtggtccaaagtgtggagattgttgattggtggaagagtgcagggtggtgtcgggacagggggatgaagaaactgtattctcttgcggattccattcctctataggggccttcaaactgggtggtgtcagctatttccctggaattcggaatttggaaaacatcttaagcaagtcttaaaagtcttatgactctaatgtcacagatcttatctttggggacagcagggatgcaaatgggcagtatctggagc

SEQ ID NO: 2942 - DNA, 6000 bp, Homo sapiens
tgactaggactcaagactcagatatgtaggactttatcatcccacatgaccatcaggtagtatggtcccgaggaggggacagttgtttaaggacagggctggcaccacatcccagattttctgccatttagcaaagtgctctcttccctgcttgatgcagctgccctgttacgctgcgtcttgaagcagagaacaaggcaaccaactcccttcagactctaaaatatcagttctcaaaatgcagcctggggaccctttggggggtttgcaaggtcagaactcttcataaaaatattgacactctctcatgagtgtacagtggaatttcccagaggatatatgtagtatgatattggaatagattaaattcagaagcagatattagaatccaacttttgtctactaagctaaacgttaaagagatttgcaaaaatgtaaaacaatggtattctttcagtttttaaaaatctggggcaatggttatttttcactaaaatgttatttatgttaacatagataggcttattggcttattatttttaaatggattaatttctaattttttttttttttgagacggagtcttgccctgtagcccaggctggcgtgcagtggcaccatctcagttcattgcaacctctgcctcccaagtcctgcttcaagcaattctcctgcttcagcctcccgagtagctgggattacaggcacctgccaccaggcccagctaatttttgtatttttagtagagacggggtttcaccatgttggccaggctggtctcgaactcctgaccttgtgatcaacctgcctcagcctcccaaagtgctgagattacagccgtgagccgccgtgcccagctttaatttctaatataataaatttgatagatatgactcacttaaaagctatttggcatcctcaatgacttttttagagtgtaacggagtcctgagaccaaaaagtttgagaactgcttgatttgaaaaaacaagcctaaagtctaccttttgctccctgagggaaggcaagttgcccaacttttccaagactttttctggccccatagcatgggatgatgacttaaaactacctgctagggttattgtgaagactaaatgggaagacgtctgtgtaaaactcttaattcagtgcatggcgtatgactgttcagtaaatattaaccatctattattattattgcttctgctattactgttaccactactatgagggctattactccctgctggtgatgtctttactcagatacatgaagaacttattctttgaacttgctaaatgctctcaggccattgcacttgtttcctttgcctggaatatctttccctcctttttgtccagcaaatcctcttcatttcttcttgtattaacttcgagcttctttgatttagaagccttcattgacctctcaaaactatgctaggtaccctgctgtaagccccaatctttgcccctttaagagcataccatagtgtaattgctcgtgtctttgctggctcttccattgcactccgaaaactctgtgagagaggggaccatgcttgttcactgctataatcataaagctctgcacagtgcctggcagtcagtaaatgcctgttgaatacattttgtaaaagtcttcaatatgtcttcttgccacaccgctcctttcatgtcccagggtgcctaaataagctcgatatcctgcatattcctgtaaatctctttgatcctcaagttagatgtaaacactaaactcaaacaatgatctgggcttcatttatgattttaaggcaatggttaaatgacttaaaggatgtttgattatataccttaatttcccagggattcagagttgtacaggaggtaaagccttggtctttgcataaaagttgggtaattcttagctatgatccaggcatagactattcacaagttaagatggaaaactaagacggctagagaaaatgcccctgggtgccagcttgtgccataactcttaccactataagaggaggggaggataaagactgctttcttccttttaagttgccattccttctgccattcgtagaatttatgtctgcacttttctcatccactgatagctagtggcagtttcagaatatctatttgaagaggggcttagaagaaacagtcccattgaatagggggataggaaagtttttccttaagctatatttatatttttcaacttagattgcatgtttattttggagaatgttcttggatataagagggtgctaaggacttccaagccacctcactgctaagagtacatctatttttagtgtggaaacatttgaagtaaaggaataggcaggtttgataagagaagtttgactaggtctcttttgttattgcttttcacacgggtaaacctaaactctgcctggtgagcattaaccaattcaaaaaagatttgaaagttcaaaaaagcagtcggtgttgagaatacatactagaccatatttattaggtctggggcctaaaaagatcagtataatcaataggaaacaggcagcttgacaaaagaaaaaccaaacttgaggcaatcagtttatcatacaatcattatatatttatttcagctatggacaatacatatgcagataccacacaatataagatgtgacctcaaagggcttgcaacctatttgggaagacaagaaaatgtctactagattatcatttaagcatgtttctgaaactaatctttagtgttcattgttcctgctggttattctcttggcctaattatgtgaggaaaacagaatgaaggcaaagggatgggaagcaagggcaatgtggctaaaaatattgatgctcttaagccatgtgttccaaatttaaagcaatacattcatggttttaaagctggaacctgcaactaacttctaattagtccctcttattttacagaggaggaaactgtggcctatcctgcaaagcactctagctgataactggtagctctaagaccagaagtcaggttctctgactctcagtctagggtcctttccaaaacaaacaagtgcctctgaaggtaaggtaaaatgactggagtcttcctatgcctggggtctatgctaaagagccttagtttttccttgaatggataggatggaattatttgaattattttattagacctgcattatacatttttttagcatggcaattttcatcaattctaatttctcagttaccaaaataaaatttattaatgctaaaatctccagtccttatcaaagggcaaattaatcagactaataaattgttttttaacctctactcattcatccctcaactttcatatctttaacctattgaatgacttacaaattttctatttcactcttgacctctttcctgaatttcagtttcatatttcagttgctgcatctctacctgtttttactcctatgacctcaaactcaacatgaagccagcttccctttcacgtattcctatttttgtcaatgacaccatcattcttccagtcatccaggtctgagatcttggcatcatctctcttcttcttctcttctaaatcttgtgggttaccaatttctgtggcctcttgctgaaacgtttaatatttctctcaattccatttcttcttttttttttttttttttttttttttttttttttgagacagagtctcactttcatccaggctggagtgcagtggcgcgactgtggttcactttagcctcgacttccccagctcaagcgattctcccacctcagcctcccgagtagctgggactatagatgtatgccaccacatcaggctaattttctgatttttttggagatgaggtctcactgtgttacccagccaggtctcaagcaatcctctcagcttggcctcccaaagtgctgggattacaggtaccatgcccagcccatttcttctttttaattccatttcctacatcctaactcaggtcctcatgatcccacaaccgggtggtgacaatatctactactcatcctggttccatcctagcaacccaacctacaactactgtggactactctctcaaaattaccatttaaacagaatcacaaacccccatttcacccctttgattctaatttttcacagctcccagtgtccatggataataaaattcaaattcaaaatcctgaataatgttgcccatgcccttgcaacctcctctcacttttccttcacagaaccatcctccccaatcagaaatttcttttcttcccaacgcccacctccacctttggcttaggcctgtaacggactctggctcctcttctgaattctgctctgttaaaattagcaactagagcagcagaccacggcccctcctcaaaattccagaggtacctactgatctttctagagaggcagccttcagacctatgttcccagaaatctctacgtttgtgcctttcccaactagagaattaactcttgcggggcacaaaacagcctctatttctttgcgtccccagcgcctgtttgttgaagactgagttgaaggagtagcaggtggtgttaatttgtcaaaaagatgagttaaggtgctgggggcgagggggaacacccccacggccctccccccacagcaaggcaggtgtgtctgggggcctcggcgggtgccggggcgcggggcggatggtgccccccgggcgcaggccagggaggcccgagcgccttccccacgccccgctcgcccgcgcgtgtgaggggagggcggcccagccgtttcgcgccgggaggtaggtggtgctgttgccgtgactgtcttcctcattggcgccgtgcagagaggcggaatgttcaactcctaactgcagcggaaacgtgggagccgcgcgggccgctgtcgtcccaacccccgccgccctcgtcgcgcgcggggcctccgcgcccccggctgctgctcacgccccgcccgggagccaggtaggggtcaggctggagcccgcggagggcggggagggagggggcgaggcccgccgcgctcgcgagtcgtccctgcgtctcggggccgaggctccgccggagcccgggagtctaggcggcctcgggaggctcctcggggctcccctccccgacccagggcccgcccggcggcggcggccggagcgagcgggcgggcgagcgagcgagcgttcgcggcgcccgggaagtcctcgcgggaccttggccgcggcgccgccaagtgcggttcgggagagttcgggccggtcccatggagaagttggcgcctggaggcgcgggcgcaggccggagcggccccggctttcgcggtcccgggcgtgcggcacgggcaggggctccgcgagcagcagagccggccaagcagcgggtgactggggcactgtcgggaggcgaaccgcgaggcccccaaatcagggtagggtgcaggccacttcccagcactcgctgtgcgtgcgaggagggacgacgaacttctgcttttctaagaactcgaccgcgagcggtgttgcttcccatccattttccttcattctgttttcctcacacaattaggccatgcgaataaccagcaggaacaatgaacactaaagattagttttaaaaacatgcgtaaatgtatccagagccaccgctccccgcccttcctgccccgggcttgggcagcatgaagcgcccgccctctcgggcttccccctttcctcccaccggagccggggatgtctcctttggcgaccctcaggcagcggctttttgtgggctcccagacctgcaccaggcccagaagtgcttacccaggccgtcgcctcgtctggcctcgcttgcccatgacagctttcagaaaactttaattcaggactggctagatgacatccgattgcctaaaaaatttttttaaaaagttatctctgttagatcgctgaaaatgttatgtttctgatgcgctttgagatcgcgcataagtactgtttatggggaacttaattact

SEQ ID NO: 2943 - DNA, 6000 bp, Homo sapiens
aaacaattcttttaatgcagtgagatgaaaacgttggatttgatttgatataccatgtaaataaatttatatagatgactttttattaaattctggtatattcattaagtggagaatacatttgaaaaattagaacataatttaatcaagtagcagtcttccccaacacgctttaaatataaataactagcactcagatttttcattcttctcgtcataaattgatccccttagaaaaatgattcttaaaggagagaaaactcaaggggaaaaaatatatatatggtttaactttcatgtatatgggagtggaaatctcaaccaagtttttcagctacatccatgatgctttgccaagctcactggagttaaacctgtactcacataccctagattactagtttattcggtattcagatggaacttaattttttatggtttcaataaaacattcaagtaattggatagttccattcacaactagccagttcccaaaatggcatggtgtatcacaaaatagcagtgattctgtgaagaacctggctagttgcctcctgtcaagtggtgaaatcctggagaagtgtgcttctcaaaggtcagcctttttctggcacccttaggtcagtgtcagttgtgactgatcctgtctcagttcatccacattccctgggcttgttctgcagcataaggcttacatgaattcatactgatctcatcctgcttcagacctctgcctttgttttggaaaggatttctctactcctccttcttccctgaccctgggattcagagggacccagtactgaaagtcccaaatacactctccgaagaagcctaggcagcagtttccaaatcaggatttgcttcagaaccctccggggcacttgtaaaaattacacaccttaagttttacatgacttggttgaaacctttccagctacaaaaggtataatggaagaataaccagaagctatttactcacttattcaacaaatgcttttttaatggaaaagctgcctaactgtgtacttggctgtgtagtaggtgctgaggatccagatgtaaacagaactgagttttgactttagggaatttatagtctggtgggaattaagtgggaaagataaatgggtaaagaaaggtgctgtggcacatgagagggagaattcagctgtgctcaggagactcaaagaggtggtcagggataggagtttgctgtgcagagaaaagtatttgaagcagagacactagcctgtgtagaaatgtggagatgtgagaggtcagtgtatattgggaagtgcaggcagttcctcgtgtgtgtatgggaaatgagatgacatgaagtcaaagtggctataagtggtaaatgaataacacaagaaactttcttggaattagaatacatgagttacagatagaaagagttcactgagtgtcctaccaatgaatgaaaaagactcattcctaaacatatcctattaaaattcaggattcctgggatcaatagaggatcctaaaagctttcagagaggaaaaaataatataaaaatggttaataatcagtaacatcagactgctcagtagccacattagaaactaggagaaaatgaagtaatactttcaaaattatatggaaaatcatttcctacctagaattgtatgcccaaccaggctaccaatcaagacattttaagatatacagattctcaaaaaattctattctgtgtgttctattcaggtaactaatgggagatatgtgtgtcatcaaaacaagggagtaaaccaagaaagggaagatgcgaaatccaaagacaaggttctcacagaggaaaaaggtgaaggaaattcttaggatggtagccaacaggagtcccagtccaagtcaggcctagagagcaaccattccagccagactgaatcaggatgaagggcctagaaggagtgtctctaaaaacaatagaaccaaagagtgaaaaaaaagagaaattacttgttttaattttattgagaggagttttgcagctcgtgggagagattaatggggggaatgtgttaggagtgtaaaaagctaagcaaacaacaacaaaaaagcaaaaacagggcaactgataactctaagagaatccaaacgttatccaagaaaggaaatgtaattattgaatcctacatggcactgctgggaataatgtttactttgttggattactgtaaacactgactattgacttaaccaaatgttacagtacggttggaagctgggaggtttgggcaagtatgccatgcttgcatgcatggaggtagagggtgatatatgagaactaaattcttgtcttccacagaagttaatagataatatctaaaatggaaaatcaagaaatagtaatataagcacattctttagaaatacagagttcagtgccagaagaaaatgctaaaggagttgaaattagttgcgtctagagagtgggaattgggtatggggaatggggagacaggaaacttctattttttatgataagctttgtagttcaatttcattttaatgcttttataaaaataattaacaaaaatgtaaacctagtgtctgtaatgctgagggaaccttgcaaatggtgtttgacatttggttgaacaaactttttagcttgcatactctatatacctacccttggcaacattcctgaattttatacaaattttgttcttttccatgtttaactaaataggaattacaaaaaagttggtaacataaactgttgattcacatatgtttatagactatatttggatactatgatctttccctcactcatatttttatgtggagtgtatcttctaaactttagaggatgaacaaataacccttcctctttctcgccttctccccaaagtagagcagcgtttgacttcatgtgagaaatcagcattcttcagtgacctgattttcctgaaatgggatggctagccagctgcatgctaagatctttgagctgcctgtgcacttcactcagcagagccccaggctttttatggagaaatgttgccagtttatatggatacaaaccaaccccttctacctttttatttaaaaaaaaaaaactcacagaagaatggaaagagtagtaaaatgtccagatacctgtcacctagatgtgccagttcttaacgttttggcacacttgctttctctctccctctctctattcctatgtacttttttggatgtgtgtgtcgggggacagggatgaggactgaaccattttaaagtaaattatagacatcatactttaaaatggctacatgcatttcccaagcaatacatccaaggacatccatctataaagcaaaaataccattatttgccatggataaaataatatcatctaatttatagttaatatttagatttctctaatatcccaataatattttctatagatttttttatccagaatccagtgatcataaattatatgtagtcatcgtgtttccctttttttttttgagatggagtctcgctctgttgcccaggctggagtgcagtggcactatctcagctcactgcaacctccacctcctgggttcagggaattctcatgtctcagcctcccaagagctggaattacaggtgtctgccaccacacctggctaatttttgtatgcttagggttttgtcatgttggccaggctggtctcgaactcctgacctcaagagatccacctgcctcggcctcccaaagtactgggattacaggcgtgagccaccacatccagcctagtcattgtgtttaagttttccttatgctagaagtttttctgcaaaaaacaaacaaaaaaaaactttcatgacattcataattacaaggagcctaggccagatgttttgtagaatgtcctagaaatatagatttgtccctcttaaggttttggtttatactttttgcaagaatagtataaaccacataaaatagtacacatgggataaaatagtacacaaacttttttatccactaattttaagcattttatgtaggttcaaaattttaacccaattttagtccagtttttgtgtttgtaagtctcactaatctatggtttggcatacagtgttaacaatggccacttacctggagaatagtaaaactccttagactgtaggaaagatcactagaataatctctgggaggggtaatacgtttctttggaaacaagcataatattttttaacgtccttggcagtattctttcgatgacttaatatattgtaatcaagggcaaattttttctactctttaagttttgttacagtatacagtccagagagccacttctggcaaacagtccagcttttctgtcatccctaacctgaaagtttgtttttggagtcaacgtttattgtgtgttcagtttgcagccgtttggctgtctgtgtaccaggatgctcggtggcttaggttgtgtatattttgtgtgaagtgagtgcagcgtggagaggtggcatgcctcagatgccaggggagctatgcaagcttgctgtggaaagcatgcttcccgtctgtcagggcttcctgagaggagacctggtgacacagtagcctttcggcagagctccttgggatgagtaggaagtgctgctgcaggttttgtctgggggatatctgagccatttctctgtgggcagctgtgtttcaaagtctgggcaggttgttgttgaattttgcgtgggctgccagggtgagtgttttcgaattgtttataatcttgcttttcttcttcctaagtcaccgtgactttctggaagtttcacaggactcgttcatgatatattatctaaagtaggattcagaggatttagcctaatatatttgtaattcagcttttctttttctttctttctgcagattttgtggaagtataatactttgtcattatgagatgtcgtctctcggtgcctcctttgtgcaaattaaatttgatgacttgcagttttttgaaaactgcggtggaggaagttttgggagtgtttatcgagccaaatggatatcacaggacaaggaggtggctgtaaagaagctcctcaaaatagagaaagaggtaaggtcttttccagctgacagaaacagtcacgataccatttatgtaagctttttcaacctcgagttagagggtcacagggctgcaagagacctagcaaggcctttgggactgatccacgaggccgtttcccaatttccattctgggagccccataaatagaaattattgcagcgtgtgctttagggttgagttctactaggggtcagctgaagtaagaggatttctttccagggcatgaaagaccaaatgttctctgagctctcctggaggcagaggtgagattttagaccttcccagggttcaagcttttctcttccctgggcagccaagaggggtcggtaaagagtaatgtgtgaagtttttataccctttccattttctctgcttgaacttctggtcatcagcagttgtcttttaaaagataagacactgttttttttaactgaaatatgcagtacctgtttcttggatttcacctctacttaaggctaacagtgatggtctttgtattatatagaattaataggtgccagacagagagctgtcctcctagtaaaatcagaaaagggtcttggctttcagagcctgggatttgtgctggtcctagttgagctcagagttcttagaactgtcatccttctcaggaatgagatataacatggttgtcacattcagtttggtaccatgagaataaaagtaattacagagctgacctgcagggactcagcagcattgataacttcagcagcgaccctctggagctggttttggtcatttctatttacgccctgttttggcaaattattgttcaatatctttttaaagtgaactttcccataaatatcctttaatctccctgaatgatttcatttttttcattaactgctgccagtgaaccatagc

SEQ ID NO: 2944 - DNA, 6000 bp, Homo sapiens
aaactttttatttattttaagaatataggcttatctgagacacatttatagagatctttagagtcaaacctcatgtgaggaaggaccctcaaaataatgcaatgagccacaaagagttcctgagactatctaacaattgaaaacgaatttcagaagctgagaagtttgactgcaagggaaataacatcctgtttccaatgtttaaagatctaaagtaattgttttcttccatataatggatacctttgagttgaattatatgaaattaaagttattgaactaacaactccaggagggtttttcccaaaagaacaagctacttttcaaaaactcagctccaacttcactttaaaaattaggaaattgaggccaggcgcagtggctcacacctgtaaacccagcactttgggaggctgaggggggtggatcacgaggtcaggcgttcaagaccagcctggacagcatagtgaaaccccatctctactaaaaatacaaaaaattagctgggcgtggtggcgggcgcctgtaatcccagctatttgggaggctgaggcaggagaatcgcttgaacctggaaggcagaggttgcagtgagctgagatagtgccactgcactccagcctgggcaacagtgctagactctgtctcaaaaaaaaaaaggaaactgatcctgaatattaggtaccagaatatagaggtcatcccagtatattatttgtacattatttatcataaatgtatccatattgaaactatgccaaaaacataagccttgatttgcttgtttctcaaaagaagaggcagtaacatttttcatgtgctaacagttttacccctgaaatagatatgcccaaacatttatgggaataagttggctgttcaaaataattacgtaaagtagaagataatgtctgtgaccactgtgagtggtgacatcttagaaaaaagttcggttgaaagaagaaaacttgaatattagagcgtattagaacaatctaaattaacactattttcctttcttcccagttttcatgtgtttacatacttacgtctaacttaaatgtgagacagaatctagaatttgttcacaagtgaattatttaataatttgaataaatagtattacatcagttctggctacaataaataaataagtggaagcaagtgaattctagactaatttttagtgtatattcagagtactaatccagataaaaagggagttaataacccacatttccctagaactgtatagactgctgaactgttttttgtgcttcctctaagcttttcttttgggtacaaagtttcttaatttttcatttgagatttaatctctgcttaatttatttttttaaaaatataatggtcaactaaatgtttccttatgaaagtgaaattgggaaaagtcaagataaatcctagaaactattttgttttaagcaaaatgagggcttaaaacttgcaacttcttttccatttgaaatttggcttgctgtggtgctttgcaaacttttggttgtgatttatcctgtcattcataaattatggcaaatatgctggagccaaatctgccattaaataaattctcacataattccctacattcatttatttcactaatcatttacctcctgtgtagtgccaactaattttgtggtatctattttcctgatttaaattggtcctaatttctctttttacttctgtcctttcttcccttttgatagcttctcttgcctcttgctgcaagaatgtctgaggagtcttactttgaatctaaaacagaggagtcaaacagtgcagagatgtcatgtcagatcacagcaacaagtaacggggagggccatggcatgaacccaagtctgcaggccatgatgctgatgggctttggggatatcttctcaatgaacaaagcaggagctgtgatgcattctgggatgcagataaacatgcaagccaagcagaattcttccaaaaccacatctaagagaagggggaagaaagtcaacatggctctggggttcagtgattttgacttgtcagaaggtgacgatgatgatgatgatgacggtgaggaggaggataatgacatggataatagtgaatgaaagcagaaagcaaagtaataaaatcacaaatgtttggaaaacacaaaagtaacttgtttatctcagtctgtacaaaaacagtaaggaggcagaaagccaagcactgcatttttaggccaatcacatttacatgaccgtaatttcttatcaattctacttttatttttgcttacagaaaaacggggggagaattaagccaaagaagtatatttatgaatcagcaaatgtggtgcctgattatagaaatttgtgatcctatatacaatataggacttttaaagttgtgacattctggctttttcttttaatgaatactttttagtttgtatttgactttatttcctttattcaaatcatttttaaaaacttacattttgaacaaacactcttaactcctaattgttctttgacacgtagtaattctgtgacatactttttttttcttatagcaatacactgtaatatcagaaatggttggcctgagcaacctagtaagacctcgtctctactaataattaaaaaactagctggcatggtagcacacacctgtagtcccagatacttgggaggccaaggcaggaggattgcttgagacctagcaatcagtcagggctgcagtgagccatgatggcaccactgcactctagcctgggcaagagaacaagatcctgtctcaaaaaacaaaaaaaagaaagaattgatagtacaaaatccaacaacaatactgagatgatctaagaaggttataacaaaatgctcttcagaaatacctaagtgctgagaatttttagtactaaagagcacagctgctcaaagtaaagcctgagcagtgttctcagtaatgtatttgaaggaaaaataccctgatttgaaaccaacagcagatgttgcaaactttcataccactgctggccatggaagcctcttaacaacacactgtcatttaaggctgtgcttgtgctttatacaaagagaaagaggtggtcttaaggggatgcttccaggggggtgagttcatgcctctcctgtattttccagcaagtggggtatgtgtggtggtttgttttttagaggggcataataatccaggattctaagcatatgctcagctattttaaagaggaaattaaatattataaaagaaatagtaaagataagttatcctcacttaggcaaaagcacaggtcctttccatatcaagtttagcctaccagggttgttttttgttttaaccctgcttaataatgttggtgttttagaagtagatacaggcactgctctgaaaacctggctagccaaggatattctcagaatgttatcacctgtttgtcaaagcttgtttaaattataaaacacttttaattatatatatgaggcaaaagaactaagacttttttcaaactaaattagaaaggagtgtcattatttgactgttaaaccaaaatatttttggtgggtctttttatggaagtttaaagaaaggacatcatcatagatatgatctaacagtatttctaactatatttgatcattaaaagcctcttggaatttgaagcgtgacgtgtttctaatgccccttgagaggtgaaaaataccacataatgatcagtatgctgtgccagcttcatttggggagaaataactagtagaaagttctgggtgtgaggtgtacagcagtctaggtggcatagtgatgaagaaagggatcagagtctgactgtcactcagaatcctgggctcagttgcttgacaaccttgggaaaattgttttatctttgtgcgtctgtttgctgatcttcagcgtgggaataataacagtacctacttgaaaggatcattgtgcggattaaaagaaataatatatgtaaagcactttaacacagcaccaggcccacggaaagtggctaatgttagctactatgaatggtgccagtgaagacactgaaaaataagtgatttcagtaaccttctggaaagctatcagtttcaaataatattttctctgtagtatgagatgaaattaaaagtggatagctttcaggaaagataaagagaacatgcttagaatgtaagctaaacagattttttctgttgctctttgaaaactatgagccctggccagcttaacctggtctgaggtgagactaaacacaaaaacagtagataaatctctccctaaaagatggattcccccacatacccatgctactagtttctctgtctattcacacatatgtacaaatacatgaacacagcctgtctgtgctcagacatagagaagtactacctgacttgagtcaatgcacccaagaagaaaagcttggagtagagcagaagggagggcttgggactcctgtctttccagcatgccctggggtgcagtggtcagccacctgaagagagagccaatagcatggggtttacaaggcaaagatagtcattcattcaacacatattcatagagctccttctctgtgccagacactgttctggaagatagctagatgaaaatctttgcactcacagagcttacatgccagtgagtgaagatcgatgataaataaagcaaatgcatcatatgttcacatttgataagtatatgccaaaaaatgaagccgggaaggaggacaaggcccatgggtgggtgttgaggtttttaaagtgtggtcaggaaaggccccactgataaggtaacatttgagcaagtctgaaaaaggcaaggggatctttggggctaacttcgggatccctgcactttatgtaagaatgtaaacctggagtctcatttaagaatgatcagcaatacgtttagaacatatgaactgaatgaaatggacattttttcttaatttatgtataaatccatatgattatacataaagttctgatgcattaataaaagcagccaaatagggccaaagagaaaaataacaggactctgtactggacctaactttatcattaattaggtaatattttcctcatttctttactgctgccattttcctcaccagtattccagagatggtcatagctcattactctaccaccaagaacctaaaaggaattagaatacagcagaattggcctcagtgaagagcttaaaattgttctcctcgtagaactggactattgatcattaccacgtgacgttggctctattactttctgttcccaatgtccttctagtggtttgaaaatgttaaaacatccctaaaatctaaatcatataatcagaattctatagtgtcccactctatctgtaaagatcatttggaagactttagactctattaattttaaaaggaatatttattagccatatgcagaatttctaatgatgatattgtacagcttctaattcacttttcagatcagtgtttgaaatggcaattatcagtgttggatttagttccaactacttgatttacaaaaatgtacatttagaggttaaaagaaacagtgagaaatgtaaacattcaaaatgataattgaatctctcagttgtgggaataattatcagagacatgcaactgaaaatgtctcacctttcatctttttttcttaattcataaagttatcttgtagaatttgatgagaccctccctagtcattctcaactggggcggtgctgtcaccgaatggtgtttgagagtgttggggctagggcacatttttggttgtcacagcaactggggtggcatttgctgcccagtgccaggaatagtaacattatgaatgccagggacagtgtgctcagtaaagtcttccatccaaaaggggcagggcacggtggctcacgcctgtaatcccagcactttgggaggccaaggtgggcggatcacctgatgtcaggggttcgagaccagcctggccaacatggtgaaac

SEQ ID NO: 2945 - DNA, 6000 bp, Homo sapiens
aagaatttgtgagatatctttacactccttgggagtagagtctgggtattatggatatcccattttgcttgttatatatgtttatccaagtgaatatgaggaagatttacctctttgtaaaacacttcataacacaacagaagagaaaacagcattttgactgttttcaacaaaccattatataagcctgaagatcagaaaagaattcaaggctggagatgccttcatagcatggtaacactacagagggtaactgaagcagtcggggggatgagggtttaagtgggcctggagagaggaggataggtaaataaggctgaagcaagcttatctgcatgcctcagaatccacccaggactacagtgttacagtgggggagggatggatgattttgagtctaggatacttgggaatactgcttactaggaagagaacagactaggagtgaaatggagcaacaagtctaaacttttatgtacacaggaggtccttgcagggaaaactctgaaaaagaaatgataccatttagccctttttaaagtgagaagaagaggacattgttcatgtcctaaaccatggctttactgagaccctgctgatggctggagttccctgcagaactttttctctgggacaagaattccaggattttacacattgttggatgtaccccatgggagaaggaatgtgcccttgaaactcaggatccagggttaagaggaagagttggttcaaaacaaacatcccatctccactaaaggcaaagcaccagcaagctaagctgtagaaaagcaaggctggaaggaagaaaatggaatgggaagttgcacatcggagagtaaccctgcttattctctttatgagtttcattatggccactattaaacagctgccacgaatgtcatgacccctggggagatggaacaggacaatggcagaagaaaggaaaaaagcaaacaaacagtagaaagaactaattgtatctgcatcataattcatttaatagcatggtatgaatacgccagttataaatgtttggtcccaaatcattttaccaaaatgtgaaattttcatttactctgatcacagttaaattgtgccccaagtatagtggcgcacgcctgtagccccagctactcggcagggtgaggcacgagaatcgcttgaaccccttgaacgcaggaggcagaggccacactgagctgagattgtgccactgcactccagcctgggtgacagagcaagactctgtctcccccgcccccccgcaaaaaaaaaactgtgcccttaataaaaaaaaattgataaaaatgttcagtgttattctttagtaaataaagcattaacagtactgattatatataatcatcctcaatcagttaccatttactgagtacttatggtgtatgtgattttacatttaatcttatttaatagtcctccaaatctacccgataaatattatccccattttgcagacaaggaaactaatgctcagagagcttaaggcttggtttaaatcacacaattatttagtgaaagtgggattataagtaggacaatctatctcctgaaatcctcaatttaccccattaacaccatagtatctctccaggttttaacgttttaagttttcgttctttttctttttctttcttttccttttgtgtttttttttttttttttttttttgagacagtctcgctccgttgcccaggctggagggcagcgacaccatcttgcctcactgcaaccttcacctcctggcttccagctatttttctgcctcagcctcctgaggaactgggattacaggtgcatgccaccacacctggctaatttttatatttttagtagagacggggtttcaccatgttagccaggctggccttgaactcctgacctcaagtgatccacctgccttggcctcccaaagtgctgggattacaagtgtgagccaccgtgcctgacccattttaagttttctagaacttgatttctcccacgctcaacaaagagtaagcactggcttaacaggactaataaggactaacttcttaggtgcctctgagttaaaaaaaaaaattggttcgtttgtgtgctatcatagtttcagttaaaacatttaataaagccttatttagttgtgcttattctaactaaccaagtgtgtgattttggccaagtcatttaaactccttgagttttcattatttagtggagctacaaggcacagtggctcacacctgtaatcccagcattttgggaggctgaggcagaagaattgcttgaggtcaggagttctagagcagcctggccaacatagagagaccctgtctctacaaataattaaaaaaaaaattatccaggcatggtggggtgcacctgcacaggtcccagctactcgggaggctgaggtgggagggtcacttgagcccaggagttcaaagctgcagtgagctgagatcgtaccactgtactccatcctgggcaacagagtgagaccttgtcccaaaaaacccctcaaaagaccaaaaatataatttactggggccattaataatcaaaaagatctgggttaatattctgccactgttgttatctgtgcctccatcctggacaagtatgcttttctttttacaaatcttacttttctctaaagatgggggtcttgctatgttgcctaggctggccttgaaccccggggctgaagtgattctcctgcctcagcctcccaagtagctaggactacaggcatgtgctgagccccttgggcaagtaaattaagatctctgagccacacctgcctcctcttattaaagagcactgtcttagctgttataacaaaatactataatctagatggcttaagcaacagaaatttgtcatatttctggagtctagaagtctgagattagcgtgccagtatgactgggttttggggagggccctcttcttttgcgttcttgctgtgtcctcatgtggtggagagagagagaactctctcttcttacaaggtcattaaccccatcatgggggctctgccctcataaccccatctaaatctaactaccacccaaaggtcccctccaaatactatcacgttggggttacaacttttaatatatgaatttgggggtgacactacagatactaatgcccatttcatagggtccctataaggcttaaggcaggtattaacataggaaagcacttaaagctgggtctggcttgggtaggtagttcaatgattcaacaaacactgagcacctacctggagccaagcactgcatgtgccacatgaagcgatattgggaaatgagtcacatgcagccaatctctggccttttggaggttttgaactagaaggggacacgcacataatcgtatgtgtgtgtatctacatacacaggtgatatgatgcacctgagagaatccagtctaggaactaggaaaacctttaaggagtgatacttcagctgtattctgaaggatgaggaatggagaggaggccaattccaggttccaaagtgaatctttgcgcaaaagccatgaggcagcaaggtgcaggggcttttaatgacctaagggaacgcactgtggggttgggaccatgatggccagaggaggttttgacaagaggctagtcaaagagcagagaaaaactttaaggagttttaagaaagggaagtgccacgatgagttttgtgtttggaaatgttttaggcggccacaccgcagtctcgggactggctgggacctggatagacacttggatatcagctagaaagctacgacaggaaaccaggcgaggacgaggcaactggggatgttgtggagcagagacggagagaaaatgggtgcattcgagacaagttagggggaaaaaatgcaaggacttggaaatgaacttggggcgcggcaggaaggcatgacgggttgctctgtaggtcttatctgtaaattacggcgatcagtgaaagatctggaggaggaaggtggacacactctctaacaaaaaaaaccctttttgaaattttataccaatattttaaaagtaaaccagatcttttcagacatgcctttgagctgatatttgttaactagttagaattagaaactttccttatttttactcagttacaatatacgccacagctgaggtgagaggaaagaaaaggttgctttcttaggaacaaagagtggtaccttcagtatcgtgggcaaagcttttccaagtccaacagcagtcaaaacagcgctttttataaataacactcagctaaaagtttctgggtttgtgattgttccaacggttaagctcggatgagggtccctggagtcgtagctcccgggaaacgtcgactggctttccacctggacttcatccgtccaggcagcccagaggggcttcaggccccgcccgctctcctgccaactacagcctcgcgactgcgctcagccttcaggccccgccccttcggtcaagcggcgtgctctcactgcacggcgcctgggccccgcgcgccgggacctcggtttcagccgtcctgtcctgccccgaggcccctaggccccgcccctgggccccgcgcgccaggacttcggtttcgaccgtcctgtcccgccccgaggctcctaggccccgccccctctgtccccggcgtgttctcgcggctccgcccctaggacccgcgcgccgggactttggcaagtttcagccgtccggccccgccccctcggtcccacggctctcgcggcccctcccctaagtcccacacgccgggactttggcaagtttcagcctccagccccacccctaggtcccgcccactcggccagcggctggctctcgcggccccgcccctgtgccctgcgagtccctattttgggagcattgcggccgccgtgccccgcccctccccgcgcgccccgcccctctggcggcccgccgtcccagacgcgggaagagcttggccggtttcgagtcgctggcctgcagcttccctgtggtttcccgaggcttccttgcttcccgctctgcgaggagcctttcatccgaaggcgggacgatgccggataatcggcagccgaggaaccggcagccgaggatccgctccgggaacgagcctcgttccgcgcccgccatggaaccggatggtcgcggtgcctgggcccacagtcgcgccgcgctcgaccgcctggagaagctgctgcgctgctcgcgttggtaaagacggagcttcttgggggtggctgcgagggcacgggtcgcacagtttctgggggcggcagaatcttttcaaatcttccgtttcctccttccgttcccgcgctgcagtcgggtcggcgtgcggttagcacctgccgggggatatagtattaacaacttctgcttctcattcactttatttttgggcgacttaccggcctccccttgccctgaatccaactgaaacggtagtttttgaacttcagcgggctgaagaaccgtctggaggtgtggctaaaaaaatgttcatcccggtcgcgcctccagagtttgaatcgggctggggtggggctgaggcttctgcattttttacccggccctggattaccccgctgctttccgggagctgtggcgaattgggctggcgggccgccccggagaccctctaaattagaagcagctgccactctaagttaaactggcctttttgacattttctccgtgccagctttttcgagtgagatgggatggagcatcggatatctaccatagttgtagattgaagatggcacggaatttctcattttcttagtttgctcaaaagactgtatgtctggtgtccccgctcttagtgatgctgtttattgttttccttcatgctgtcacattatgggagtcctctcagggttttcattccgtccaaagacattttcatgagtgttacttcttgctttttttcgtgtagctctttctagtatacaaaccaagaaggtttgtaaaacccaaga

SEQ ID NO: 2946 - DNA, 6000 bp, Homo sapiens
aagtactcttctcagcactatgtcgacctgcacgacaatttaccctgaacttgtatttattttatcccttataattaagcatacactccttaaaggcagaagtagaaaatgcatcaccttatcaccccttacacagtgtctcagtgatttctcgttattctaatgaataaccagtgccagggagaaatcattccatttggggatcactgctctgtgagaatgcctctgaacattcaaaactcatgaagaaaggcaaaagctgaacccggagtcagagaacctatcctttatttcacaaatattcatatagtatttagtacataacagacacagctcaaggcatcttatgaatatccactcattttgtgcagatgaagaaaaggaagcataaaaagataaaataacctaaataatggagccaggatttgaacccagggaatctaactccagattccacacatttaacatctacactatgctgcctcaaagtatgagagaatacaaaattaagcttgatcatctcctaaacaagaactcagaaaaaaaaaaatacctatcataaaggttaaaagattactttctaacttttcataaaaagttgattaaaaaggcccacgttacaattgtcatagatgtctaatcccactctcaccctcaaaaatatgccaagaggtacctattaattcacaaaacagtgttatatgacacctggggcttctacactgcagctcctattaccatttcctgcttcctttaggaacacattattactgtgctttctgccagcctctcaaataatatggtcttcctgtctcatttttccaaatccttaaatagcttctttctggttgtgaggcttggtcctaatataaatgtcacatctggcctcttgaacactttcatcggcttcaccttgaagccagattcatgttaaaggtcaagaaaggatgcccggttatgtaccaatccaccctcaccagcaagtaatgcttgctgcaaaacagatccatgtgcaacacaaggcagatgtcagctgcaagctgaatgtgagggtaatcggggtaatcactagcccactgggtagaactctgaaactctgtaaaaggacatactgacacaatttcaaataatatgacactgctttgaatggagggtagcaaatggaagaagcagaccattctgagttgctccttgccggcaatgtcaggaggctaccagggcaaaggcagaggtaggaacaatgcttttcctccttgagtaaggtgcagctggccatgcttttttcactatagatagtgccaaagttgcagagacacctacagaggaaagcaaaatcatttctaaacattaaagcccatgtaaagaccaggcatggtggctcacgcctgtaatcccagcactttgggaggctgaagtgggcggatcacttgaggtcaggagttggagaccagcctggccaacatgatgaaaccccgtctctagtaaaaatacaaaaattagccgggcatggtggcatgcacctgtagttccagctactcaggaggctgaggcaagagaattgcttgaacccgggggaaggaggttgcagtgagctgaaatcatgccactgcactccagcttgggtgacagagtgaaactttgcctagggaaaaaaaaaaaaaaaaggcaccccatgtgatataaaattgtataccaaaaaggatttttaaacttgagacattaagtttatcaagactttatcgacagtttagcaactattgcctgtgggccaaaccaagccagcagtctgtttctgtacagcccttaaggaaagaatggtttttacatttttaagagatgtaaaaataaataagaacaaaaactatttgcgggcagaaaggcctaaaatattaattacctggccctttaccgaaaaaatttgcagacccctacatgaaaacatgcagtctaagagttaagattcagttcatctatagaggttcggattaaaaaaaaaaaaatcaatagcattcaatagcattctgtagtcaaatgggtgagccatgctaaaagtctgggcctggttactgatgtctgtttacactccgttgcctcttactgtctactcacttcagttagaaactggaaaaatatttggtaggggataaaaagtgaaaccggctttgttatttttcaggacaacatatattcatatatattatctattttgtctctcccaaatcatgtagcaagcaaacaccacattcttttagattaagacacacattatttatcatttattctatcacaaccaccaaactcaatactttacatacatgtaaaatttcattttgtttcttccataaaagctccctaagagatggaatttattgtctgctttgttcactaacaaatccccaatacccagaatagggtctggcactttatgggtgctcaataaatttatgattattaatgaatcctcacaagaaaataagctaatcattagtattactcatatccggaaaatgagagatgaataacttggcctactcaatagtgtcaaagctagaacctgaactcaggcattctgaccacagtctaagtgaagcccgatgcttccacataggtatgtgccaagggaatgtctaactttcgttggactatcaaggtgtgaactataatgcttctgttattgcaactagcagtgccagttttaaatttcctattctcagatgacccatgtgctacaggaaaacaaacacacaactcaaatgtcttcatgtactcacttatctgagtgtcacttttctaagaagtgcaatgtcattttgtcacagatattaaaagttttcgtcaaagaaaatataagtgcaaaactctgacagttaagtccttttcatttttaaagaaaaagtttggccgggcaccgtggctcacgcctgtaatcccagcactttgggaggcagaggcgggcggatcacgaggtcaggagacggagaccatcctggctaacacggtgaaaccccatctgtactaaaaatacaaaaaattagccgggcatgatggcgggcgcctgcagtcccagctacttgggaggctgaagcaggagaatggcgtgaacccgggaggcggagcttgcagtgagacaagatcgtgccactgcactccagcctgggcgacagagcgagactccgtctcaaaaaaggaaagaaaagaaaaagttgtgttacttatactttatgcaactaggtaacttaagttctgcaagttagaaatcaaaggggaaaaaagtccaaaaaggatataaacttttgacagctacaaataacaaaaaaactgccagtgatcttcatacagaaatacttagctgtacacacagcaagtgctcaataaaaatgcttttcagaagaaatgaaaatgagacaaacctttcttgggttttacaaaccttcttggtttgtatactagaaagagctacacgaaaaaaagcaagaagtaacactcatgaaaatgtctttggacggaatgaaaaccctgagaggactcccataatgtgacagcatgaaggaaaacaataaacagcatcactaagagcggggacaccagacatacagtcttttgagcaaactaagaaaatgagaaattccgtgccatcttcaatctacaactatggtagatatccgatgctccatcccatctcactcgaaaaagctggcacggagaaaatgtcaaaaaggccagtttaacttagagtggcagctgcttctaatttagagggtctccggggcggcccgccagcccaattcgccacagctcccggaaagcagcggggtaatccagggccgggtaaaaaatgcagaagcctcagccccaccccagcccgattcaaactctggaggcgcgaccgggatgaacatttttttagccacacctccagacggttcttcagcccgctgaagttcaaaaactaccgtttcagttggattcagggcaaggggaggccggtaagtcgcccaaaaataaagtgaatgagaagcagaagttgttaatactatatcccccggcaggtgctaaccgcacgccgacccgactgcagcgcgggaacggaaggaggaaacggaagatttgaaaagattctgccgcccccagaaactgtgcgacccgtgccctcgcagccacccccaagaagctccgtctttaccaacgcgagcagcgcagcagcttctccaggcggtcgagcgcggcgcgactgtgggcccaggcaccgcgaccatccggttccatggcgggcgcggaacgaggctcgttcccggagcggatcctcggctgccggttcctcggctgccgattatccggcatcgtcccgccttcggatgaaaggctcctcgcagagcgggaagcaaggaagcctcgggaaaccacagggaagctgcaggccagcgactcgaaaccggccaagctcttcccgcgtctgggacggcgggccgccagaggggcggggcgcgcggggaggggcggggcacggcggccgcaatgctcccaaaatagggactcgcagggcacaggggcggggccgcgagagccagccgctggccgagtgggcgggacctaggggtggggctggaggctgaaacttgccaaagtcccggcgtgtgggacttaggggaggggccgcgagagccgtgggaccgagggggcggggccggacggctgaaacttgccaaagtcccggcgcgcgggtcctaggggcggagccgcgagaacacgccggggacagagggggcggggcctaggagcctcggggcgggacaggacggtcgaaaccgaagtcctggcgcgcggggcccaggggcggggcctaggggcctcggggcaggacaggacggctgaaaccgaggtcccggcgcgcggggcccaggcgccgtgcagtgagagcacgccgcttgaccgaaggggcggggcctgaaggctgagcgcagtcgcgaggctgtagttggcaggagagcgggcggggcctgaagcccctctgggctgcctggacggatgaagtccaggtggaaagccagtcgacgtttcccgggagctacgactccagggaccctcatccgagcttaaccgttggaacaatcacaaacccagaaacttttagctgagtgttatttataaaaagcgctgttttgactgctgttggacttggaaaagctttgcccacgatactgaaggtaccactctttgttcctaagaaagcaaccttttctttcctctcacctcagctgtggcgtatattgtaactgagtaaaaataaggaaagtttctaattctaactagttaacaaatatcagctcaaaggcatgtctgaaaagatctggtttacttttaaaatattggtataaaatttcaaaaagggttttttttgttagagagtgtgtccaccttcctcctccagatctttcactgatcgccgtaatttacagataagacctacagagcaacccgtcatgccttcctgccgcgccccaagttcatttccaagtccttgcattttttccccctaacttgtctcgaatgcacccattttctctccgtctctgctccacaacatccccagttgcctcgtcctcgcctggtttcctgtcgtagctttctagctgatatccaagtgtctatccaggtcccagccagtcccgagactgcggtgtggccgcctaaaacatttccaaacacaaaactcatcgtggcacttccctttcttaaaactccttaaagtttttctctgctctttgactagcctcttgtcaaaacctcctctggccatcatggtcccaaccccacagtgcgttcccttaggtcattaaaagcccctgcaccttgctgcctcatggcttttgcgcaaagattcactttggaacctggaattggcctcctctccattcctcatccttcagaatacagctgaagtatcactccttaaaggttttcctagttcctagactggattctctcaggtgcatcatatca

SEQ ID NO: 2947 - DNA, 6000 bp, Homo sapiens
ccgggaggtggaggttgcaatgagctaagatagcgctactacactccagcctgggtgacagagtgagatcctctctcaaaacaaaagcaaaaccaaataaaccccaccaaaatagtcactcaattcctttgctcacagttttgcaatttgtgcagagcttggtggagactactagtctgctcaatgtttctagtgctgagatagcttcctaaggaggatcttctccctagacagcctcacttgcgtggctgccaagttggtgctgggtgacatccaggttactgttggggctgttggtgctcagtgcttgtattagtccacttgggctaccataacagacttgggctgtcataacagataataccatagactaggtagcttaaatgacagaaattagttttctcacagttctagaggctggagggatctcttcttgggttgcaagtggctgtcttctcactctgtgttcacatgatctctttgtgtgagtggggagagagggagagagggagagatggggagggagggagggggagagagagagagagcgagcgagctctctagcgtccctttgtctcttgtttcttttcacagaagcactaattccatcaggagggccaccctcatgactttacctaaatctgatcacctcccaaaggcctcatctccaaatatcatcacattgggggttagaatctcaacatatgaattttggggagacacactcagtccataatagggctccttcatgtggctatgttgggctttcacagcatggcagtcttcatacatggtatctgggttcaccagggtgcaaaagacaaatctgccaggtattctaaaggcttcagcccagaactacctactgttctgtaaatgcctacacattttactggttatagcaggtcatgaggcctgtccagattcacggggaaggaactacataagggtgtgaatgctgagaggcatggctcacacgcatcaccaaaatgacattttgccattccccctttcctatcccatttatttccctcatatgccacagtggcttttacacatttctctctaactcccccttctgtcccccaacacacataccatcaccaccactagtcatagcccatcaacctcctgtccccctttattcccaattctgtatcatttaaatccaaaaggaccttgcactgacagaaacagaacgaacaaagccagaatccttttgttgtggaggaggaagggagtagccatatatgctgtcacatcattaataatgtttatcccttgacccttgattaatgaaggccctttgccaggggaagcaatgcttaaagtccatatcccttttcagcgtcacagatgcctagctgcacagaggtggctggttctaaagacttctataaaaacagctgagatgcaaacaagcacagctactagaacctcttttatttcttccaagaaacagacctgtactgaagggtgtatggaagacagagagtggggacagggagaaggagaagaagggggaggaggaggagcaggaggaagaggaaggggaaaagcaagagggagggagggaaggaggaagggagagagagagagaaaggaagaggaaaaatagagaccatatacaagataaaaacatggacataaagcatgcaaatttccttcactgtactgagtctccagtaattctctttaccagtcttattaaaaatattttttaggctgagcgcggtggatcacatctgtaatcccagcactttgggaggctgaggtgggcggatcacctgaggtcaggagttcgagaccagcctggccaacatggcaaaatcccgtctctactaaaaatacaaaaattagccggcacagtggtgggtgcctataatcccagctacttggtaggctgacgcaggaaaatcgcttgagcctggtggcgggtgggagcggcggaggtttgtagtgagccgagatcgtgccactgcactccagcctgggcgcagagtgagactgttctcaaaaaaaaagagggtatcagggtacattatctccacatgctgataagttgttacataagtcccaccaattcacaatttaatatcatatactctacccactcaaattttcagtctttcaaagcacattaacaaagttatcaggaaaatgggactagcacaaccaaagatgttacagactgcacacaattttgacacggatagcaacgtgaccaaggagtggttttcttcaggaaacaattctactaaaaaaacccatgaaaataaaagtaatttaaaattttcaagacacattaaatgcatgactgtggctctatattgccatttagtatgcgctgtactgtaggaaataaaataccctctccctagggaatgttaaactgacttcgaagacagtgaaagcctcccattattcactatttcagtgtttcctggttgtaccaaacaacaaacaagtgaattatttcaccttttaaaagctacactttaaaaatgggataaagtgggattccctccttcctaaaaatgtttcagccaggcacaggctcacgcctgtaatcccagtactttgggaggtcaaggtgggcggattacctgaggtcgggagttcgagaccagcctgaccaagatggagaaaccccatctctactaaaaatacaaaattagctgggtgtggtggcacatgcctgtaatcccagctacttgggaggctgaagcaggagaatcgcttgaacccggcaggcggaggttgccgtaagcagaattcgcgccactacactccagcctgggcaacaagagggaaactctgtctcaaaaaaaaaaaaaaaaaaaaaagtttctacagctactaaaaaacttgcatttaaaaatagttgataaaaatattccttatcaaaatagttgataaaaatattcctctgaggccaagtgcagttgctcacacctgtcatcccagcactttgggaggctgaagcgggaggatcgcttgatcccaggagttcaagaccaggctgggcaacataggaagaccccgcctccacacacacacagaaaccccacaaaaattagctgggcttggtggcacacacctgtggtcccagctacctgggaggctgaggtaagtgaatcgcttgagcccaggggttccagggtgcagagagctatgattgtgctactggactccagcctcggccgagcgacaccctgtctgtttctttccttttctctctctctctagctctggatcgtacaagaagggagacaaggaccactgacaagatatggtatgtgatactaatcagatttggcttctttctgtcctgcttcaccagaggctggactctccttgtttcagtttctccgctttccacagataaatcttttgtttcccggatagccacttggcctgtttgccctttgctcccatttttccttgtttgcttctttgtctgaaaatttatgctgtcctgctgcctccgctgggcttcgtttccacctttgctggaggagatttagctgacaacctcacagatcttccccgccccttctgccgagctgatctttctcttggaaatcttacccgcagggaagggcgagtgtccgtgcctgcctgcctgcctgctgcagcccgcgcaaagctgagcggccagggcgctgctgttcctttaaagtattattaaaaataatatttcagcttttaagtaactccttgagtttgaatcaaaagctggaagaacctcctgggctctatgagcacctctgaatatgtctgactctacattctagaggcttcaatgtatttataattttggctcatagattctccacatcttttcagcttcaattcttgcttttcccagaaacaattttcaagcaggagagaatattgattggacttgattttctcagtttgggcagaggtttgcagacactttgcaggttgccagacccttcgtccagccacctgtcagctgggggtcatatggtatagaaagcagtcatttctatgcaaggtactgcttgggcctgcctccctcaaaggggtaggggatgcgggctggacaaagggctcgtgatcaagtaaagcactgtgatgacagctgctatttctatatctccctagacttgtcttctaaattaaaccttgactcctcccttccaagctggagccactgctaactactgggagagccttagcagataaagtctcatgcctccaggcgtttgtgcatcccattttctctgcagagtagaatctcccttctacttttgtgctcctggggacgtcctactcttcttccccagttggctctaaggttatcacatcggtgaagtgtttcattatcactttttagaagaaactgagtcttttagagaagttaagtgactttctgcattcatactcatactcaagaaaatctaactccacaataaccaaaaataaaaagtagaaaaaaacccacaagtgatgagaaaaaaaaaaatcaaaagttataaaaaataaatgaaaaaatgaaattaaaggaaaaaagattttttaaaaaagtaaaaaaaagaaaagaaatctaactccagagctctgacacaaaatgccttaggtgttattctcaatgagagaaaagggacgtgaatctttaagtgattaagtgaatctttaagtaaatctgtcgtactagcgtttcaggcggctcaaacaccacacgctcccgactacggcggaatggagagaatgtgcgcatgctcggcgggaatctgcgcatgctcggcgggaatctgcgcatgctcggagagaatctgcgcatgctcggccggaatctgcgcgagctcggcgggaatctgcgcaagctcggcgggaatctgcgcatgctcagagttccggggcacggtttccccgcccctttcaggcctagcaggaaacgaagcggctctttccgctatctgccgcttgtccaccggaagcgagttgcgacacggcaggttcccgcccggaagaagcgaccaaagcgcctgaggaccggcaacatggtgcggtcggggaataaggtataaagaaagccatggacttgggctttacccggactggggatccggagagggtggttcggaagcaggaatcgtgggatcgcggtcaagacaaagaatggggcaagagaagatcatggtggtgggctcagtcaggagggccgggaccgagggatgcgctatgagaaaagctggagatttggggctccaagacctgaatttgagcctcgctgactccacctcttccattacccacccatcccatccctcttctccctctctacctgctctttgtctcacctgcctccccacccgcctcccctctctctctctttatcccattccactccctagccccacttcctctattacttccgagcctgggttcttaagatctctatgagaatgaaaattagctgtgataaagcaactatcccacagggcttgttgtaaaacttaagagagggactatctgtgactaaaataacttaaactgtaaagcgtcgtattattagctttataataacgtagtatcccgcatttattgaaagcccactctgtgagggacggatctaaaccttttattcttatctcatttaatcttcacaaccccttgaagtgaaaactatttatccccattttgcaagtgggaaaaccgaggaataaagaactgtgggcttttcctggtgaaatccggatttgaatccaagctgtctggtttcagggccctggagaacccctgtgttgctagaaatctatgaccattggtgtcccagatcagtaacagaaattacaatgaattttaaagtgatttttttttttcaacataaaagagtggtagttgtctctgaagggtcactagagggagatgtggttccagggattaatgaatttattcaatacagataaacaagatacgagtttgagcaactgatccctagttccctcaactcctcattgagaaatg

SEQ ID NO: 2948 - DNA, 6000 bp, Homo sapiens
atgggactagatcccaggtctcccgattgctattatcttttttcaccagaagacccttcttttctcttcttgaattcactacactgttgatacagaccaacatatttaggcgatgaagtaagataggtgtggggaatgtggtgcaaaagacatttcacgttgttgattgattttataattcacactgaaattgtgagttgccatcaatccaggtctcttccagcttgtgttcaggtaaaatttggaagccaggtataaataactttacatgtattccttttaggttatgtttctcttattttcttagtctcctacatacgtgattgctatgtaatggcttgtgccttagcttatgtgattccgtctgtcacttacttgttcacatgattgactcctactcattaagactcacccaaggaaatccacattcaggaagccttttctgccccttcaccgctctggtatcccctccaccagtcttgagtggatgctcctcctgtgtctctcagtgcccagtgcatacttctatcatggaacattgttctggtattatttgttatctgtctgtgtcctctactagaatagatttggtgtctttattttagatcatcagtttacaaactgactcaaattgtcagggtatacctcttagcatatatatagattctagcagtcacttcttgtgacaaaaatgcttcataacaaattatgccccgaatcagtgacttacagtgaaagcatctgttctcatgtttgtaggtctgcaggtcagctgcagtttgtctgatgtatattgggcataaatgggtttaactctggcctgcaggttggcatcatatgtactcatcatgggtttattctggggcttaggccaaagaagtggcagctatctggagcatgttcctctcctggtagaaacttctgtagcttttagaaagtatcaggactatttaagggttttccatagtgaaaatttatatgtcttacacacattcttatgtagaacacatccctttttcacacctttcctaaatactgatacaggttcatgaatacaataagcaagggacattcttacagtcttttcttacgacttattttctcaaacactctttggaactttgtttccaggcagctgttgtgctgtgtatggacgtgggctttaccatgagtaactccattcctggtatagaatccccatttgaacaagcaaagaaggtgataaccatgtttgtacagcgacaggtaagtttcagattgacactgagcttgtaacccatgtttgaactgcttgttgcctctacctactaatgcaagataccagcctccttatagtgtccagcccctctgtttggggggattctggggagtttccttacatgtactcacatacaacttcacctaccactagagtctgatattttttcttccctcgttttggccccttcactagatattacagtttttatcggaaacaagaggcagtaaaaagtaatgtttaaaagcacaatctctagagacagatggcttgggtttgtatccttgctctgccatgtcatttactaaccttctgatgttgaacaagtccctcaacttgtttgtgactagttcagttatcttttgctgtgtaataaactaccccaaaatgtagtgtctcaagtaacattttaaaaattcatcattcatggttctgtgggatgactgggttgctcagttgggtgattctctattgaggcctcttacgcagttgcaatcagatggcagctggggctggagtcacccaaaggctcaactggaccagatgtccaaaatggctcactcacatggctggaagacgatgctttctagtggctgtgagctcagttggggctgtccgttagaatctctacatgtggtttctgtatagtttcaattttcacatgaagcagctggttctaaggagtatcccaagaatgggttttctatgagaccctgcctatgtggcttcttaagacctatttttagaagccccagaaagtcatttctgttttctgttagtcaagcaagacactaaggttaggtcacatttaagggaggagaattagactccctctcttgataaaaagagtagcctgcaaatacaaggagagaaagaacggatggtggctatcttggaggttagctactacagtgcctcagtgtcccatgtgtaaaatgagaataatgatacctgtcacatagggtagttttgaagaataaaagaattaatgtagataaagtgcttagaatagtgcttggaatattgtaaacactatgtaagcatcagctgtttttatttctgccccttctacttggtatgactgccacttttgctaagtccatgagttcctgcttctttcattgtctactgctgctcctcctggacacttctgtttcttctgtgtgtttacacttccgttgggcactagtacttcccacctgtcattctagatttttaaaaatcttgatgacctggagtccttgaggtgttgtgtcaaggaaggtgctctaaccctgttcttggttatagttgtgttggtggaattcaagtagtgtggctgtcccctggtatgctgttagagaaggtaagtagacatgagcagggcaggagagagggcccccgagaatgttgggcatttgtgaagccatggttaggcaattagaaatccgtccctctgaagtgatgagcagggcaagggaggggccccaaagctgtcaggttatcatcgaggggaagacaggcgggcataaaactatcactgtaaggtaataagtggccatgattggtgtcaggaattacaggaatcttaacagacagaaaacacctggagttagcaagctataatccttaaggtttcgagcatgcgcagtaaaagagcaagatggtgaactttaactggtataaaagctgcctctgggggcgctcgaccaataatgccgagttgccgctactgagcatgcgcatgactagtaaccacactacgcatgcggccccctcttaagcagtagcagggctagtgcgcatgcgttgattaattcgggctgctcaagggaggaacaaaggagactggaagcccgggaaaagatggcgccggtggttggggggcggggcggtctaaaaactaaacaaagaagggcgcagggcacttgatttttcacgtggccctcttggttctcttccaagtgtactctgctttctccagtaaactctcactttgcttaaaataaatttttcctcctgctttaaaccttgcttatgtctgtcgtttcaattgtttacttcgagaagaccaagaaccgagattactgcggagtcgccactccggagtttctctggataactgccgacttacaccccagtaacaagagtataggtgtttttttgtttgtttgtttttgttgtagagagaaagagtcagaatcaggaagtcagaatcaggaacttagtgccagtcccatactacattcagaatttcctcccctcccatgactgagattttgtctagggcaagattaccttgccttaagatggatgcttgtctaggcggcagatacctgcccagccagtatgctacgcatgcttgaatccagcagcaggcacccagacaccgttagtccatgtacaactgggaattgttgtgttgtttacagactaaaggattaaacagaccctacaaaaatgaagaatgacagaattccattatctctccatacagcactcttccccatcaatgtaaaaaggcttatgttaataattagacaggactgtcttttgtgtcagatactattttttgtttttatatttcattatgaaatatttcataaaataggcaaatatggagaatatacaggtaaccaattttcccattgtcttatgctgtaaatcctaatgtttcatatttgtttgattttttttttaataaagtgttacagataaacctggaggcccttccttaccctttttttctcttctccttttctcaggattttggtagttattaccatgtatattttatacttggacataagtatatattcataaatacttagtattgtataaagctgtcaaaagtgtaaatggttttatatgctacatgtaattctgcagcatatcttttatcaacttattttagatctattcatgttgatacgtgttgcacaaatttattcatttttactggagtatgatatttcgttgtataaatattctgcaatgtatttttgcattctcctgtttgatagtttgcttccagtttttgccctatcataaacagtgctgaagtgtaaacttcctatctgtacataatttttctagggtatactgtatatgcctgcccctgaaattgctgggatataggctatcctgcacttttttttttaacctctggaaaatttaaaccttagacattccataaagacatactaaaatcttttcacattacccatttttggttctctcattgagaattagagtttgatttcgctggaaatcatcaagaacacttactaccctcctatttccacacctcaacttctgctgaaatgaagggtgagacttatggtcaatgaaaaacatctgttcagaacctaagaattgtcattgtctgtaagtctcatgtttcatcccgcccaatactatatggccccagggacctgccatagggaggtctggttgtcctgctccctgaaggttaggtattttattgcttccagattgttctaatatggttttcagccatctgacatttttttctaggtgtttgctgagaacaaggatgagattgctttagtcctgtttggtacagatggcactgacaatcccctttctggtggggatcagtatcagaacatcacagtgcacagacatctgatgctaccagattttgatttgctggaggacattgaaagcaaaatccaaccaggttctcaacaggctgactgtatcctttttctgccagagaagactttaagaaatttcctttattctgggaatcgtacagcagtttgatgagacacccccagagtttcagctatgagtatatgggtatattttgctctgaggagggggaggtaatgtgttaatagggtttaatgtgaaattaatcagtttaaaacagtgcctgggctcccagccctccactcacttccctgttctctgcatgggtgatactgagaggttgggaggcataggaagggggaagatcctagggagtatatgtgagcattgactatatgcagagggttttagtggtgctcgttagaaatgtttggaggcggatagaaaatatttttagaagagcatcctcccaatgttctctcctttttttctggatggaagatgtttttgtgccagaaatcagattgatacccaaagtgagatttccagtttactccacaggtcccctaattttaagggatcatcactcttgttctttttctaatcagttagtagtgctattcctgatcactgggaagtgctgttgtgttaggagtgacttgcaaatgctacattatggttcgcttcatatttaagaatggactgtggccaccaagaatgggttctagatactattaaatgacataatttttggttaaatgaatgcaatgtgttagattaccttttgtttatatttcttggttgtttttggcagaatatatagtttgatatatagaatgtatgaatatatgttagtgaactttggaagaagggcactcaggcaagtactttaagtcatcacatagttcagtgtccacaatttccagcacggtggacttcattggaaagagttgcgtgttcacatgaagagactgtttggtgatatccctatccttaactagctgagtcctggatgcactaatcgtgagcatggatgtgattcaacatgaaacaatgtaagtgttccaaggaagagagctggaagagaatctttttgcaaaaattgtatgggttaatgtattgaatgtattttgtgattcattgtt

SEQ ID NO: 2949 - DNA, 6000 bp, Homo sapiens
tagataaagtgcttagaatagtgcttggaatattgtaaacactatgtaagcatcagctgtttttatttctgccccttctacttggtatgactgccacttttgctaagtccatgagttcctgcttctttcattgtctactgctgctcctcctggacacttctgtttcttctgtgtgtttacacttccgttgggcactagtacttcccacctgtcattctagatttttaaaaatcttgatgacctggagtccttgaggtgttgtgtcaaggaaggtgctctaaccctgttcttggttatagttgtgttggtggaattcaagtagtgtggctgtcccctggtatgctgttagagaaggtaagtagacatgagcagggcaggagagagggcccccgagaatgttgggcatttgtgaagccatggttaggcaattagaaatccgtccctctgaagtgatgagcagggcaagggaggggccccaaagctgtcaggttatcatcgaggggaagacaggcgggcataaaactatcactgtaaggtaataagtggccatgattggtgtcaggaattacaggaatcttaacagacagaaaacacctggagttagcaagctataatccttaaggtttcgagcatgcgcagtaaaagagcaagatggtgaactttaactggtataaaagctgcctctgggggcgctcgaccaataatgccgagttgccgctactgagcatgcgcatgactagtaaccacactacgcatgcggccccctcttaagcagtagcagggctagtgcgcatgcgttgattaattcgggctgctcaagggaggaacaaaggagactggaagcccgggaaaagatggcgccggtggttggggggcggggcggtctaaaaactaaacaaagaagggcgcagggcacttgatttttcacgtggccctcttggttctcttccaagtgtactctgctttctccagtaaactctcactttgcttaaaataaatttttcctcctgctttaaaccttgcttatgtctgtcgtttcaattgtttacttcgagaagaccaagaaccgagattactgcggagtcgccactccggagtttctctggataactgccgacttacaccccagtaacaagagtataggtgtttttttgtttgtttgtttttgttgtagagagaaagagtcagaatcaggaagtcagaatcaggaacttagtgccagtcccatactacattcagaatttcctcccctcccatgactgagattttgtctagggcaagattaccttgccttaagatggatgcttgtctaggcggcagatacctgcccagccagtatgctacgcatgcttgaatccagcagcaggcacccagacaccgttagtccatgtacaactgggaattgttgtgttgtttacagactaaaggattaaacagaccctacaaaaatgaagaatgacagaattccattatctctccatacagcactcttccccatcaatgtaaaaaggcttatgttaataattagacaggactgtcttttgtgtcagatactattttttgtttttatatttcattatgaaatatttcataaaataggcaaatatggagaatatacaggtaaccaattttcccattgtcttatgctgtaaatcctaatgtttcatatttgtttgattttttttttaataaagtgttacagataaacctggaggcccttccttaccctttttttctcttctccttttctcaggattttggtagttattaccatgtatattttatacttggacataagtatatattcataaatacttagtattgtataaagctgtcaaaagtgtaaatggttttatatgctacatgtaattctgcagcatatcttttatcaacttattttagatctattcatgttgatacgtgttgcacaaatttattcatttttactggagtatgatatttcgttgtataaatattctgcaatgtatttttgcattctcctgtttgatagtttgcttccagtttttgccctatcataaacagtgctgaagtgtaaacttcctatctgtacataatttttctagggtatactgtatatgcctgcccctgaaattgctgggatataggctatcctgcacttttttttttaacctctggaaaatttaaaccttagacattccataaagacatactaaaatcttttcacattacccatttttggttctctcattgagaattagagtttgatttcgctggaaatcatcaagaacacttactaccctcctatttccacacctcaacttctgctgaaatgaagggtgagacttatggtcaatgaaaaacatctgttcagaacctaagaattgtcattgtctgtaagtctcatgtttcatcccgcccaatactatatggccccagggacctgccatagggaggtctggttgtcctgctccctgaaggttaggtattttattgcttccagattgttctaatatggttttcagccatctgacatttttttctaggtgtttgctgagaacaaggatgagattgctttagtcctgtttggtacagatggcactgacaatcccctttctggtggggatcagtatcagaacatcacagtgcacagacatctgatgctaccagattttgatttgctggaggacattgaaagcaaaatccaaccaggttctcaacaggctgactgtatcctttttctgccagagaagactttaagaaatttcctttattctgggaatcgtacagcagtttgatgagacacccccagagtttcagctatgagtatatgggtatattttgctctgaggagggggaggtaatgtgttaatagggtttaatgtgaaattaatcagtttaaaacagtgcctgggctcccagccctccactcacttccctgttctctgcatgggtgatactgagaggttgggaggcataggaagggggaagatcctagggagtatatgtgagcattgactatatgcagagggttttagtggtgctcgttagaaatgtttggaggcggatagaaaatatttttagaagagcatcctcccaatgttctctcctttttttctggatggaagatgtttttgtgccagaaatcagattgatacccaaagtgagatttccagtttactccacaggtcccctaattttaagggatcatcactcttgttctttttctaatcagttagtagtgctattcctgatcactgggaagtgctgttgtgttaggagtgacttgcaaatgctacattatggttcgcttcatatttaagaatggactgtggccaccaagaatgggttctagatactattaaatgacataatttttggttaaatgaatgcaatgtgttagattaccttttgtttatatttcttggttgtttttggcagaatatatagtttgatatatagaatgtatgaatatatgttagtgaactttggaagaagggcactcaggcaagtactttaagtcatcacatagttcagtgtccacaatttccagcacggtggacttcattggaaagagttgcgtgttcacatgaagagactgtttggtgatatccctatccttaactagctgagtcctggatgcactaatcgtgagcatggatgtgattcaacatgaaacaatgtaagtgttccaaggaagagagctggaagagaatctttttgcaaaaattgtatgggttaatgtattgaatgtattttgtgattcattgttaatcaagctgcatgtttgtgtgacaagagaaacattttatagaattgaatggttcagtccaacctctctgttttttaaaagttttaaaaggggaagggctgtactcggtgattatttctctggaagaaataaaacatttggcttatttcagtttacttcctattagacttaagctgattaccaggaattttaaaaaacactaagtggtataagccatatgtcattgatattaagtgcatggtaactctggccaacttcccttttttgttgtgtgtgtgtatgttttttgttgtttttttttttttgagttggggtcttgttctgtcacccagactagagtgcagtggtgccaatatagctcacagcaacctcagcttgatctcctgggctcaagagatccttgcatctcagcctcctgagtagctgggactacaggtgcacacccaagtccagctaattttaaaatttttatttttgcagagacggtctcactattttgcccaggttttctcagactcttggcttcaagcagtcctcctatcttggcctcccaaagtgttaggattacaggcatgaaccaccatgcctggcctgcttcctaattcagtatttatttaattattgtgccttggaagtgtatctctggagacatatatgtgcatgtacacatacctcttgcctgtcaggaaaatcatttgcactaaaatcccagacctaaatctgtgtaatcatttctcaatctctgtacatcctctgccaaatcttgccacacaaaatctgtgcatggagtcagagcaggatatttagaaagtgaacctgagcaaggctgaagttagagtatgctgggagaattctttgtttacattctgcctatgtggaggctgggaagggatattttttcatcacatttgagttcggaatccagaaacataacatttccataatacccagacattttggccaagatgttcaaagtataaagtgtatcagggttgattatgaatttaataagaacttaattggactactagaatgtaatcacatttattaactctagatccatttctaagcttctctcctcagtgaccaagtgtatttgaatttgtagaaaaataattcaggagaatgatttcttaatatgataactctctcttttagaggaaagaagtttgagaagaggcatattgaaatattcactgacctcagcagccgattcagcaaaagtcagctggatattataattcatagcttgaagaaatgtgacatctccctgcaattcttgtaagatcctaagaataatgcatgtagacaaatcctatgatttcctaatatagtgaatgggccctctgtatagagtacttggtttatgggaattttcgctttctgctccaaggctgaatctgtcagatgactgactactcagcaaacatttgctggttactctctgtgttctaggaactgttctgagtggtcgtgacaaaaagatgaaagtcagtgatccagaagaattgagcttagtggcagatcattgtttagtgttcttagactcaaagaattgaggattagaagaaccctttgaggatattcaatttgtctccttcctgcatagaaggctttacccaaacaattagcagattgatggatttttttttttcttaaacagctctagagaactgtgtcctatacagagtgcatgttttagggtagacaggaatgccaacttgggaatcattctaaatacataacatgtttatgtttaactcttttcagatccaaaagttgtggacacatatataaaatttaatttgcttctgttaattcagagatggagtataaaacttcaggggaaaaatatgtatttcacaatttattagggagagaattcctcctcaaaaagtaacttgaatattccctccgggatttactttctctgtgttatatccctaacaaaaatttcttttcactacactaacccttcttgctgcatttgaaacatattttttcttgtcctatttttggtgaaagttgagtgatggtatagaatgttgaattattaatcttctgggaatactcgtttttcaaattgagagctatgccaagaagcctctaggttagagtggtaagcctttggcttcataaaatgcctgcctgggggtattaagaacttgttttgcatgtgtgagtagtcttctcttaagactacagagcgacatctcctttctgtacgactgtggaaaaagagttcagaa

SEQ ID NO: 2950 - DNA, 6000 bp, Homo sapiens
tctcctttttttctggatggaagatgtttttgtgccagaaatcagattgatacccaaagtgagatttccagtttactccacaggtcccctaattttaagggatcatcactcttgttctttttctaatcagttagtagtgctattcctgatcactgggaagtgctgttgtgttaggagtgacttgcaaatgctacattatggttcgcttcatatttaagaatggactgtggccaccaagaatgggttctagatactattaaatgacataatttttggttaaatgaatgcaatgtgttagattaccttttgtttatatttcttggttgtttttggcagaatatatagtttgatatatagaatgtatgaatatatgttagtgaactttggaagaagggcactcaggcaagtactttaagtcatcacatagttcagtgtccacaatttccagcacggtggacttcattggaaagagttgcgtgttcacatgaagagactgtttggtgatatccctatccttaactagctgagtcctggatgcactaatcgtgagcatggatgtgattcaacatgaaacaatgtaagtgttccaaggaagagagctggaagagaatctttttgcaaaaattgtatgggttaatgtattgaatgtattttgtgattcattgttaatcaagctgcatgtttgtgtgacaagagaaacattttatagaattgaatggttcagtccaacctctctgttttttaaaagttttaaaaggggaagggctgtactcggtgattatttctctggaagaaataaaacatttggcttatttcagtttacttcctattagacttaagctgattaccaggaattttaaaaaacactaagtggtataagccatatgtcattgatattaagtgcatggtaactctggccaacttcccttttttgttgtgtgtgtgtatgttttttgttgtttttttttttttgagttggggtcttgttctgtcacccagactagagtgcagtggtgccaatatagctcacagcaacctcagcttgatctcctgggctcaagagatccttgcatctcagcctcctgagtagctgggactacaggtgcacacccaagtccagctaattttaaaatttttatttttgcagagacggtctcactattttgcccaggttttctcagactcttggcttcaagcagtcctcctatcttggcctcccaaagtgttaggattacaggcatgaaccaccatgcctggcctgcttcctaattcagtatttatttaattattgtgccttggaagtgtatctctggagacatatatgtgcatgtacacatacctcttgcctgtcaggaaaatcatttgcactaaaatcccagacctaaatctgtgtaatcatttctcaatctctgtacatcctctgccaaatcttgccacacaaaatctgtgcatggagtcagagcaggatatttagaaagtgaacctgagcaaggctgaagttagagtatgctgggagaattctttgtttacattctgcctatgtggaggctgggaagggatattttttcatcacatttgagttcggaatccagaaacataacatttccataatacccagacattttggccaagatgttcaaagtataaagtgtatcagggttgattatgaatttaataagaacttaattggactactagaatgtaatcacatttattaactctagatccatttctaagcttctctcctcagtgaccaagtgtatttgaatttgtagaaaaataattcaggagaatgatttcttaatatgataactctctcttttagaggaaagaagtttgagaagaggcatattgaaatattcactgacctcagcagccgattcagcaaaagtcagctggatattataattcatagcttgaagaaatgtgacatctccctgcaattcttgtaagatcctaagaataatgcatgtagacaaatcctatgatttcctaatatagtgaatgggccctctgtatagagtacttggtttatgggaattttcgctttctgctccaaggctgaatctgtcagatgactgactactcagcaaacatttgctggttactctctgtgttctaggaactgttctgagtggtcgtgacaaaaagatgaaagtcagtgatccagaagaattgagcttagtggcagatcattgtttagtgttcttagactcaaagaattgaggattagaagaaccctttgaggatattcaatttgtctccttcctgcatagaaggctttacccaaacaattagcagattgatggatttttttttttcttaaacagctctagagaactgtgtcctatacagagtgcatgttttagggtagacaggaatgccaacttgggaatcattctaaatacataacatgtttatgtttaactcttttcagatccaaaagttgtggacacatatataaaatttaatttgcttctgttaattcagagatggagtataaaacttcaggggaaaaatatgtatttcacaatttattagggagagaattcctcctcaaaaagtaacttgaatattccctccgggatttactttctctgtgttatatccctaacaaaaatttcttttcactacactaacccttcttgctgcatttgaaacatattttttcttgtcctatttttggtgaaagttgagtgatggtatagaatgttgaattattaatcttctgggaatactcgtttttcaaattgagagctatgccaagaagcctctaggttagagtggtaagcctttggcttcataaaatgcctgcctgggggtattaagaacttgttttgcatgtgtgagtagtcttctcttaagactacagagcgacatctcctttctgtacgactgtggaaaaagagttcagaataacccatcaaaccaatacttgttaagatggtacttcagagaaattaagtgcttttaagtgacacttcttactgagttgaggtttttctcagtacttcagaagcccagcacagcttctggtcctttttcataatctcaggatgcctttacatgttagaagcagactgcatttcagtgaatgtcattcgaaagagctactctttttttccatgagcaatacagaaaagtgcagaagaggaagcatagcctttgcttctatttgctttttatttggttgtatttttttcttggtaatatgctttcttcctgtgctacaaacctccagcatacaaagtagagttcatagttttactgtttggtgtattccatgtacagctgattgttgtaattggactaaaaaaataccagcagctcagagaagccctgtgttctgtttttaatttatttttaatttttttttttagaaacgtcttctgtagtggcatagttatagctcactgcagcctaaaactcttgggttcaagtgaacctcctaccggagccttctgtatagctgagactatagatgcatgttaccacacccagcagtttttagtttttcttggttgttgtttgtttttgagatggagtctcgcactgttgcccaggctggagtgcagtggtgcaatctcggctcactgcaacctccgcctcccaggctcaagcagttctcctatctcagcctccctagtagctgggatttcaggtgtgtgccaccacgcccggctaatatttgtatttttagtagagatggggttttaccatgttggccaggctggtcttgaactccggacctcaagtgatccacctgcctcgccctcccaaagtgctgggattacaggcgtgagccactgtgcctggcacagtttttagtttcttctactgactactgaggaagcttatttctgatctaacgcagaatagacagaacagttattatttctttttccaggataacttcctttctcttcacttttacgacatttgtccttttctggttattgctttgaaaacaggagtaacctgatgcaaaccctgtgtctcacactttcctccctggaaactttttacctgataaatgcaggacatgcaaattacatcatgctgtatttgctaagtatatgaagaaaaattgtaaacagccttattttaagtgtagcaaataaaatgagaaatcaccttaaaaacaaatttatttctcacagttctggaggccgggaagtccaagatcacagcactaacagatttggtgtctgctgagagatctttgctctcaagatggtgccttattgctgtgtcatcccatgtcaaaagggctaacactgttctcacgtggtggaaggacataaaaggcaaaaatggcaaaaagcctctcccttcaaccattttttttaaggtcgctaattccatttatgagttccccaccctcaggacttcattacctcctaaagggcctctgtcttaatagtatcatattggtgattaggtttcaaaataatgattttgggggacacgtgtagaccattacagtgtggaagaggccagtcggagagagtgaagccagcataaaggcaaatgaaggtaaaatagagacagagagagtaatccttgccacagttgagaccctgggtctggacttcctaaggccttgtgccaccctgccctttcagttacttggttatgtagtagccagtgattttccccttttacaaaccaaagaggtttcagtcacttgaaactgggagaatattggctaaggtaggtaagagtcgtttgacagatgagaaatttgaaacttgaaaaggttgactgatgtgctcattttctcatagctgatgagttacagttacaggattagaacactaactactgttgatctttcttaatagcttgcctttctcacttggcaaggaagatggaagtggggacagaggagatggcccctttcgcttaggtggccatgggccttcctttccactaaaaggaattaccgaacagcaaaaagaaggtcttgagatagtgaaaatggtgatgatatctttagaaggtgaagatgggttggatgaaatttattcattcaggtaagaattgaaaacattgatgggaatttttaattgtacccacgtaaatttctcttttgattagaggtctcccaaatgtttcctttttctgggccactctctaattagtcattgcttaatattctgagttttattaaagaaatagtacacccacccttaatcaccctttttaaagtttgtgttcttggcacatgtttctcatttatttccaggacctgtgtcagtgaagttcaggaatatatagataccatgagaaattaacaagtcaaattgcaaaagatgaaatagtagatttcttcattatgccaagcttgggatacattttttgggcccttttttttttacacatctacaaaaaacattattaattatagaaagtggtctcagatctgagatagtcagtatcttcttatcatcctattaaggttttagaaagtagcatactatggtatagtgattttttttttaaacttttgatcacaaagcagtttgattgagtgaaaaaaaaaaaaacctgcaatgtaaagagttcatagcctacttactttacgtgggcgttggaaaggcaaaatgatttaagaaaagtgaattccttgaagtaccgtataacaataaagcaaactgctttttcaaccatccagctagagactatggaagagaccatctcctttatccatcttattcttggttggaattggacatacatgcattttgagcaaagaacctaagaagaatcggtggcatctagaatagtgtgtgtcctatggggttcaatttggtaaaagtggcaatagagtactttacatagcagtatggcttgggtggttcaaattctcaggggtaatactgcttgatattcttgaattatttccagcttatcagtctgtacacaaaatactggctgtttaagcacattgaagtagtgattgaacaactagaatttttttaagtagctacagtgtat

SEQ ID NO: 2951 - DNA, 6000 bp, Homo sapiens
gtggtctcagatctgagatagtcagtatcttcttatcatcctattaaggttttagaaagtagcatactatggtatagtgattttttttttaaacttttgatcacaaagcagtttgattgagtgaaaaaaaaaaaaacctgcaatgtaaagagttcatagcctacttactttacgtgggcgttggaaaggcaaaatgatttaagaaaagtgaattccttgaagtaccgtataacaataaagcaaactgctttttcaaccatccagctagagactatggaagagaccatctcctttatccatcttattcttggttggaattggacatacatgcattttgagcaaagaacctaagaagaatcggtggcatctagaatagtgtgtgtcctatggggttcaatttggtaaaagtggcaatagagtactttacatagcagtatggcttgggtggttcaaattctcaggggtaatactgcttgatattcttgaattatttccagcttatcagtctgtacacaaaatactggctgtttaagcacattgaagtagtgattgaacaactagaatttttttaagtagctacagtgtatatctccttaatattttttctaaacgaccatttttaatatttctgatgagctataattgacaaaaattatgttctgattttctaaatacagacagccttgaaaaatgataggtaaatttaggaaacagaattgcccacgggattgccctaggaatcagtgaggaatcctgtgaggtgaagtttcttggcgtaatgtgttcttgtcacaatatttacagatatgtgttcctaagttgtttctctttcaaattttggaataaatgccttaagctaaacatattacccatgatatcacaaagaaaaattaggctggacacggtggcttatgcttgtaattccagcactttgggaggctgaggtgggcagatcacttgaggtcaggagttcgagaccagcccagccagcgtggcgaaaccccgtctctactaaaaataaaaaaattagctgggcatggtggtgcatgcctgtagtcctagctacttgagaggctgaggcaagtgaatcacttgaacctaggaggcggaggttgcaatgagccaagatcatgccactgcactccagcctgggtgacagagcgagactccgtctcaaaaagaaaagaaaaattagaggccaatatagattactctttaaaaagtgtttttgtttgttttttaaatttttctgtagcatatcagatagggaaattactgactatgcattgttttagcatttcgacgctactttgattttaggtctgccatgaaggtgtagaccagaactttgccatccagtacagtagccattagctacatgtggctatttaaattcaagttagttaaaattaaatacattttaaaattgagtcccttagtcatattatctgtgtttgaagtgtctattgggctagcatggttagaaatagaacattaccatcattgcagaaagttgtactggacagcactggactagattatctccatatagatcttaggaagagaacttgacatctacctgaggagattgagctctactgcagaactgagtcagttgttcttagattttttttgagacagggtctagctctgtcatccaggctggaatgcagtgacgtgatctcagctcactgcaacctctgcctcccaggttctagcaattctcatgcctcagcctcccaagtagctgggattacaggcatgcgacaccatgcccagctactcagatcttatatattggatgcccgtctttagaattttccctgaaatagaatctaaatctcatggtgattttaggccatgaggtttatattctgtttgactagtaatgttgtatgagacacgttagacctggttcagacccattcattcctcagcaaatccaaagccattgtgcaccataggctttggaagctgggtgtcaggtaagatatctactattcgttgtaaattatttctgaaaattggagtctcttgcgacctgtctgtccataactctgtggataatgtaaaataattctctttaccactttgtagatctgttttttatctgtaccaaggagttcagccagaaagtctggactgtatgctttgagtgtattttgtcattaatttctttgctgcttattttagtgaataccacaaattccacctatctcctatcatcttccctgttgtgtttgattatgggccagatgaaaatatgattgattttcacttttgtttaaatgaagcagcactccacaacactgtttgcacctctccccagcttttcccaccagtaagaaacctagagttaacgtgctttaccttgagactaaatatgaactaaattcctttattccttggatagtctttaactctcactattatatacatataaaaatgtgtatctttaatattcagaattggaattaatgaattatagagttgtaaacagtgatgataattataggatggtgccctccctttgatactctagaacagaggttcttttttttttccttttttcttttttttttttgagacaaagtttcattcttgttggccaggctggagtgcaatggcgcgatctcagctcaccgcaacctccgcctcccaggttcaagtgattctcctacctcagcctccctagtagctgggattacagccatgcgccaccacacctggctaattttgtatttttactagagatggggtttctccatgttggtcaggctgatcttgagctcccgacctcaggtgatccgcctgccttggcctcccaaagtgctaggattacaggtgtaagtcactatgccggccctgagcagaagttcttatcctcaggtccgtggttttcagggagttggtagtgaatcctttatattgtgtgcagactcattcatgaatgtgcttttatcacatcctcaaaggtgtgctggtcctgaaaaaatgttaagaacctctggcagagttgaaataaagtattgaataagaggaaaatagagctgttcattttcacctgttagtaaagtaattcagctcctcttcccttctaagccaactcactcttgccctggctatatctcccaacttgtggttgttgttttccggccatctcctgctgtttctctctttataattaacattagctcacttctcattgtagaaaatcaaatgcatcatccagcacaagttaacatttaaaaattgttgctttcattttatatttttctttattaagtgagagtctgagaaaactgtgcgtcttcaagaaaattgagaggcattccattcactggccctgccgactgaccattggctccaatttgtctataaggattgcagcctataaatcggtaagtggcaggtacacatttttaacagaaatgttaccaggcagataaatatgtgtatataaggaacagacaattcatgtgtgtgttactcggaaccataattactgcttttctagttgttctccctgctcatttaatctctgtttagctttttgtgtaaaaggcaggctaggagaggaagtttaaagaattgtctataatagagtttgatttcctcctcttttactttctctccattggtaattgattgttaatcataagttctaggcctgtctcttttttttaaaagaaagaaaatgaaatgcattaagctgtgttattgtagtatcatagcagaaatgtagataatgcaccaaagttaagttcagttttggagctcagtgacacctaattcaattatgaatgatctgatagtaacaacatctgtgaaatgtaaaaaaatgttttgttactgtaaaattgcattttataatatatgtacatttatatacaatagcacactttaaaaaatgagttgcttttggtgattatttgatgaaattctagtttgagtaggaatctgatgcgtgccttcatataagcctccttgcctttttcctttaagtgttcaaaataaataggaacattttagacatataaaataaatatacaaaaacatgtttttatgtatttagtttttttctttgtatattaaagaacttaattccaaaatacatgatatatctgtgagaaccttggggcagttctttatttatttcagcttccatcaaagcctagaatagtgtccctaggaatgtgaatatagtctccctcctcttttattttggcctgcttttcaaatttctttgttgatttctgacacagatatattgcttcttttttttttttctattggaaactatgataaaatgtatagtcctctttttattaaacagtctggctgggtgcagtgactcatgcctgtaattccagcactttcagaggctgaggtgagcagatcactttaggccaggagttcgaaaccagcctggtcaacctgtctctactaaaaacacaaaaatagccaggcatggtgatgtgcgtctgtagtcccagctacttgggtgtctgaggcatgagtatcacttaatcccgggaggcggaggttgcagtgagccaggattgcaccactgcactccaacctgagcgatagagcaagactctgtctcaaaaaataaaaataaataaataaaaatattagacagtctgaggttttgtatagaaagtgtgaatgtaaatatttgtggattacttttgggagaaaatgaaatgtagagaaggttatccagtatattttgttatgaaataaactaaaattttcataataggcatgagcaaacaaaataatggagctagagtaattgttctggatttttgtctgtgccagagagtgtattaggttttcatcttctatcaattggaatcctaactttccttgttttccctttgtgttttggaatgtaagattctacaggagagagttaaaaagacttggacagttgtggatgcaaaaaccctaaaaaaagaagatatacaaaaagaaacagtttattgcttaaatgatgatgatgaaactgaagttttaaaagaggatattattcaaggtatgtcagtaagagttttcactgttgcctaaaagacattttcttcaacatgatgtgatgcaggctggggtttgtattattctttgtttaaagttatttctttgagttatagaaatataacagtttgaaaggataatgagaccctaggtcctttagctcatttgttgggtcttaggcaggttgcttctcaggagtacacttgggtgttccatctctgtgagttttaaatgtcttaagtgatagtactcaatacttggctttattttaaagtttgaaactcactagctaggagcatgtttaatatggttgaactaaggtttttttgtttgttttatttttgactttcatggtgattattcttctaagggccaacttcaggttttatgtcctaccagatatgcttccttaatttaggggctgaaaattatttgtatttattatattgcttcatattaaataggattttttaaaagttgtactcctatgttatacccatttggattgaatagtgtgtctagatggcatctttatccagaggacttagaaactagctgaggatatctgtatgttcaagacctaaaattattaagataccaaatgatggttaagatagaaacaagagtccttagataaatgttttgccaggctattcactacccagtatagttttgatttgcaagtcttgaaaagaattcttttcctctgtgacactgtatttcatcttacagtgtatatatttgtgtgtgttggaggagggggttgtttaaaggtggtggtggttatgattccttcctttctcctgatggattatatgtagaatataattaataccctacaatttctaccagttcttgaattcaattctgtagcatagaacatgaattttggaatcaaacctgggttagaatcatggttccatcattggttaatcatttgatcctagtataatgactggc

SEQ ID NO: 2952 - DNA, 6000 bp, Homo sapiens
ttccattcactggccctgccgactgaccattggctccaatttgtctataaggattgcagcctataaatcggtaagtggcaggtacacatttttaacagaaatgttaccaggcagataaatatgtgtatataaggaacagacaattcatgtgtgtgttactcggaaccataattactgcttttctagttgttctccctgctcatttaatctctgtttagctttttgtgtaaaaggcaggctaggagaggaagtttaaagaattgtctataatagagtttgatttcctcctcttttactttctctccattggtaattgattgttaatcataagttctaggcctgtctcttttttttaaaagaaagaaaatgaaatgcattaagctgtgttattgtagtatcatagcagaaatgtagataatgcaccaaagttaagttcagttttggagctcagtgacacctaattcaattatgaatgatctgatagtaacaacatctgtgaaatgtaaaaaaatgttttgttactgtaaaattgcattttataatatatgtacatttatatacaatagcacactttaaaaaatgagttgcttttggtgattatttgatgaaattctagtttgagtaggaatctgatgcgtgccttcatataagcctccttgcctttttcctttaagtgttcaaaataaataggaacattttagacatataaaataaatatacaaaaacatgtttttatgtatttagtttttttctttgtatattaaagaacttaattccaaaatacatgatatatctgtgagaaccttggggcagttctttatttatttcagcttccatcaaagcctagaatagtgtccctaggaatgtgaatatagtctccctcctcttttattttggcctgcttttcaaatttctttgttgatttctgacacagatatattgcttcttttttttttttctattggaaactatgataaaatgtatagtcctctttttattaaacagtctggctgggtgcagtgactcatgcctgtaattccagcactttcagaggctgaggtgagcagatcactttaggccaggagttcgaaaccagcctggtcaacctgtctctactaaaaacacaaaaatagccaggcatggtgatgtgcgtctgtagtcccagctacttgggtgtctgaggcatgagtatcacttaatcccgggaggcggaggttgcagtgagccaggattgcaccactgcactccaacctgagcgatagagcaagactctgtctcaaaaaataaaaataaataaataaaaatattagacagtctgaggttttgtatagaaagtgtgaatgtaaatatttgtggattacttttgggagaaaatgaaatgtagagaaggttatccagtatattttgttatgaaataaactaaaattttcataataggcatgagcaaacaaaataatggagctagagtaattgttctggatttttgtctgtgccagagagtgtattaggttttcatcttctatcaattggaatcctaactttccttgttttccctttgtgttttggaatgtaagattctacaggagagagttaaaaagacttggacagttgtggatgcaaaaaccctaaaaaaagaagatatacaaaaagaaacagtttattgcttaaatgatgatgatgaaactgaagttttaaaagaggatattattcaaggtatgtcagtaagagttttcactgttgcctaaaagacattttcttcaacatgatgtgatgcaggctggggtttgtattattctttgtttaaagttatttctttgagttatagaaatataacagtttgaaaggataatgagaccctaggtcctttagctcatttgttgggtcttaggcaggttgcttctcaggagtacacttgggtgttccatctctgtgagttttaaatgtcttaagtgatagtactcaatacttggctttattttaaagtttgaaactcactagctaggagcatgtttaatatggttgaactaaggtttttttgtttgttttatttttgactttcatggtgattattcttctaagggccaacttcaggttttatgtcctaccagatatgcttccttaatttaggggctgaaaattatttgtatttattatattgcttcatattaaataggattttttaaaagttgtactcctatgttatacccatttggattgaatagtgtgtctagatggcatctttatccagaggacttagaaactagctgaggatatctgtatgttcaagacctaaaattattaagataccaaatgatggttaagatagaaacaagagtccttagataaatgttttgccaggctattcactacccagtatagttttgatttgcaagtcttgaaaagaattcttttcctctgtgacactgtatttcatcttacagtgtatatatttgtgtgtgttggaggagggggttgtttaaaggtggtggtggttatgattccttcctttctcctgatggattatatgtagaatataattaataccctacaatttctaccagttcttgaattcaattctgtagcatagaacatgaattttggaatcaaacctgggttagaatcatggttccatcattggttaatcatttgatcctagtataatgactggctcatagtaggaagaatagcatgattaaagccacaagacctggaaagtagggggacttctcagagatactaagtagtccacttgggttggtgtattgagcatatacaggttagtacttgagggtaacatctaatggacagcctgcattttctcttttaatcatcagcgaccatcttataaagcaggcactctttgttatttccattttatagataagggaactgaggctgaaagacactcgttcacatattcaaagccccacagttctcaactagcaggacttggatctaggcctgtactgcttcagagtctgtgcctgcattctattctgaatttggactgagtaatgaagggctttggataataggctaagagtttatgcataaccttgaaaacaacgtggagccacttacagttttgaggaagagaatgtcactggggctatattttaagaagattaatatgacaactggttgtaggatggattggaaggagaaggatctagtgataaggatggatgccagttcttttggttgtcagcaaggaaggcatccctggttatcttaggcaaaaaggaaatttattgctggggcaatggagagggaagagttaaaaactgcttgggttcaaagagcgtagaagtgcatcttttctcctgtcctccagtttccagcccctaatcagctagaggtttttgctttttgttttttgttttttcttgaactaagggaccagtatacacatgtgggcaaaggaatctggttaaatgttgtagtctattgtaagtatacaatgtacaaaagttggagttatatgccatttcagtagatgaaccagaaaacatgaaacagttttagttagaatgttcattacaagttacacaattcacacgattcaagtaagatgatgactgatgacagagattaagacaaacatttggtttaggtaccagtcttaatcatgtgccatacatttccctgttaattttttgttggaaagtttggttttgtcactagctttttaaaaaagacatacatggaaataaaaatgtgtttctattttgagacggagtcttgctctgtcgcccagactggagtacagtggtgtgatctcagctcactgcaacctccacctcccaggttcaagtgattctcctgcctcagcctcctgagtagctgggactacaggcgcgtgccaccatgcctggctaatttttttttgtatttttagtagagacagagtttcactgtgttagccaggatggtctcaatctcctgaccttgtgatccacctgcctcggcctccccaagtgctaggattacaggtgtgagccactgtgcctggcctaaaagtgtgtttctttttaataaaataaatgtcatcaacagactaacaggaacaaataaacactagatcacagaatctgtccctggatatgaaagttttattgtgtcttggggtaaagatgcatgtgcttttcctttgcatttgtccaaggccagaatccttggattttgatgctccttcttcccacaaaacatagaagatactgtgtattgaaagggtgtgatttttcatagaatataggctacagaacagggctggactttttttttttttttttaagaagccgagagcctatgtttatataaatatcctatgtaattaaaaagaaaaatacagttaaatcccagaaataaaagaaatttaaatatagaaaaatatataacttatcaattgaatgtttccaaacagaagagttttagcttctgtcaggcattgcatatctccagcatacgtttttgagaacattttgttctgaaaatttcctgttggcatttttctctgtgggtctctaggtttctgaataatgtgttcttatgtttacaaatcatgctgtactttagtcaaccatggtttatctttggaggataactagtacgttaacatttgccagattttttcttttaggctgggtaatcattgagctaactagattgcaaaatatgctactttaaaaaatgtaattagattttaatcatctctatattgtatgtgtggtttgtgtatctgctgctgctttttcaccattgatcacaaggggcagtcatctgattccagggaatagaagatggaggcttgctctggcgtgtgcgtgtgttgttaatgtatgcatggaactaatttcagcttgtagaaaatgaggccccatatgcttaacagatgctcttctctttttctccagggttccgctatggaagtgatatagttcctttctctaaagtggatgaggaacaaatgaaatataaatcggaggggaagtgcttctctgttttgggattttgtaaatcttctcaggtatgattgtgaacaaactaaatgagctttttcctagctgttatttgaaatggtatgcttttgattggtcattttatttataaggtatatttatttcacttttaatttttctaaaatgtagtctgggggttaatgttgccatggtatgtattttatacattgggaaactgaggttcagagccgttaagtaaatctatatgagcatagcaaactaaaaatacaggatggtttttgaatggggaatggaagcggagatgaggggtatttgaattatgtgggcctaaccctcatccctttgaggttcagtcttcttgagctggtattatggtgaaagtgctcataatgtctcaactctagaggtgggagggcataaaaatgcatgagaaacattgcccaatacagcacattgcatgttcttgaaaataaaccgcaggctccagatttcatagatcagacaaagttgatcttggtagataagtgcaggtggttatgattttcagaactcttcaatactcattttctaatctggtattagtagagctgtcttgacccctcttgatactgtgctagataagttaattgaatttaagggggtggggggagagacatgcagtacttatttttgatttaatttctctttctttcaacccttcccctctaagtcttcactcaagcctctactgttcatcagtgcctcagtgttactcttaggaggaaatgcaaaccacttagctttgtttttaggagacttcatcatctgatctttgttaatctctgtaatctaatttttcacctttcctctcacacagtggcactgtactactccaagagcagttctccaaatgtaccatgcttttacagcactccagacttctattgatactgttttctctgcctggaacgcttgtgcccagacttttctcttagttcctatttgtccttttaagtctcgacttaggtgtcaccgtttgcag

SEQ ID NO: 2953 - DNA, 6000 bp, Homo sapiens
aggatcacctgagcccatgaggtggaggctacagtgagctgtgatcatgccactgcactccagcctgggtcaaagagtgagaccctgtctcaaaaaaaaaaaaaaataggccgggcacagtggctaatgcctataatcccagcactttgggaggccaaggcggacggatcacctgaggtcaggagttcgagaccagcctggccaacatggtgaaaccatctctactaaaaatacaaaaattagccgggcgtggtggcacgtgcctgtaatcccagctaccggggaggctgaggcaagagaattgctggaacctgggaggcagaaactgcagtgagctgagatcacgccactgcactccagcctggatgacagcgagactccatctcaaaaaaaaaaaaagaaaaagaaaaagaattaattaattaattaaataaagagcatgtctcccaccccaggcctaagttcttccctctatgagagactacttgcagaaacctgtgttctcactcttcccccttcctcacttcattcccacacatttcttttccatccctgcgcaccaaggtcaccttggtgctaaacaccagggacccatggtctcttcccctttgtgtcacaggctgtcctctgcctcttatcctcaccctttagctgctcctccactgtctcctctctcagaggtcaggattctggatctgtctctgtggaccctcagctctcctccaatcccaagtcccccgcatcctggtcgcatgtcagggtggtccagagatgcctgcctcccactgcccacacccaggggcccgccctcctttcctctaaccttcccacatactctggccccatggatccacggcagttcctgctggcccttctccattttgttccttatgctgcacccctctgctgccactccctgcgtccgtgactccagctcactcgtctctgtccttcacccaggccgcctgctcagggtttgtgcctctctgtgctcctgcagcacctgagtgtttattcacctctgaacctctgctttcccacctgagtacacgcagctcctggctgcagtgacttcatatcctgaggactggagctccgtggtgaacagatggctttctatgttctaatgagagggatacaagagttccacagttctagtctggaaaggaccaaacatttcttaaaagctaagtatgttgccggaaaaaaaagggagcagagctttccccaggaagcttggctctggtttagatttttcaggaaaagccggaatcaaattacagaataaataaaggcaaccatcccccttttaaaggtacaccagccttggtgcatctttgaagaaagcattctgtaaaccccaaccagaactaaactagtacgtcgaactcagattcattttcactaaaccacaagcaaatgtttccctaaaaatcacccagttaacaaagtccgcatatttaagccaaaacaatttaactgaacaaatgggccacacgttgatttccggtccctgctaataagtcagtctggaagttcacaggtgtgcccatcctgccttggctgctgaagtccaggtgtctagggctgactgatgcccattatgcctcccctcccccatctttgtcacaggatttgacgcaccagctctccaaatgaccctggccctcccatttgctgttcagcccaagtgcggagattggctatgaaccctgtaaacaggcctctgacccccagaggctgatggctggccaaggaaagctgagctgctgacgcagactgggaagcaagagcccacttccagcagcccaggctagctgtgtccaaatccatgactggggaggggttagagccttgagggacaaaattattctacctacctagggagactgcactggcccaacagctgggccccatctcatgggcccgcttcttcgccaggagagaagccactccggggtaggtactgccccacccaaacccagccatctggagtgacccagccctggttcccaggtgtgtggatgtgaattgtcccacccaacccactctacagtgagcaaacggaagccctctgggagagtggtcacagcctcccctgtacctctgaacagcctgccaggctccctactcttaggcttccactgtccaccagggaaagccctgagctgggagttggggagcccccaggcattgcccctgcccaggacacaattctcttttgggatcagggaaggctgtgagggctttctaggtctcaagatcaggagcttgaagatgcagcctgggaagtgggaaggtgagaccaggacataggccagcctaaagcaagagtcctgggcctgaaggctcctgggaaggtggtggggagggagcatgtgtcggtggcctcagggcagcagctgcctggtgaatgttcatggactggatgctctgggaagcgggttgggtggtgagcttctctcttcccctctgaagacgtcactggagtctgggggtggagctgcctggtctataaatcctggggccatcaggctagggtcctgcagctgcctgaaggagccatctcatccacagctcttccttggtgagtggggagccttccctaagggctaggacacctggaccaagtttcatcctgggcgtatggtgtgctgctcctcttccccattcccaggtgcctccacccctgaaccatgccagagaagtccccttttcctctcctctccccaacagctctaccatctattcttgtgcttgttgcccctggcatgggagggataaggggtagaagcacttgcccccatcaataccactcatccattccacatccccaactactatggaagagatacagcaggccacggagaaaagggcagaaggcctgcaactctggttccctagcactggtgctccaaacacgcctacattgagaactcccctgaccatccatctatcctcccatccattggcctgaattcaggtctctgttcccctccaactttcttccacttctggaaactccttgaaggaaagatggatggacctggacaagtgggagggccctcagagctggcaaggcaggtagcctctgtgccccaggctcagggagaaggctcgtcccctggagcatcatcccctgctgggccaggatcccccaggatctggacccctgtatgcttgggatgaggagcggtggcagagagggaagggcataaggagataccaaagctgcccctgagatgccagttttccaaagtggccctggaggaagtagggggatgtgggggtgaggtaagtctccttgaatgctgtaccctgtccattagagcagccatggccagctccaggcgaggcctcctgctcctgctgctgctgactgcccaccttggaccctcagaggctcagcactggtcccatggctggtaccctggaggaaagcgagccctcagctcagcccaggatccccagaatgcccttaggcccccaggtgggtgtctcccagcctcatggggaggaagaaagtgatggccgggggctcccccaccctcctggagcctgaggtcggggtagggaggacagcatcagttcccttctaaggaagggccctggacactgcagcaggcagcccagtccagactgcccatggcctcccaagtgatgccctggctcccctggacgacagcatgccctgggagggcaggaccacggcccagtggtcccttcacaggaagcgacacctggcacggacactgctggtgagtagggtgagaggtccccagcatcaagaccagccactggtcatcagaggccattgtggcttagggttgggtgctgggagggtggggagaatgaaacaccactgagatgccccctgccacagcacccccagccatttctcagtgcccctactgcacacagcagggtgctgtctgctatccttcctatttcccaggaggattctagacaatttacaaagcacttgggttaaagaccaaagtcactagtagactagaaggagataattgttctataagacagtggtggccatgggatcccacaggcatcctgacaagccaatgactgtcttgaggtggacagaccccaggccagtggaaagaggtgagggatgcaacctcactcaaacagacaacagggccaagaggaccaggtggtgactgacatgtgcactaggaacatctcagggactgcagagctccccaagaccatagcagaagacaggcgtggggaaatggtttgctactgttttgcaaatcaaacatttacagtgcatcaggagagcccggtaactaaagaagaaagtggttagttcctatgaggcaatgtcttaccgcctgatttgtgtgtatgtgctgaggtttctatgcgtcaggcttgtttagggtggacaagagggcatgcccaagggagctggagatccccacactagctggatcctcaggcttctacgggaggcggggggcgtcctgctgtgggaggccacatggggactgggggggacgagaggggagagaaccaggaagatggcagctcggcggttacgagaccagtgtcctgagacatgaccgccacctctccctccgcagaccgcagcccgagagccccgccccgccccgccatcctccaataaagtgtgaggttctccgaagctgttgcgtcgagttctgtccttcgtcccctccctgtcttccccgctgagacccttccctgcgtgggggctggagggacgcgggtccggccccgcgggcgggagtaactaagggatggccccgggccctggcgggaaggccgggccagagcctgggggcgggatgcggacgtccgcagggtcgccgcttcggttccagaggccacacggccgggcggggcgtgagggacagcccgaggactacaggtcccaaggttccccgcgccgcttccggggcacggtggcgtcccggcaccgcggccgcagtgaggagactcggccatgctacgcgcgctgagccgcctgggcgcggggaccccgtgcaggccccgggcccctctggtgctgccagcgcgcggccgcaagacccgccacgacccgctggccaaatccaagatcgagcgagtgaacatgccgcccgcggtggaccctgcggagttcttcgtgctgatggagcgttaccagcactaccgccagaccgtgcgcgccctcaggtgtgcggccggggggaggtggccgcccgcgcgcgctggtgacggtgggagtgggcggagagggtgctgattcctggcgcgtctgcacccaggatggagttcgtgtccgaggtgcagaggaaggtgcacgaggcccgagccggggttctggcggagcgcaaggccctgaaggacgccgccgagcaccgcgagctgatggcctggaaccaggcggagaaccggcggctgcacgagctgcggtgcgtggggcgggaggcggggcggggcggcgcggcctggccggcctgggagaagcccgggccccgctcagcctcggccctttgaccctcacaggatagcgaggctgcggcaggaggagcgggagcaggagcagcggcaggcgttggagcaggcccgcaaggccgaagaggtgcaggcctgggcgcagcgcaaggagcgggaagtgctgcagctgcaggtgggcaacgtctccggagggtgggactccagccggggacgcggcttgcggggcactgggaattctgggcaccgcgacgcgggcgctggctatgtgcagagacttacagttggcaggtccggatttggagaggagagtgccagtcaggcgcaaagacccggaggtgagcggagtaattggacagtgttcaggtacctagcaggtctgtgggagggaccctgcgttccacaaagaggttgtattttgcataacaggtgatgaagccatgaagggttaagtatttcaggctaggattagcaggtgtgcgacttaaaagcagggagaccacttaggagtaatgc

SEQ ID NO: 2954 - DNA, 6000 bp, Homo sapiens
ttggagaatcaatgcacataagtcagaattatagaatgcacagcatgattactaggatggataacatgtggtctgaacaaacttctcatccattacactcagccctctcaggttaatggaactcagatcaagtatattcctgaagtcagtactgtgtgacgaacaggggtctggtggaagtgatgctaatagggctttaggccagctttagagcccttctctctctctcttttcgttttttgttttctttttgtttgttttttgttttttttttttagacagtttccctcttgttgctcaggctggagtgcaatggtgtgatctcggctcactgcaacctccgcctcccaggttcaagcaattctcctgtctcagcctcccgagtagctgggactacaggcgcccgccaccacagctggctaatttttgtatttttagtagagacaggggttttaggtcaggctggttttgaattcttgacctcaggtgatccgcccacctgggcctcccaaagtgctgggattacaggcatcagccactgcacctggctcaagaaacattcttaagcatgcttgatcttggtaaatgcccctgatttcttctgtaggaaaaaaccctagagatcgaatttctgtgtcaaagaataagtaaaattctaaggcttttgatacacatttctaagtttccaccagaaaaattataccaatgtatactcccacttgcaatgtatttaagtgcctacttccttgaatccttcctaacacaccaggtgttaacatgatttttattaatttggtaggttaaaattctgtctccattgaatttacatttctttgcttattaatgtggctaacaaacttcacgtttatgaagactaggactggacagtggaggccagatacctctggctttttgtttagatgaataaattttctatttctcttaatccattcaagttgagttctctgtcactgaaacctaaactatactaaccaatataatcctttgaggcatactgaagtcttaaaacttgtatggttattcattatgttttatgggtttttttcttatgtttggaagcccataggaagatctcataaatatttaccaaaatatttttccatttcttattgggtcaagatttgaatttgaattctttatctagaatttagtgaataattattaggaaaagtctttttttttttttttgagatggaggtttgctctgtcacccaggctggagtacagtggcgcaatcttggttcactgcaacctctgcctcccgggttcaagcaattctcctgcgtcagcctccctagtatctggaattacaggtgtgcaccaccacgcccagctaatttttgtatttttagtagagacggggtttcaccatgttggcctggctggtctcgaactcctgacctcagatgatccacctacctcagcctcccaaagttctgggattacaggcatgagccactgcgcccatccagaaaagtctacagcttttattcttttctaatagtttaaccaattatctgatcaaaatttacttcattctttctcccactgatccaatagtacctttactagatgttagagtagccacttaaaatgtaaattggatcacatcaaagatctgctgttgaccacattcccttgcacttttagagagcctacaaagtcctgcaagagctcaccccagcctctctgcaacctcaccttgcaccactcttgcttcagacacatcagtctgagttctacatcaaacttgtctgaatatattccaagtatgctgacctttataatcatgctattctctcagcctagaatgcttttttccaactctccaagcagctgtcttctctgataagatgctacctcctcagagaggccttctctgaccacagtcataggcatgtttatgtcctcatttcagtttaacataaaatttacgtaactgtacacctctttatcatttgacacttttaggaggacatcacttctgtaatagagcagaaataaacagattgatgtacatggtggatcccccatggatagagtttgtcatttaaaatgtcttcaaatctattacatgtaatttggcattaaaccaaaatgttattatgtaagcagacagaactgaaacagagtagtggagcatatgcatttgtttttagtgaagcaaatgttcctcactggaggaaggaacacattccacattttgcaaaggaactgagattttaacggacccaagaaaggaaaagaaccacaaacagatgatgctgtattatgttttgatattgagatgtatgcaaatgggtagtccatcacacataaagcaagaaagtgccaacatcaaaacttacaaatgagtagcagaggcttgcaagaaattccagagacaatagaatagcactattgaaaaatactgcatcatcaatacccttgacaacacagagtaggatattatacagaaaaacagcagaatcagcaactaactgagtggagaaacagtaggaatgccttaaccaatgtagcttaaattttttcatgtttgcacaagagtaatatataataagaatgtttttaaagtctaaaagttcttttaaaacaaaatagacccgggcgcggtggctcatgcctgtaatcccagcactttgggaggccaaggcaggcagatcacatgaggtcaggagttcaagaccaacctggccaacatggcaaaaccccgtctctactaaaaatacaaaaattagccaggtgtgatggcgcatgcctgtaatcctagctattcaggaggctgaggcatgagaattgcttgaacccaggaggcggagattgcggttagccaagatcacaccactgcactccagcctgggtgatagagtgagactctgtctcagaaaaaaaaaaaagaaaaagaaaaagaaaaaaaaaaagaaattctaagtgataaagcattgtgtaacagtttgaggctgggcacagtggctcatgcctgtaatctcacactttgggagaccgattgggaagattgcttgagcccaggagttggagaccagccagagcgacatagtgggaccttctctctacaaaaacatttaaaaattagccaggtacagtggtgcacccctgtagtcccagctatttgggaggtggcaagaggatctctcgagcctagaagttggaggtggcagtgagtagtcatcttgccactgcactccagcctgggtgtcaaagggagactcccctctctagaaaataataaaaaaaaaagtttgacagttttcttgcttgtgctacataaaataatggtacatattacaattgaaggcatcttataatagaaatgccctttcctgttcccttttaaggctgacccagtgctttaagaggctgatacagaagggtaaagttaagtctccacaaaatccagggaagagactgtgaaactcatcttagaaccttgtatggagtcacagctgaactaggaaaaaaaaaaaaaaaaaaaaaaggaaagaaaggcattccagagataaagaatagactaaggagaggagatatttgaagccataatgattgagaatatgtcagacttgaaatgaatcttcagttccctcaacaagacaaataaaactaactccatacctagatacatggtagaaaaactaaagaattctgctgaccaaggtattaaaagtaactaaagagaagtggtgtgaagaaagcaagagagaaacaacaaatcctgtccatcctgtaacaattgaaaatttctggctgggcgtggtggctcacgcctgtaatcccagcactttgagaggccgaggcaggtggatcacctcaggtcaggtgttcaagaccagcctggccaacatggtgaaaccccgtctctactaaaaaaaaataataataataatacaaaaattagccgggggtggtggtaggcacctgtaatcccagatactcgggaggctgaggcaggagactcacttgaacctgggaggcggaggttgcaatgagctgagatcgcgccactgtactccagcctggatgacagagcaggactccatctcaaaaagaaaggaaaagaaaagaaaaaatattaaatgtgtacgctctttgactcagctgtattacttcaaggagttgatatcaccaaaattgcctaagtgctcaaaggtgtttgtagttaaacaacaggagattgataaattatgttatatacatgtgatgctatgttttaaagaggtactgatatgataaaagatgtacgtggcataaaattaaatgtactttattaagtacttttccaagtgtttacggaatgagtgcatttttgaaaaaaaaaaagtgtattcgaacttttaaaaaagctttaaaagctttatacaatgaacgattgagtgattataagagctggcgggggaatgttaagaggatgatagggagctaagtttaacagaacaattcacctctttatcttgtgacacctacgagcgcatcaattctgtaattgaaaaataaagtgcatatttgcagcagctgtactctcttcaggctgcaaggaggcttttcctcccggtaggcttgatttgcatttcactttcactttcgtggctggaaactttctacccacgtagtgggaggctgaggagccaccataaagctggggcttgacgagccgggaccgggacccgatctccacatatgcccggacttgttctgcggccgggttcaggagtcaaagaggcggggagacctgcgcgacgctgccccgccctgcgcccgcttcctccaatgtatgctctagggggcgggcctcgcggggagcatggacacgattggccctaaagtcttccccgcaaggccgtgggctggacagcgtggtgacgtcgcaacgcggcgcagggtgagagcgcgcgcttgcggacgcggcggcattaaacggttgcaggcgtagcagagtggtcgttgtctttctaggtctcagccggtcgtcgcgacgttcgcccgctcgctctgaggctcctgaagccgaaaccagctagactttcctccttcccgcctgcctgtagcggcgttgttgccactccgccaccatgttcgaggcgcgcctggtccagggctccatcctcaagaaggtgttggaggcactcaaggacctcatcaacgaggcctgctgggatattagctccagcggtgtaaacctgcagagcatggactcgtcccacgtctctttggtgcagctcaccctgcggtctgagggcttcgacacctaccgctgcgaccgcaacctggccatgggcgtgaacctcaccaggtgagcctcgcggccccgggaagccggccccggcccgcctgcacctccggtgcttggcgggagcgctttcgagcctagccctcattggctggcgtgggccatccgcgccttctcattggcctgccacgcagtggggtggggcccagctgagcgcgcggttcggaaaagcccgcgctggctgctgcgcgaacctgctttttcgcgccaaagtcacaaagcgggtggtggcgggaaaatcaagggtttttccgcagtgccaggaacactgttccagggctctttgctcactaaatcctgttggccttgaatggacgctttagctgtggctttcttgtttctgagacggtctcggtgtgttgcccgggctggtctccaacttctgggctcaagcgatcctcccggctcagtcgcggttgactttaaatgctttataatgcccttgcgagaaatgtggcagcctgtcatcctacttagtggcaggagattgtttctatccagaagggacactgctggtggtattttagtataaatactgccagatgcgtcccaaaacgtctgcattaataatggcatcctccagcagtccgcttaccctccaccagttctgagacggcctgatgggtgagagtggtaaccccttctaaccgcgttcgaaatacagcccttcagcagac

SEQ ID NO: 2955 - DNA, 6000 bp, Homo sapiens
aacctatacgctaacttccgaaacaaaatctcctgaaatgccaactcaatcataaattttaagatgccaatctttcagaccatatctcatcctttgctttcctaagctccatcagaaaaatatggttgggtaggaagaggatcattcccaaagcctaaactccaagtttcttagtttggcaactatactgtgctttgggactttaaaattataagcacagttcccagaggagaacatttcctttattagcaattggctttgaaaattccattctcagatgctaaatataacaaaataccttctgacttttataaataaacatgctccagattattttgatactaatgattttctatttacaagacagttttgccacagcagttaagcaactgtaacattttgaggaatctttcaagtttactccagagctttttttttttttttttttaagacagagtcttgctctgtcgcccaggctggcgtgcagtggcgccatctcggctcactgcaagctccgcctcccaggttcacgccattctcctgcctctcagccttccgagtagctgggactacaggcgcccaccaccacgcccggctaattttttgtatttttagtagagatggggtttcaccatgttagccaggatggtctcgatctcctaacctcgtgatccacccgcctcgtcctcccaaagtgctgggattacaggcgtgagctaccacgcccagcctccagagcttttcttttcttttaagacgttgtttggctcttgttgcccaggctggatggagtgcaacggcgcaatctcggctcaccggaacctctgcctcccaagttcaagcgattctcctgcctcagcctcctgagtagctgggattacaggcatgcaccaccacgcccggctaattttgtatttttagtagagacggggtttctactaaaaccccgttggtcaggctggtctcgaactcctgacctcaggtgatctgcccacctcagcctcccaaagtgctgggattacaggcgtgagccaccgcgcccagcctattccagagcttttaaagcactgacttgaaaattgttcactggattcttctactatgaaattaaaaagttcttgtttcataatgcatttccttaaaatttattatttctaatttccttgggttctaacacaagaatattggcaaagccaaagtcatggaagtaggtgtttcccaaactatgaaacagaataaatcaggattttttaaaagtttactatgggccgggcacggtggctcacacctgtaatcccagcactttgggaggccaaagtgggtagatcacctgaggtcaggagttcgagaccaacctggccaacatggtgaaacctcgtctctactaaaaacacaaaaaaattagccagtcgtgatggcaggcacctgtaatcccaggtactggggaagctaaggcaggagaattgcttgaacacgggaggtggaggttgcagtgagccgagattgtgccattgcactccagcctgggcaacaagagcgaaactctgtctcaaaaaaaaacaaaaaaacaaaccaacaaacaaaagtttactatatacattcaaagacaaataatagatttcacagtttttaaaatgttcccttattaaaaatcccaaacatggccaggtgtggtggctcacgtctgtagtctcagcactttgggagaccgaggcgggcagatcacgaagtcaggagttcaagaccagcctggccaatacagtgaaaccccatctctactaaaaatacaaaaaaaaaaacgccaggtacagtggctcatgcctataatcccagcactttgggaagctgaggcgggaggatcacctaaggttgggagtttgaggccagcctgaccaacattgagaagccgtgcctctactaaaaatacaacattagccgggcatggtagcacacgcctgcagtcccagctactcgggcggctgaggcaggagaattgcttgaacctgggaggtagaggttgcgatgagccaacatcatgccattgcactccagcctgggcaaaagagcgaaactccctctcaaaaaaaaaaaaaaaaattagccgagcgtggtggcggatgcctatagtcccagctactcaggaggctgaggcaggagactagcttgaacctgggaggcagaggttgcagtgagctgagatcgtgccactgcactccagcctgggcgacagagagagactccgtctaaaaaaataataataataaaatcccatacatgacaattcagtgacaattgagaagttctgaataatggggtgaggaactgattgtcttgttctcggtaatgaacatcaggcttttaacagagtgcatagcagctgtcttttaggaaacaacacgccacaagtggacctcatgaccccaggcattctgtcactgtataagtgatataagtgcacctctagctggacagctcctcaggtcctcccagtctaaagtacaggatgtgaaagtaagacggttcaactcgcactttatctctgggggatggatccaacgagtccgggaaggagggtagaatctttatgttgcatctcataatcccaaggttgttttttgacattctaattattgtacatagttagcttttcaaaaacatggcccaccagctatcatgccttctttcttctctctctcctcacaccttctaggtccacaaagtcccactaacatcaagcatgatctcacccttaaacagagctacagagcctccaaacatctgcatactcaccaactagtagtacaaggtaagtcagaattctttcaggctgaaccaggatagccaaatgaaaaattagagacttcaaagtatcttgtctctgcaagcgactgctaaatcctcagccccagccctaaatgttctccaaaatatgtttttgtttttgttttttgagacagggtctcaaactcctgggctcaagcgatcctcctgcctcagcctccctagaagctaggattacaggcgagcagcactgtgcctggccaaaatatatgttctaaaaatcggtaggaacagttctctttggatagtccactgtcaactgcaataacacgaaagttgtttaaaaaaaacccatgatctcattatctttcaccaaaaacattcctcctagtgtaactgctctgttgacatcctgtcaccaaatcttgtgctttcttccttctgggtgtctccctaatgtccgttgcgtccagtcatcaaaaagttacaggctgcattaggggaagccgtgagcctggtgtaaggcaacagggattggtgggaaccgatgatcctcagctccagccaaccattgagcaggtgacaaagtgatggtggaccctccaattatctaagacaggcaagaaatttagattgttaggagaaactttctgatttttaaggcaatatgtgggccaaagaaaacatctacaggtcactcatgggcaatcccgagtgaaccaggctccctcagtctggtccaggctccctcagtcccttctacacatcactgtctgatcagtttcccaaacacagggctcctgatcactgctatctcggaaagcacaactactgctacaaagtcctatactgccattcaacctccacagtaataaaaccaatccctaccttccttaactcccctacacagatctttcacttcacccaaaggagtccactcccccacccgtcacccccgccactgtccccgccaagatggcctccttcctactctcctcccctacccaccagagcccacacggtgcaggaaacaacccatcaaccgggaggacgccctccaacacctgctgatgacggactggctcactgggtaacacccctttgctcaaagccgatgatttcatgcccaagaagggatttacatctcccaggaggcaaatgctatggccttgtcctgattcccccaccccccaaaataataacattgtaaaagggaacggagagcctaagttgcgctcagaggagccgcctccctaagaaggctctgcatatcttcacctccaggaaggcctcacggagttgggggagaggggagtccccgcagccagcccagcgaggcaggaggccgtgcgccactcccgagaagctccttcctgcgccccgggggagccacttcagtcagaccctgagccgggaccccgacccgccgacccctgacgcgcgcgccgcgaaggccgggcacccgagggcccttcgcgctacccgggcccggggccgccgtcggctgcgacaaagggtcagagaacaagacgacccctctgcgcgcgtcccccgcaggcctcccggatgcgccgctgtcccggccgcgcccaccccgacgctgccgctaccttgtcctcgggtggcgcaaccggctcatgggccaccctctgcctcagctctgtcatcctgggaaaatcggcccgacgtcgccgcgagctagcagcgaagccgccggagcaggcagctcggcgcgggcacgcgcggactcccacggccggccccgccccgcccgggaggcgcgcggctctgagcggctcacagttcccttagcagcccagcagccagccctggagctcggccccacccagtgccgtcaccgccctttcacccgggccgagcggggtcagccttccctagccccgacccgagagctccctctcccgggagcagggctcggagcgagtgcgcacgcgcagcgccaccatcacggtccggaatatccaccaatggcgcaaatacgccagggaggcagggcgacgggggcggggcggggcggagcagagtcgagaggcgcgcattggacggcagcgtcaggggcgggaaaaggcgtgcgtttcagtgtgcgattagccaatgggagctcccgcttaaccgcggatggccggagctggcgccctggttctggaggtaaccggttactgagggcgagaagcgccacccggaggctctagcctgacaaatgcttgctgacctgggccagagctcttcccttacgcaagtaagtagacgttatttaggtcgaatggaaaggccaggtgagccgacctggttaagagcattttatcacttatcacatgatgagaaatgaaacccacgcttcagtctgctttgctttgccaagcggtcgctagtacttgttaagcactaattgtatactaggcactgagctgagtaatcgctttagttggcttatctcgtttaatccacacatggcttggaagtgggtatgatttgaattttacagttaagatcttcctcagtggtttgtttgtttgttcgtttgtttgtttgttttgtgacggagtctcgctctgtcgcccaggctggagtgcagtggcatgatctcgactcactgcaacctctgcctcccgggcgcaaacaattccaaggtgcgcgccaccacgcccggctaacttttgtatttttagtagagacggggtttcaccatattggtcaggctggtctcgaactcctgacctcaggtgatccgtccgcctccgccttccaaagtgctgggattacaggcgtgagccaccgagcctggcccttcctcagtttttcaaatttgtcttctggactatggaaagaccttttttgggacagaagtgctgtctactttgtttactgtgcatcctctatgtctttgacacatccattgtaagtacttgttggatggatttaaaacttttaaaaggaccttagccaaggtctcccagctagaaagtgcctagtaagaattagaacacaaacaggtttgttaccagcccacactctaaccaccatactatactgcctgcctgcatttattaatacttgtgttgctccagcattgcctttggtgtttcctgttctttctattcactgccctgtaagtgatgtaaaacacatataacactgcgtccccaacttaagcatactgtaatctcacaatgagacacttgcacacaaaagaattgc

SEQ ID NO: 2956 - DNA, 6000 bp, Homo sapiens
agctaggattacaggcatgcgccatcacacctggctaatttttgtatttttagtagagacggggttttgccatgttggccaggttggtcttgaactcctgacctcatgtgatctgcctgccttggcctcccaaagtgctgggattacaggcatgagccaccgcgcccgggtctattttgttttaaaagaacttttagactttaaaaacattcttattatatattactcttgtgcaaacatgaaaaaatttaagctacattggttaaggcattcctactgtttctccactcagttagttgctgattctgctgtttttctgtataatatcctactctgtgttgtcaagggtattgatgatgcagtatttttcaatagtgctattctattgtctctggaatttcttgcaagcctctgctactcatttgtaagttttgatgttggcactttcttgctttatgtgtgatggactacccatttgcatacatctcaatatcaaaacataatacagcatcatctgtttgtggttcttttcctttcttgggtccgttaaaatctcagttcctttgcaaaatgtggaatgtgttccttcctccagtgaggaacatttgcttcactaaaaacaaatgcatatgctccactactctgtttcagttctgtctgcttacataataacattttggtttaatgccaaattacatgtaatagatttgaagacattttaaatgacaaactctatccatgggggatccaccatgtacatcaatctgtttatttctgctctattacagaagtgatgtcctcctaaaagtgtcaaatgataaagaggtgtacagttacgtaaattttatgttaaactgaaatgaggacataaacatgcctatgactgtggtcagagaaggcctctctgaggaggtagcatcttatcagagaagacagctgcttggagagttggaaaaaagcattctaggctgagagaatagcatgattataaaggtcagcatacttggaatatattcagacaagtttgatgtagaactcagactgatgtgtctgaagcaagagtggtgcaaggtgaggttgcagagaggctggggtgagctcttgcaggactttgtaggctctctaaaagtgcaagggaatgtggtcaacagcagatctttgatgtgatccaatttacattttaagtggctactctaacatctagtaaaggtactattggatcagtgggagaaagaatgaagtaaattttgatcagataattggttaaactattagaaaagaataaaagctgtagacttttctggatgggcgcagtggctcatgcctgtaatcccagaactttgggaggctgaggtaggtggatcatctgaggtcaggagttcgagaccagccaggccaacatggtgaaaccccgtctctactaaaaatacaaaaattagctgggcgtggtggtgcacacctgtaattccagatactagggaggctgacgcaggagaattgcttgaacccgggaggcagaggttgcagtgaaccaagattgcgccactgtactccagcctgggtgacagagcaaacctccatctcaaaaaaaaaaaaaaagacttttcctaataattattcactaaattctagataaagaattcaaattcaaatcttgacccaataagaaatggaaaaatattttggtaaatatttatgagatcttcctatgggcttccaaacataagaaaaaaacccataaaacataatgaataaccatacaagttttaagacttcagtatgcctcaaaggattatattggttagtatagtttaggtttcagtgacagagaactcaacttgaatggattaagagaaatagaaaatttattcatctaaacaaaaagccagaggtatctggcctccactgtccagtcctagtcttcataaacgtgaagtttgttagccacattaataagcaaagaaatgtaaattcaatggagacagaattttaacctaccaaattaataaaaatcatgttaacacctggtgtgttaggaaggattcaaggaagtaggcacttaaatacattgcaagtgggagtatacattggtataatttttctggtggaaacttagaaatgtgtatcaaaagccttagaattttacttattctttgacacagaaattcgatctctagggttttttcctacagaagaaatcaggggcatttaccaagatcaagcatgcttaagaatgtttcttgagccaggtgcagtggctgatgcctgtaatcccagcactttgggaggcccaggtgggcggatcacctgaggtcaagaattcaaaaccagcctgacctaaaacccctgtctctactaaaaatacaaaaattagccagctgtggtggcgggcgcctgtagtcccagctactcgggaggctgagacaggagaattgcttgaacctgggaggcggaggttgcagtgagccgagatcacaccattgcactccagcctgagcaacaagagggaaactgtctaaaaaaaaaaaacaaaaaacaaacaaaaagaaaacaaaaaacgaaaagagagagagagaagggctctaaagctggcctaaagccctattagcatcacttccaccagacccctgttcgtcacacagtactgacttcaggaatatacttgatctgagttccattaacctgagagggctgagtgtaatggatgagaagtttgttcagaccacatgttatccatcctagtaatcatgctgtgcattctataattctgacttatgtgcattgattctccaagcctccttttattaggctggatttgaaaaggagcagctgagtttctagaaggactgacatgacactcacttagatatgacctttcatacctacgtgcccctgaaggtgaagttctagacactaacatcttcacctgtcttagaagatcatcttgctcgagtgctgtggctcatgcctgtaatcccagaactttaggaggcctatgtgggaggattgctcgagcccaggagtttaagaccagcctaagcaataaagtgagacttcatcgctacacaaaaatttaaaagttagctgggtgtggtgctgcacacctgtagtccaagctactcgggcatatactcatatagaaatcaggaatatataatgctgttttcagaattctcactacctgccccaaaactcacagctcaggtcaaaattaccaataggaaattttagccaggcatggtagctcatgcctgtaatcccagcactttgggagacctaggcgggaggatctcttgaacccaggagttcaagaccagtctgggcaacatagtgagaccctgtctctaaaaaaaggagaaataaattaattaaaatttaaaaattgaaaagaagaaaaatgtaaaattatatttttttaaaaaacgaaattgcaattcttttgtgtgcaagtgtctcattgtgagattacagtatgcttaagttggggacgcagtgttatatgtgttttacatcacttacagggcagtgaatagaaagaacaggaaacaccaaaggcaatgctggagcaacacaagtattaataaatgcaggcaggcagtatagtatggtggttagagtgtgggctggtaacaaacctgtttgtgttctaattcttactaggcactttctagctgggagaccttggctaaggtccttttaaaagttttaaatccatccaacaagtacttacaatggatgtgtcaaagacatagaggatgcacagtaaacaaagtagacagcacttctgtcccaaaaaaggtctttccatagtccagaagacaaatttgaaaaactgaggaagggccaggctcggtggctcacgcctgtaatcccagcactttggaaggcggaggcggacggatcacctgaggtcaggagttcgagaccagcctgaccaatatggtgaaaccccgtctctactaaaaatacaaaagttagccgggcgtggtggcgcgcaccttggaattgtttgcgcccgggaggcagaggttgcagtgagtcgagatcatgccactgcactccagcctgggcgacagagcgagactccgtcacaaaacaaacaaacaaacgaacaaacaaacaaaccactgaggaagatcttaactgtaaaattcaaatcatacccacttccaagccatgtgtggattaaacgagataagccaactaaagcgattactcagctcagtgcctagtatacaattagtgcttaacaagtactagcgaccgcttggcaaagcaaagcagactgaagcgtgggtttcatttctcatcatgtgataagtgataaaatgctcttaaccaggtcggctcacctggcctttccattcgacctaaataacgtctacttacttgcgtaagggaagagctctggcccaggtcagcaagcatttgtcaggctagagcctccgggtggcgcttctcgccctcagtaaccggttacctccagaaccagggcgccagctccggccatccgcggttaagcgggagctcccattggctaatcgcacactgaaacgcacgccttttcccgcccctgacgctgccgtccaatgcgcgcctctcgactctgctccgccccgccccgcccccgtcgccctgcctccctggcgtatttgcgccattggtggatattccggaccgtgatggtggcgctgcgcgtgcgcactcgctccgagccctgctcccgggagagggagctctcgggtcggggctagggaaggctgaccccgctcggcccgggtgaaagggcggtgacggcactgggtggggccgagctccagggctggctgctgggctgctaagggaactgtgagccgctcagagccgcgcgcctcccgggcggggcggggccggccgtgggagtccgcgcgtgcccgcgccgagctgcctgctccggcggcttcgctgctagctcgcggcgacgtcgggccgattttcccaggatgacagagctgaggcagagggtggcccatgagccggttgcgccacccgaggacaaggtagcggcagcgtcggggtgggcgcggccgggacagcggcgcatccgggaggcctgcgggggacgcgcgcagaggggtcgtcttgttctctgaccctttgtcgcagccgacggcggccccgggcccgggtagcgcgaagggccctcgggtgcccggccttcgcggcgcgcgcgtcaggggtcggcgggtcggggtcccggctcagggtctgactgaagtggctcccccggggcgcaggaaggagcttctcgggagtggcgcacggcctcctgcctcgctgggctggctgcggggactcccctctcccccaactccgtgaggccttcctggaggtgaagatatgcagagccttcttagggaggcggctcctctgagcgcaacttaggctctccgttcccttttacaatgttattattttggggggtgggggaatcaggacaaggccatagcatttgcctcctgggagatgtaaatcccttcttgggcatgaaatcatcggctttgagcaaaggggtgttacccagtgagccagtccgtcatcagcaggtgttggagggcgtcctcccggttgatgggttgtttcctgcaccgtgtgggctctggtgggtaggggaggagagtaggaaggaggccatcttggcggggacagtggcgggggtgacgggtgggggagtggactcctttgggtgaagtgaaagatctgtgtaggggagttaaggaaggtagggattggttttattactgtggaggttgaatggcagtataggactttgtagcagtagttgtgctttccgagatagcagtgatcaggagccctgtgtttgggaaactgatcagacagtgatgtgtagaagggactgagggagcctggaccagactgagggagcctggttcactcgggattgcccatgagtgacctgtagatgttttctttggcccacatattgccttaaaaatcaga

SEQ ID NO: 2957 - DNA, 6000 bp, Homo sapiens
gcactgggcatggtatcactgaattttcacagaaaacctatgaagtctatgatcctcattttacagatgaagaaactgaagcttagagaggtgaagcatcttgaaaatgcattagtcagaattctcctgaaaaacaggaccaataggatgtgagaaggttttatttgaagaaattggctcacacgattgtgggggcttgatgagtccaaaatctgatggggtaggccagcaggctggagacccagggaagaggtgcatctgctggcagaatccattcttgctcagggaaggtcagtctcaggggctgtagtgctgcagtgtccactttcaggtggtgcctgcacatcatgcagaaccacctgtaaaccagccctgagctttctcttctctacattaaacccaagtaggcctggcatttctcactcactcactgtggtctaccttttggtccatgtttcagtcaaccaacccatcagttatagcactaactccctgagttgcaacattaaatgcagaaatcttgctcaatcggcccctatcaatatattcagcctgattcaattttatgtttcttccatctttatcccacacctttaatttccattctcacacatattccctgaatttctgactaaataagaaaactcaagtagttcttttggagtgtagtatgcctcatggatcacatttcatgcctcaccttttgggactgctaggacttgagtctagttaaagttctagaagccaagaggggtaatgggggtgtgtcctgaggagaatcagcattgtcttgcgagacaactgtatcaggtgaggtcatgatagattccttaagcaatgaaaggttagttccctcaggtgggggtggagaggatatatctactggggtggagaaaatgcttctacgggcaaagatgactcattggaacttatgaattcaatgtccccagtgccatcaaggtctttccatatgcccccattccaactttcaggatccaattcgttcccaatcaatgccctcactttagaagtagacaacctgcaaagtcaaaaattcaatctgcactttaattcagccacttacaggatgtgattcggagttgatttttaacaatcttggctctgcagctataggagataagggtctctttcagggcagaaatagaaagtttcaggtcacttatgttatacttgagctgggaatttgaatccctgagctcatccttttcttttcccactttgtccagcaacattaggggcaaccaatctcattatacttgttattttggcaaatatgttataaagtatcatacgcatggtcacccagatcctgcttctttttagttttggtaatattttgtgtaattctactacttcatcatgccatagactatcaagtgttttatttactactggaaagtcattcctgtttttaatctaatcagactagagaaccacttccagaaacctcagaaccaattacaaaaatgcatccctaagattccgttccgcttgaaccacttctagtaccagaatctgtagctgtcagcgttctctagagacatggaatcaacatgtgggcatatacaaagacatttattataaggatttggctcacgtaactatacagactggctaatccaaatctgcagtgtaggccagcagattcaggactcaggaggcagattacatctcaaggcagttggctagagaattccctcttgcttgggggccagactttttgttctattcaggccttcaactgatgaaatgaggtccactcacattatggagggcaatctgctttactctactgattaaaaatgtttatctcaacccaaaatggccacaattactgttttaaatacatcaggttattcacaatgaattttgtaaggataaagaaggaaaggaatcacttggtagaaggaccaatagtaggcaaaaaaaaactgagaatttttttctatgataattacaatgttaatggggcttaaaaatgaattgatgaatatttaaaaacatcctagtttccacatattatatatttttcatattgtttttcacattaatgtaatccagatactagctgtggccttcctctctccctttgagatctgggcaaaaatgtttcaaaacctctgggttctctgcctgtataagtccaaagtctggttcagtatttctgctaatttattttctttttttttttttttttttttttagatagcttctcgctctgtcacccaggctgtagcacagtggtgcaatcatagctcactgcagccttaaactcttgggctcaagtgatcctcctgtcttagtctccccatttgctaggattacagatgtgaaccaccacacctggcctccctgctaatttccaacactaataaattctcacctcttctgcttctagaggtctgctatgttgcccaccccgtggtggttccaaaccacagtgaccccaactggagactttttatttgatttctacaagaaaaacccataccaagcctgagtctgacaggctttactggacacattgggccagggaaagtgtcacaatacttagtccatatcctcctgccgcctttcaagtttcttctctcttttacccactccttctctgagtgccaaaactccaattttagtacttctatgcaaaccaatttcaccacccaggtgaattagcttgcactccccaaattttgttactggactctttcctttgtaagggataagaatttagcccaagccagcttagggcaaaaggaaacttttggctgggagtggtggctcacacctggaatcccagcactttgggaggccaaggcgggcggatcacaaggtcaagagattgagaccatcctggccaacatggtaaaaccccatctctactaaaaatacaaaaattagccgggcgtggtggcgcacattggtagtcccggctacttgggaggctgaggcaggagaatcgcttgaacctgggaggtggaggttgcagtgaaccgagatggtgccactgcactccagcctggcaacagagtgagactctgtcttaaaaaaaaaaaaaaaaaaaaatttggctcacagaatcaaaggacagacttaatcaaactgcaggaagagagggatttaactggaaccagggaattaaccctgcttctctcattgcctactggcaacaagtcccaattcttatcttttagcgttcacgcactggaaagatgcagtcttaaatttcttatggttcaaagctcaaaaatgctggtaaggctgggtgcagtggctcacacctgtaatcccagcactctggaaggccgaggtgggcagatcacctgaggttaggagttcgagaccagcctggccaacatggtgaaaccctgtctcaactaaaaacacaaaaatcagcggggtgtcatggcaggcgcctctaatcccagctactcgggaggctgaggcaggagaatcgcttgaacccgggaggtggaggttgcagtgagcctggatcttgccactgcactccagcctggatgactgagactccgtctgaaaaaacaaaaacaaaacaataaaccctcccaacccgccaaaatgctggttaaggattctaaatggctcaacttggccagctgtctatccctgaactgcctatggtgtacatgttcctataacagcacctcccagggaaaccagaggggctgcttccaggtaaaaggaggaatttcaccatagacataatactttggaatagttttggctatccttaagtaaaacacgggatgactatttctctaatttccacactagtagtttaaacaaagtagtcatcagaccacagaggagggggcaataaatactgcctgtgaggtaactcggcgaaatactttcacagaggcctcatgaggtgagcatttagcatcgtgtgtgatgtgtgtcaaaccaagaggggattcagggagacttccaggcttgagcaaacggacaaatatacctcctcttccagacctctcctttcatatggaaaaaattcgtttgggaccaccagaaaacaaaagataaaagtatcgtgttagaacaaggatggattaaaaatgacctttgcttgaactgaaacagaagctatgtgcataagtgacttaactcctctgtaacttggctttcttatcatttacacgagggtgctaacagtaccctcacaaggttcaagtgaagattacataggacaatcccttagtcaatgtcttggtacactgtaaaggctcagtaaatgctggaaaatcatattagcaactattttatacccgtaattgtagctggaagattgtattggatgctaaataccggctagattccattcggtaactatcataattatttatttgcataacaatcaaattattggtgcaaagcagccattattactgtaaaatgctttaaaatgctccttttgatagtccaggtacgtactgcagcacaaaactaggagaaaccaggaaatggaagtaacgagtaagtttggatgcttcgattctaccctagattgagacgggtgagcatagaggcaaaaaaagacattttcttccaaacaagaggtgaccaaacgggcaagggagacctcctcccgggcatgcagagcgcagcgattctgtgcccagggagccggagggctggggctgggagatcccggcggagccccggcagagcagtcgcccgtgagcccccgcaactcagacgcgctcggcctcgcgctccggggctgggaccaccgagggcgagctgcagccttcgccacccggtccgccgccggactccgcctcccacaaacagcccggcaaggcccttttccgccgctccctcatccagcgaagcctccttcccagcttccccggcggcggcgccgtgacgtcacttccgttctccagcgcgcacgtgggaggaagtgctggtgccctctgccgctgctcccgtctctttggttacgctcgtcagccggtcggccgccgcctccagccgtgtgccgctatgggagtcccggcgttcttccgctggctcagccgcaagtacccgtccatcatagtcaactgcgtggaagagaaggtgaggaggcgccaggcggccgccacactcgagcccgggcccccggcacgtctaggccgcggcccatgggctccgccgcctgcccccggggagccttgccggagctcgcgccctgctgccagcctcgcgagcagtcgcagccccacacgcgatgggacgcgggctgtgggattcagcaccccgggggcgaggaattcaggaccctcggcggggcaagggcctatagggttccgaactcgcaggagggtcgctcctcccctactcgctttttcccggcaccggaaggccccgcccactgctttgtttcctctccagaccgcgcattttgggtctcggaagaggttcagaggctgttgttgagcaatgcatgccaggtcagctgagctagcgggttatggatgcacggattcggaggccagctttttgacaaccttgtaaaggaatccctggcggcgaccttttcgttgtttaccaattgtgccggaaaggttttctcctagtgttcaggaccatttgttgttctggttagattggacgctgaaagcagtatgtcaggtccaggatgagcgctatagaattctgagaagttacccttctctgtgtgccctgactactgaacggggtgggtgcttgttgaaaatttcaagattactggatgtacttgagcagtacaatttttgttgttagttaatacgtaagtagatttttggccattattgagttttgtttttattgttttcgtcattccatgcggattcgattttgtgctcttaattagaatttctggattggaaacgttcagaggcacatcacgcgtacctcactccttagtttttgaaggcagtgcttgcctgtcactgtgaacttatttctgcttttttttttttttttaacttt

SEQ ID NO: 2958 - DNA, 6000 bp, Homo sapiens
atacagaaagcaaataagcatctgaaggaaatgcaagttaaaaccacaataaggtaacagtacactggactacctaaaactaaaagggctaactatatcaagtgttggtgaggaagttgagcaactggaaccctgatatgctgctgatgccaatgtaaaatggcacaaccagtttgaaaaaaaaagtctggcaggtttttctttttaagtaatcacacacctaatatacaatccaaccatttcactcctaatgtttttcccccaaacaaatgcaagcatacgtccctacaatgacttgtacagagatgttcataggtttctttttcagaaagccaaaaactggaaacaatcccaatgttcatcaatcatctgaataaataaataaaatgtggtgtatctacacacagaatactatccaaaaattaaaagacgaggcaggcagatacttgaggtcaggagttcaagaccagcctggccaacatggtgaaactccatctctactaaaaatacaaaaattagccgggtgtggtggcatgtgcctgtaatcccagctgcttgggaggctgaggcaggagaattgcttgaacccagaaggtggaggttgcagtgagccgagatcgcaccactgcactccagcctgggcgacagagcgagactccatctcaaaaaaaaataaaaacaaaaaagaaataaactactgacacatacaacaacggaagaatttcaaaataagtatactgaatgaaagtaactgaggcaaaaaatgagtatatactatataatctcatttataaaaaattatagaaaatgaaaacttatcatacggtcagaaagcaaaccagtcagtggttggcaaaagacaggtggcagggagggatagtagaaaggaactacaaaagggcagaaggaatgttttagaggtcacgttcactgtcttggttgtgctggtttcacagatgtatgcactgtattaaattatatactttaagcccaggactttgaggctgcagtgagccatgattgcacactacattccagcctggtgacagagcaagacctcaactcgaaaaaagttaaaagaaaattgtacactttaattacctgcagtttattctatgtcaagtatacctcaacaaagctgcaaaaacaccaaaggttgggggaggtttcaaggaaagccagagaatgagagagaaaataaaaataaaaatacatgagtctaagaggaccagtatcctgagtctggaaagggaagaaaaaaaggtcaagaaatcatcaaacagcattccctaaaaccgaagaacgtaagactccagactcaaagagtgagccacgtactgatcaaaatgaatctgaatttaaaataacatctatacctgggtacctaataatgaaagtttacactatcaagaaaaagatctttttaaaatctaggaaggaaaactgatcacaaaagaatgaaagcatatgagcataaaaattaagtccttctggtttccacactagctctgacatttatcagctgagtgaccttgggtatgatacgcgaccctgctgtgtttccattttctcatctgaaataataataaacataacaataatcattatttttctgagatggagtctcgctctgtcaccaggctggagtgcagtggcgggatctcggctcactgcaatgtctgtctcccgggtgcaagtgattctcctgcctcagcctcccaagtagctgggactacaggcgcgccaccatgcgcagctaatttttgtatttttagtagagatggggtttcaccatgttagccaggatggtctggatctcttgacctcgtgatccacccacctcagcctcccaaagtgctgggattacagtcgtgagccaccgcacccggccaataaacatagtaattattataacataataacaatattggttgtctccaaataacgtgcttctattatttgtatgtaataaaaataattacaacagtagaagtcatgtggttgtgaggatcaaacaagttataataaagttcttaaaacaatggtaaatgctatataactgctggttaaataaatacatcacattaacaccgaacttgtcatcaacactactagatgagagagtacaaaagaacaatttctttcaaagttctgagggaacctaatattaaaactggaattcctggccaggtgcggtggctcatgcctgtaatcccagcactttgggaggcaggggctggtggatcacctgaggtcaggagttcaagatcagcttggccaacatggtgaaactccgtctctactaaaactacaaaaattagccgggcgtggtggcgcgcctgtagtcccagctactcgggaggctgaggcaggagaacggcttgaacccgggaagtggaggctgcagtgagccgatatcacaccactgcactcctgcctgggtgacagagctagactccgtctcaaagaagaagaaaaaaaaaacacctcgaattccatgcctagctaatgatcattcacgtgtataagggtagaatggagctattttgggtcctacaatgactcggaaatctcacatcccacacagcatttcttaagaattaagaataaggaggccaaggcaggcggatcagaaggtcaggagatcgagaccatcctggctaacacggtgaaaccccgtctctactaaaagtacaaaaaaattagccaggcgtggtggcgggcgcctgtagtcccagctacttaggaggctgaggcaggagaatggcgtgaaccccgaaggcggagcttgcagtgagccgagattgattgagccactgcactccagcctgggagacagagcgaggctccgtctcaaaaaaaaaaaaaaaagaattaagaataaaaactaagaaaacgatttaaaggaagaaagatgggccgggcgccgtggctcacacctgtaatcctagcacaagggaggcccagggaggcggatcacgtgtggtcaggacagagaccagcatagccaacatggcaaaaccccgtctctactaaaaatccaaaaaaaaaaaaaaaaaaaaaaaggccacgtatggtggctcatgcctgtagtctcagcactgtggaggctgaggcaggcggatcacctgaggtcaggagttcgagaccagcctgaccaacatggcaaaactccgtctctactaaaaaaaaatcagctgggcgtggcggcgcacacctgtagtcctagctgctctggacgctgtggcagaagaatggcttgaacccaggaggccagaggttgtagtgagccgagatcatgccaccgtactccagcctaagagacatagcgagactccgtctctaaataaataaacaaatgaagtaagatgatgatccagaaaacagtacctcccactgaagaaagatatgatagcaataataataataaaatcccagatgcagctttccagcaagcctacagaatagccaggtgtgacagcaacaaaaataaataagaccccaagaaggactattcaagaagaaagatgactcttgatagactacctggtaaaatagagtccgggcgcggcaagatgtaaagtggaaaaagaaagacagccccagggaaaaagacaaaagcagcacaaaaaacaaaatcacagtacataacctgaatctacacagtgtcaatagtcaactatcctatctgatttttcagcattttaaatctgtatagtcaaagccctgatcatttaattttggatgcccacaacgcaaaagtacagctgacaaacttgaggtgaaagggaagaaaagctaagatcgaccttagaaagcattgagtcaagggatacgttacacaggcgatggaatgaaaaaggcaaattacttagttataaagcttaccaataaaaatatatatctagtgatttactccattaagagtatagagggagggctgaataggtgactaaatcctctcctattccagctagaattcaacagatctaaaagtgataacgtataagtatgatacttagagacagaaccaaaacagttaaaggtggagaaatgggatgagaaggggtagagcaagaactgttgctttttgtttaacccacgtgcaagtaaagttcaataaagttcgattaaaattttacaaaggaaacaagtattcaatttagcagttgctttttgaaaaaaacaagaaatagtgggaatgtcactaagacaaggcttttggttcctccttggatagaagccaagaaagttaaaaaaaaaaaaaaaagcagaaataagttcacagtgacaggcaagcactgccttcaaaaactaaggagtgaggtacgcgtgatgtgcctctgaacgtttccaatccagaaattctaattaagagcacaaaatcgaatccgcatggaatgacgaaaacaataaaaacaaaactcaataatggccaaaaatctacttacgtattaactaacaacaaaaattgtactgctcaagtacatccagtaatcttgaaattttcaacaagcacccaccccgttcagtagtcagggcacacagagaagggtaacttctcagaattctatagcgctcatcctggacctgacatactgctttcagcgtccaatctaaccagaacaacaaatggtcctgaacactaggagaaaacctttccggcacaattggtaaacaacgaaaaggtcgccgccagggattcctttacaaggttgtcaaaaagctggcctccgaatccgtgcatccataacccgctagctcagctgacctggcatgcattgctcaacaacagcctctgaacctcttccgagacccaaaatgcgcggtctggagaggaaacaaagcagtgggcggggccttccggtgccgggaaaaagcgagtaggggaggagcgaccctcctgcgagttcggaaccctataggcccttgccccgccgagggtcctgaattcctcgcccccggggtgctgaatcccacagcccgcgtcccatcgcgtgtggggctgcgactgctcgcgaggctggcagcagggcgcgagctccggcaaggctccccgggggcaggcggcggagcccatgggccgcggcctagacgtgccgggggcccgggctcgagtgtggcggccgcctggcgcctcctcaccttctcttccacgcagttgactatgatggacgggtacttgcggctgagccagcggaagaacgccgggactcccatagcggcacacggctggaggcggcggccgaccggctgacgagcgtaaccaaagagacgggagcagcggcagagggcaccagcacttcctcccacgtgcgcgctggagaacggaagtgacgtcacggcgccgccgccggggaagctgggaaggaggcttcgctggatgagggagcggcggaaaagggccttgccgggctgtttgtgggaggcggagtccggcggcggaccgggtggcgaaggctgcagctcgccctcggtggtcccagccccggagcgcgaggccgagcgcgtctgagttgcgggggctcacgggcgactgctctgccggggctccgccgggatctcccagccccagccctccggctccctgggcacagaatcgctgcgctctgcatgcccgggaggaggtctcccttgcccgtttggtcacctcttgtttggaagaaaatgtctttttttgcctctatgctcacccgtctcaatctagggtagaatcgaagcatccaaacttactcgttacttccatttcctggtttctcctagttttgtgctgcagtacgtacctggactatcaaaaggagcattttaaagcattttacagtaataatggctgctttgcaccaataatttgattgttatgcaaataaataattatgatagttaccgaatggaatctagccggtatttagcatccaatacaatcttccagctacaattacgggtataaaatagttgctaatatgattttccagcatttactgagcctttacagtgtaccaa

SEQ ID NO: 2959 - DNA, 6000 bp, Homo sapiens
gccttgaactcctgggtgcaagtgattctcccgcttcagcctcccaaaatgctgattacaggcatgagccactgggcctcattctactttcactgttcttgagaacagcttttttttgtttgttttttaaactttactgtgcacttttgcaaatgaattttgttctaaaatttttacaggttttcttgatttgcttgctgtttgccctcaggatcatttccaaaggctttaaatgtttttgttttaaaagtaatatttaccagtttcactggggagcaggtcgttgaagctcttcatgctgtcatgttagaataaaatcttctgataagactttatttagcaaatgatgatcaatgtcacacaccttgcctattttgtatcctctgtagtacctgatatagaccttggtacacatcactttgaatctagtgaaattacaattaattagtctaacatactggttaaggtaccatctctgagtcatggttttaaatcctagttcctgaatctatagtagtgtgactttggaaaagccacttaacctctctaagcatttgtgttcttaattgtaagtgggatactccagacctcacaaggttgttgtgaggatagaatggaataatccatgagtaaaagcccttgtaacagtgcttatcacgttaagtgctccgtaaatgctagtggtaattattagtcctcattcactaacgtcgtataaaaatgaagatctaacacacgtacaacttgaaaaaatactaatcacccataagtgttaaaattgtcttattataggttgaatttttaagccaaaatactgtaatttcaatttttcattagccctttggccatttctctctaaaatatcacccatggtttgaatttcttttcatagttccaagcttctttaagggaaatctgaaactgagttgtatggtttggcatatgacttccatcagtgggatactcctgttgccctggaacctcagacatgattcatggtttttctaatgttcctgttaaatcctttgtaggtttaaacaaaaacaatgcatctactgagctattggtggtggtttctcctcataaggttgactggaacagtgggttggcatgaaattcattttagggatatacttcaaaacctgtgtaatgtatatttatacaaacattatttgtatatttgtattatctttacttctttaaataccttctttatcttgatttcttggcattttcatgcacaaatataatgatatcccaactgcctatttggaataaatatatcccctgctttatccatgaagtcacgaaggagcaggcttcctactaggcagagctaccttgactgccagccttctggtaggggtgctctctgttccttcctaggcattgttactcagccagggcactgcactgcctttctaacctaagccttcacattctctgggagcttctgtctcaagttgcctggttcacatgggacctgggtgggtgaagggagaggagagggcaggagttgacccatctggctgttgctgtgactggcgctgatgaatcatccagaagctgtcccttgagcctcctctctgggcctagagccctcttgtgttagcccacctttggcagcatatctcttctcacatgttggaggtactgcactccatcttcagttagggctattggttgcccatattttaggtatcactcatcatttctcagccacaaattctggttttccgccgtagttatacagtagatttgtttgtttgtttgtttggtctttcatgtggtcttggggtagaaagggaagactgcagtgtgtgttcagtctgtcatctggggaatccaaaaaataattaaaagtcattacttgaaatacattggttttagggttcagagtggctctccttttagctgccctttgattaaggatctctctttaactgaacaggaaacgtgttggtatagcattggacaaggttcttgaggagtcagttctttgttgagcatcagagtcttctcttgatgaaaggaattctaaagttacataataagtgtgttggacatgtctacagtactcttgaggggaaaatatattcagttttcttactgggaatacctggagctcttttctcaaaattaggacccacctactccgtactttattttttttcctaggtagtagaagtagaaattctcatgtagctccactccatatgaagagctgtgccttttcttgtgctaggcactagggcagggattagcctgctggtgacgtcctgtttttgtgagtcaggttttattggaatacagccatgtccattcatgttgtgttgtttatggttgctttcactcttcaaaggcagatattagttgttgcagctgagatcatatggccagcaggtctgaaatatttactgatttttttcctggagggcacaaagaatgagttttgattttcctgagtgtggtgggccgttggacaggatgaaggtggatgtggactttggggtgtagaggttagatgaagaggcagagagcctcttgccatcatagagtttgttttaattttggggtcatcaaattatctttttctatagactccacccacccccccaagaattgacctgcttttttctttaccacttattccactcactgttcctgatcaagcctttttttcttgattcacagcatgtatgtacagaagattgtctagtagcttcttctctgttctgccttaaatcccttttgttattctttccctccaattctaagtgcaacttgaagcccagttgcattcccgtgattccttctcaaagacagtcaatatcctgaagttggtgtttatcattcctttgcttttcaccatgctttcattgcatatgtattcgtccctgagcaatattgaatgctgttttatttattcataactttctgtaagtggtatactgtatatgttctttttttttttttggcctagtatgtttgtgaccatctagctctagctcttccaatctcacttgcatctcacaagtatatggatgttatatgagcttattcttttcctgatgggcttgtttcctttcctctaagttgatctgtttacttgtttaagagatgagatcttactctgtcgcccaggctggcatacagtggtgtgatcatagctcacggcagccttgaactcctggcctcaagcaatcctctcacctcagcttccgaagtagctgagactacccgcacataccaccatacctgattttaaatttctatttctaacagctttattgagatataatttgtgtatcatgaaattgacctgctgaaagtgtatgattcagtggtttttagtatatttacagagctgtgcaatcatcactattatctgattttagagggtcttcattctcaaaagtaattagcagttgctacccatctccctcccctgtctccaccctcacctgaagcaaccattaatctactttttatatttgcaaacatgtctattttagacttttcatataaatgggattgtatagtacttggtacttcatgactggcttctttcacttaacctaatgtttttgagcttcatccatgatgtagtatgtacatgatgggcttttaaattgcttacagtttttgctgttacaagtgatgctttatatgtgcttgaggaactgttatttttttaagtgacttttattgttaatagtaaaaattagatctcatagtcttaatctcttgctgaggctctggaagagaaaaacaaaggaagtaacatttacaaaaacataattgagtatctctggcagtgagtaagcccttatcttttgaggaactcaatgtagctggggtagattgactaactgtaaaacagtggaagtgctacaagtgaataagcaaaattatgaggaaattcagaaggaacaatttcttgggagatatgtacaaggtgttataaagtgagtgacatttgatttgagtgtagaccctggaaattagtaatttttcaggaagtgggtgttgacaagggaggaagaaggtgttctgaaagaagcatcatgtgacggcattgagagatcaaaaggcattttccaggaacttacaagagagtgagtgggcttcaacaatagtatggcaggataggagactaggaaggctccaggctcattgataaacacctgctgtgagaatcattagaaaaattaggtaagattaaggacgtacacttttatgttttagaaagagaactctgacaatgcagaaagtgagctggagaccagagagtctagaggtggggtagactagatgaaggttgttgtgctcttttaggttagagatggtaacttcttgttgttcatggtggtgggaatgaaaggagatgaagtaggtaagcattttttacgttactttgacaggacttactgatgtgagtggtgagggaaatgaattttaagatgactcccatgatttctcacttgaacaacctgaatgatttgtgaattttctaaacatctacattgtcaaaaataacttgtgttagaagccatccactttctacagataaaatatctgcttcagtttgctttaaggaataaaataacttattataatttaaaggttacttgaagtgttttatttccagttcagaaatgaaacacaagttcatattgagcctaggatctgtcatttttagacttgaacaatcaaactactattaattatcacttcctcatagccaaaagaatgcaatggtgtaaagattccagttgatgccagtaaacctaatccaaatgatgtggagtttgataatctgtatttggatatgaatggaatcatccatccctgtactcatcctgaagacaagtacgtaacccatttttgtcactgatatagcaaatcacagaggaaacattatattatattacattgtttggttgtcattatagaccagcaccaaaaaatgaagatgaaatgatggttgcaatttttgagtacattgacagacttttcagtattgtaagaccaagaagacttctctacatggcaatagatggagtggtaagtgctaaaataattagaagcctccattttgtttttttttgctgtgttaccagtgtctagaatgaaagtcagctaaataatgaaaaatgttgacagtgatgaacttgagaaagaaagcctcatccttcagtcattcattcagatgtttttttgtgtgtgtgttttgtgcttattttgtgctcagtactgtgaaatactggggatgttggcgactgcccttgcttttgaacttttggcttactgtcaaagggaaggaggcatagataaatgggtgagcttaattatttataggcattataagcactagataatacatgcagggtgttgagggaagaggaagtcagtgctactaaggaagttaggatatagagaagaggtgacttttgttccatttctttaacaatgaagaataattgggagattggtgggtggtggtgggagatggatgggacagggtttggggagggaggaccttccagatttctcaaatgtggcaggtaaacacactttccgtgcctttgaccacactgacatgttttggcaactacaggtggtttgaattgagaagggaagtatagcaaaagcttgagaaagccttaccgtctggagtttggactgtatcctataggcaatgagtagtcatgaaaatgatttgagaggagtaagttactgacctatgataataataccaagtagctccttttataaatgaccagcaaactctattaggggggtaaggtaagatataactctaaatttatttagctatctgcaagtagattcttttaattttagtgcatcctagcggctaatgggatgattttggaaattcagagaactttgaatccaagaagattaacttttctgtgagattcgtcttactcagtgaaaaaccttagctacctgataacttgctaagttgcagttaga

SEQ ID NO: 2960 - DNA, 6000 bp, Homo sapiens
agtacttatggttccttcaagtttggaggggttagggtgggatgtcttcatttttgcagttccccaaagccttaaaattcctggtggctacatgggtaggaactgactaagcctcagagaaaaggaagatcagggagtgttgatgccagttgggactggttctctcctaccacacctgtgtgtgaggtagggtatggttgtagcaggtttgtttggtgttctgctacttaagggggtataatagaccagaaaagccacagtgtcttggctccggataattgcactctgcagttgaaaaaggatgccatagtatagccagctcaggcctgcaattacaataaattttatattacttgaattttgctggaagtgtacaagtatatagttcctttagctgcaacttgtaattaagactctaaaacctgtttgtatttataacaatgtttctgattttaagaatgtcttttttttgaagatgtgatgaaatatacttgtttcttgagaagcagctaatagtgatagagaggaaaaaataggatttttatattcctctacctgataattgtatttcttatcctgtaaagctgtgatgaactcggcattttaaatttcatttttcttaggcacctttattttaggaactgttatcaaaaaatatggcctctaactggtgtgtgtgtgtgtgtgtgtgtgtgtgtgtgtgtgtgtgtgtattctcttacagagtgaagaacttcataatttttatgtaacaatataatatcttttgtgtaccatatattgttttacagtcttattaaaacataatttaaaaggctgagcacgatggctcacccctgtaatcccagcattttgggaggccgaggacggcagatgactggaggtcaggagttcaagaccagcctggccaacacaatgaaactgcgtctctactaaaaatacaaaaattagccaggcgtggtggcaggcgcctgtaatcccagcttctcaggaggctgagacaggagaatcgcttgaaccccggaaggcggaggttgcagtgagccgagattgcaccactgcactccagcctgggtgacagaatgagactctgtctcaaataataataataataataatttaaatttgagagatggaatcttattttcttcccagtgagggaacatttttcctcggatgacgagacttcactttcttttgtagtggaactttttgtttttgttgttctggcttaatgttgagtaatttatctcactttttatggggagaacaaaacgttgcctcttttctctaggtggctttcttcctccagaagaaataaaagaaagatttgacagcaactgtattacaccagtaagtagtctcatactttgctagctattgctaactcttaaatgataggttaatttatttctttctatcattttagggaactgaattcatggacaatcttgctaaatgccttcgctattacatagctgatcgtttaaataatgaccctgggtggaaaaatttgacagtaagtttcacattttgatacttcagaaagattagggtgatcattcgaggctgtactttgatatgactgacattatttatccttctgccctgccccataaaatgctagttgactgttggaagaaagaaaagcttccagggtttttggagatggggtatccttgcatggttaggttttagatagctgaattttctcttaaagccaattttgtcctcttaccatcactatgaagctataaaatgggattcataatttaaaaaatatatataggaaagtaatttttaaatggaaatttccattattacatatcaatatacagcaaaattagtaagttgtggggctgtcttaaatggctgtgttcccaaatatttaaataatatgtaaatgaacttgtttgtaattttaggttcataagctggcttccctattaatgagaaatggtaaattatattttatagatatgtgttattgattattcttggggcatatatggttcagcactatatccttgcatagtagtgaaaataggagcttgtgaatgatcagtttttctgatggctaggtctgacccagacatttcattcctttccattacatgtagtaagtcaatcaatgaagtggttttggtgtctctcacacacacacaccccttctttattcagaaaattttcagtgaagtagttttggtgtttttcacacacacacacacacacacacacacacacacacacacccttattcagaaaattttcccgtaacacttatctcagtttttcttgagacatataattcttttgatttttgtgcctatagaaaattggggataatctgaaagtgttaacaatttttttataggttattttatctgatgctagtgctcctggtgaaggagaacataaaatcatggattacattagaaggcaaagaggtaaagcttacttaccaatatttgattatatgttctatttttaaaaagccattgcatagaaaatacttggtatgaagtgatattcttgtggtatataatatattaatataaatacatgtttctctcttgtttagcccagcctaaccatgacccaaatactcatcattgtttatgtggagcagatggtaagtttcttctttgggatttgcttcttttggattaaaccatagcaagttgatgggttggtgtgcagtaatggattattcatggttacctggaagttccaaaatgccttggttattttatgttcgacagggaactagtattgagttgctgtttaatctgtggtcaatgatctttaatttcttttcttctttcttacatttttcaaccttttaactccccatacctttaaaatggagaatttcccaagtgtttaatccttagtggcagtctatgttgtaggtccacgtatctagaggacttcctgttaactgggaaatgccaggaagtgtcaagctttggggctttgctgctcatttgggtgctcatttgggcttttctttgtgttggcatctcatagtagtttatggtaagacttctctcagaatactcactgttcgatgtttttctcattgttgattgatagctgatctcattatgcttggccttgccacacatgaaccgaactttaccattattagagaagaattcaaaccaaacaagcccaaaccatgtggtctttgtaatcagtttggacatgaggtcaaagattgtgaaggtttgccaagagaaaagaagggaaaggtaagaactttgagatggtagttgcctcattaaaaaaaaaaatctattgtggtaaaatgtatatgacataaaatatcatttcaaccattttaaagtatacaattaaatagcattaaatatttgagttaccttgtttttaaaatggatgaagagaagattgtggttgattagttctttatgtgcttgttctgttaccgttacccttcacagagatgtatcttttttcttttttttttcttttgagacagtctcgacagagacgaatcttttaaagtactttaaaataaacctgcattcaaaaacatgcacacactcatcctttctacttagcactttttctgatattgcctatatctacacgaggcttagttcccatagataataatgcccatagcttgtaatttgtttgtggaagttatttgtttgaaatactcttcttaaaaggaactacaacttcttaagacttttaagttactcccactttttatgtattttaggttcacttggttatgtccagtcccctttaaaggggcttctgtttcaataatatggtgcctcttgagtcatatgctttttgaggggggaaaaagaatatggtgcctctttcaaagacatcgttaagtgaaaaaagagataaatatagtgtattatttcagatatgtaatacaataaagacagtatacatgtatctatgcacatctgttcacaaggaaggggtaatcattggttgggtataggtcatcagttggcaaacttcaatcctccaggtttggcctgtgagctatgttttttacatttttaaagtgttgttaaaaacaaaataaaacatgaaagactattaaacagagatcatatatgtcccccagtagccaaaataatttactgtctggccctttgcagaaaatgtttgctgacccctgatctagacgtggttgattttatgggtaatttttattttaaaatgcattggtgagcttttaaaaattaaatacttgtgatattaaaatggattgtgcgttagaaaaagccttaaaatttgcttggttggaaaaaattactggacgtagagtagacttgtttcatcttcattcctgttcttgcagcatgatgaacttgccgatagtcttccttgtgcagaaggagagtttatcttccttcggcttaatgttcttcgtgaggtatgtagcaataatcattgaaatcagcactctaaagcagggtgcctttgatagctgtaatggcagcattcctttttggttgtagtatttggaaagagaactcacaatggccagcctaccattcacatttgatgttgagaggagcattgatgactgggttttcatgtgcttctttgtgggaaatgacttcctccctcatttgccatcgttagagattaggtatgtgcatttgtgtagcttttcaaacgactgttttaggcttcttgactttactgtgcctactggtcctaatgcataatgtttgtctcttgctgacagggaaaatgcaattgaccgtttggttaacatatacaaaaatgtggtacacaaaactggggtaagttcattcttgaatgatttcaaaacagaagtatttgcttttataagaagatcattttacatatattttatcacttacagggttaccttacagaaagtggttatgtcaatctgcaaagagtacagatgatcatgttagcagttggtgaagttgaggatagcatttttaaaaagagaaaggatgatgaggtaaagtgtttctattgcagtagctaaaattgctcctgtctctaataggctatgatgatcctgtgattacttttaatctctttgagtgtgtttttatatcattatggtgtgtcaacactaatgtaatcatgagtggtcagtgctttgattattttataaaggttgtgctgcttgctctgtggaactatgtattgtaccctgtttgagttgcattgtaatgttttttctgtcttcataatctgaatataaatccaaacacatttctaatcaataggatttgaaatgcgggtaccaaggctggaagtctattgggattgaactagtggctgtcatgttttgaaggcaggaagacaggttaagaagaattgacaatgtagggagtgtgggttggattatatcagccagggcagagggttgggagaatgtaggatctgtggagagctgaatctcttaaaaaattgaaacacaagaaggaaataaaatagcaaagcatttgaaaattgattgcatattatggatgagcgcttacatgaaaagtccaggttctggcttgggcagttaggaatttgctggtgccatttactaagatagcaagcactaggggtggaatgggttggggtggggacaaagtaaaaactgagtttcattttggagatgtttaatgtgagggggctgtaggacacctgagaggagaaaagtccattaagcagttgaatgtgtataaagctcagggcagaagtcttttgaagagatttgagaaccattaactaatggaagatacttgaaactatgagtgtactatgagtgtgaccctgggagcttgtgtggagtaaaagtacctttaatagaagcctagggaaccacggacatttaaagagaaagaggagccagttatagagaggtagaaggaaattcctgaagagatgggaagccatgctcaaggggtcacagtgagatggacaggcacttcgtccgtggacagggtttgggatccactggtg

SEQ ID NO: 2961 - DNA, 6000 bp, Homo sapiens
tttgaaatattaaaccaacatggcatttctggagtaaacctaatttctggaatatatcatctttttatatgtcactacattctatgtgtcagtgtatggtgggatttttaaaatctatgtattatgagagagattagttttatttcccttttttggacgttctggggtagggtttttctggccttataaaacaaattagaaaatattttctacatttttgttctctgtatgggttatcgttagattgtcgtcatttcttaatttttagaagaattcagtggccaagccagttgggcttagagattcctttatgaaaaggttttcaattatagattcaaattttttagttctggcttttcagatttttcggtaattcttatgttggttttggtaagttctttttttttttttttttttttttttggtgggaatgtgcccattctaaaatttcaaatttattgccagaaatttttcataagatttttaatgactgtaagacttcaaaattaagtgctgatactggtaatatatagtcactcttcttttcttgattagtgttgctagaatctatttaattttttttttttgagaacctatttaattttattgtttttttttcctcccattgaactaacctttagctttgttgatatatagatatttgttcttttccctccatgtacatttgttttctattgatttctgcttttgtcttcattattctcttctacttttttgggggattaaattggcattctttttccaagtttttgagatggagacttaggtaatttatttttggtcttttccaatatatgcacttcagtgttacagatttctctctaatcactttagccttatcccacaaagtttggtctcacatatttattatcatttagttcatggtattttctgatttttattttttattatgtacccatggattatttagaagtatattgcttaattttttttttaatttatagggcttttccaataatcttttaaaaatatatttatttcttaactgcaggctaaatttctagaaatggtattgctggatcagaaggtatggtgaatttctagacttttggtcagtatcaccacattaacctctaaataagagtataccaatttgtacttcctacaatagcatatgagaatgtctaatatcccactcccaccaataccaggtgtttttatttatttatttattttttatttatttatttatttatttatttgagacggagtctctctctgtcgcccaggctggagtgcagtggcgcaatctcggctcactgcaagctccgcctcccgggttcatgccattctcctgcctcagcctcctgagtagctcggactacaggcgcccgccactacactcggctaattttttgtgtttttagtagagacggggtttcaccgcgttagccaggatggtctcgatctcctgacctcgtgatccgtccgcctcggcctcccaaagtgctgggattacaggcgtgagccactgcccccagccaccaggtgttattttttaaaagttcttggccgggtgcagtggctcacacctgtaatccaagcacagatttaaccaggcgtggtggtatgtgcctgtagtctcagctactcaggaggctgtggtgagaggattggttgagccccgggagtttgaggctgcagtgagctatgatagcccactgccctccagcctgggtaacagcaagaccctgtctctttaacataaaataaataaagttcttgctaatttgataaggaataatgtgtctttgttttaagatatgatttttcaatttctgctttggtcatatttttactgaccagtttttcttttgtaagttggctgttcttgtcccttgctgatttaatttgggcactagtctgtttgtttataaggttttaaaaactctagaagaattaaccagatacctctccattgtagaaccacaactctgtgggttaaggagagatgatgagggtctgaactacactggcagagtggatccaaagtccggaaggtgggaggaagggaaggctgaaagtctggataattgaatatgaagagtgaggaggagagggagaagggaatgaagagtcctgtgcgttcactgtgatgcctgggtgcttactgaggcctttcacagagtttggaaacccaggagggtgaaggaatatgaaagaatgtgatgagtgagtttgtgggggtcaaagtgcctgaaatactttagaggcatctgtgctaggtagtcataggagtcaggttcttgctcaagagagagaggatgtagttggagagaaatttggggattgtctgcatataaactagaaacataaaagctcaaaaaagagttgaatagattgatggatttcgattgctcttggttataaaaaaaaccttggaaagcttgggttaagagtttggacttcctagaaggcaaccatgtcatttcacaaatcattccctgatacttttgtaagaaatgtattggataaataattagcttcatctagaatggtcattaaagtatgataagttcaggcaaatgctgcagacaatgaagaaaggaaatctgatattttcctaatattctttaagcatagtccaacatatgatttgtcggttttttcttttttttttttttggtcagtcttgctttgccacccaggctggagtgcagtggcgcaatctcagctcgctatacctctgccttccaggttcaagtgattctcctgccttagcctcccaggtagctgggattacaagtatgcaccaccatgcccagctactttttgtatttttagtagagtcagggttttgccatattggccaggctggtctcaaatttcctggcctcaagtgatctgcctgcctcagcctcccaaagtgttgggattacaggcgtgagccaccacgtccggcctgtgtttttttttttcttttagtttactgtcattaagacttctgacatatttattttgtgatcttgttacttctagattcaatatttgtgtagaaccagtcttcacctatgtatcaatctttcatccattcatccacatcttgctataagaggaagaaaaacacaaaaggaagagagatagagggcaaggaaaagcatccttaagatgatttggacttggatggacgggattgtagagtgaatctaagcgccacatctctctgttgcttcctctggctatgagggcagagaggtacttttttgtccctagggagataggcttgaccaggaaggggacctggttcatttcacccaggctgtcacggcttcgagagcacctctccgctctttccgtccctcgacagaccggctgatctctttgaagtgatgttgggttttggtttgtgcttcaggaaccgctgatactgatttttatctgatcccttctctttacattttaagtgccagattttgaggggtagtattatccttttaaaaagagcagagattccagtgttttagccaagatgttttcttattttcttcctataaatcctgtatttgcctagatgcttacaactaaaatgtgtgttatttttctttcctatcctaattggatatgagtaataatgtcggttgtaaacctttaagatgttgagagtagttgttaaaccccccatccagtcttgttgaaactgtaagtttctgagcctcctgattaagcagcacaaaatcatgggtggttctcctctgcgtcttctgaaataaattaacatgaagtgccatctcaaccgacagcataaatgaatgtgaaactttgagattgcacagtgtagtagagagtggttacggggacatagcccctggcctcactctgtgacctctgacaggtttggtcattgccccagtttcctcatctcgaaaatagtacagaggataagaatatttacctgacaaaataaccagactaaatgaatttaagtagctaagcacttaaaatagtacgttgtacataataagtactgtgaaagtattaagtgataaaagatcatctttccttttatagaattttgaactttaaaatttagtcaaatagcttgttttagtaagattgagttctaagccatttattcagtctaaaatatttttagtatcataatcattttcttcgtgtagtatgaaattgcactcaagaagggccatttggtcaaactgacaactgtcaagtgtctgctgtaggtatttcttattgttggtgtttgatttgtctttgatgtgtcagttttggctgatgagtaattgtctgagtactgataacttgttggaatcgagtgtagccctgagtactcagtctgaataaagcatttggtttctgtagcccagagaaccttaaatgtgacttctcttcattttagtctgtaaacttgtcaattagccacgttgaaaagtgatttttgactagtgctatcagtaaacatggaatcttttctgtgattgccacgctgattaggtaaattgtcacttgagaagctattggcgaagcttggtttacatggccttagagctctagaaaagggataagtttttaaagaccaaaggaaaaaattttccactctcgcctgtaccttctgaagtgcaattcactgtctcagaattttttttcttcctctcaaatgggtcttctgttagagccatacaaatgaatgataataagtttgttttaccatctacttcattacagatcagccaggaaatacttctgctttatgaatacttccaggttatatatgttactaagagccatatgaagaaatttggttaaaaatagccttgaaatatttctttgagccttttttctttttggattgaaaacaaggagtgttttaacagttgcatcagagtttattgaaagttttggaaaatttgcttaggttttaacaaaaaactgtaatttttgtatgtgctgagtttatatggaaaaagaaaattgtcctggaggtgagagatagaaaatggaaaatagagaggcacctggcacactagaagtgatatattagaaatgtttgctgttttttaagacatttctagttgtataggttagacaactagttgtataggttagacaattatttcctcctccaaaaaaagcatttacacttagtaaactttacattccagttctacttagaaatactgctgtgcttaatctaagaatagcatgtttgagtctaatgaatatatattatgggtggtgatggcttcatctccattagcacagtttctaggacaaaatatacaagtttttttcccatctttatttttcttaaaacattagattgtttctgaaggtttctcttaatgtagctgtatctttgtattgtcttcattcgattttaaatttattagggagccactgtggaagctttcgtaagtaccatggagaatgtgtatcctgcgattataccatacataaaaagacaccaggcaagcacaatatggaattaagtcctaatggtaaaaaggggtatgtttccagggtaaccgcagtgattccaggggatgtgaagtagaggggtccggatgaatatttgctgtatttcttttgacttctgttacatttgcaaattttgtatatataagggcactaaaatgaaatacttctgggaacattttaactgattctcactaaactaattttgtacatgagctgaaaaagtggctcaaacattgattttactttcagtagattactttctcacaaatggtaactcattgaaattcatatatgtaaatgtatcttaagttttcccatagaaataaaccatacaaatgaaatgattgctattattgtaagaacttcttacttttatctcttcagaaaattgattttctgatagtgtatagtctgtagtaatgactcagaacttactctgggcgtagggtggggaactgtcttcctctgttttctgtggagtgtgtagtagtcagcatcctccacattgttactcggtttgac

SEQ ID NO: 2962 - DNA, 6000 bp, Homo sapiens
acctcaatgtcctcatctgcccagtgggattcagatttttgtgttacccagggatgtgggaggatgaagtgagggcgcgaggagaatcacatgaatgtaagggattattctcggggtcggggaggagacagggtggaagcctgtcttccacccaccaagcccacaagggtgcaaaggaagtggagggaggagctagggaccacccaggcgagcacacagcccatctgcagcataggagcatgttctcagcagctgggaggcccagccagagctggtagggcagccacccaggctgcttggagaatccggacattaaaggggttcctctcactgctctctcagtgcagctccagccctgtcacctccccaagcccccattttcaccctcctgtccgctcaacacatacacacgtatctcagaggaatgcactgcacttgcccctcttcacccatcctatcaccagagccacaggggctttcacaaggtaaacccaatcatatctgtgcctgctcagcaccctccagcagcttcccagcatatgagaacaaacccaatccccgtactttagtggataaggcatgatcccagccctcacctttaagaatctggcctcagagagaatctgccttaagtagaattctgactctgctcattaattcattcattcaaaattgtttatcaagcacctactgtgggagccaggcactgttctagacatttgagagacatcagtgaagaaatgaatgaaagattcctgccctcaaggagcctctcttctagcagagggagatgaacaataaccataagtaaattataaggcatgctgggaggtgacaaaagttatgatgaaaagaaagaaaaagaaaaactagagcagaggaagttgatcaggagtagcaggaggggcagaagttgcattttaaacatggtggtcagggcaggctccattgaaaaggtgccatttaagaaaagactgggccagacgtggtgactcatgcctgtattctcagcacttcggaaggccgaggcaagcaaattacctgaggtcaggagtttgagaccagcctggccaatgtggtgagacccctgtctttactaaaaaaatacaacaattagctgagcatggtggcacacacctgtaatccaagctattcaggaggctgaggcaggagaatcacttgaacccaggaggtggaggttgcagtgagccaagattgtgccactgcactccagcctgggtaacagagtgagactccatcttaaaaaaaaaaaaaaaaaaagctggtagatggtgagggaaggaaccatgtagacatcagggaaaagtgcaggcagaggcagcagccagtggaaagaccctgaggcaggaccacgcctggcttgtgtgagcagcagcagggaggtgggtgatgacccagagagggggacacttttccagtgaacaagacagacaaggtctctgccctggggagctcatgattacaaagcaaggtgtttagagaacaaagatggtatgggaagtacagagacaagggaagtccaaaaaactgtgggggcccagagaggactcttgaccctcaggaggaggtaaccccaagctgagcagtgggggatatggaatagtgacacgtgaataaaggcatgggagaaaattaatccagaacgatgggggagtatgtgcaaaggccctgagaatcccaccactggtcaccacccccactgctatctcttggtgcagtggccaccctctcctgcctagatgattatagcagcctcctcttgggtctctcacagaggggcaaagaagctagagtatacagtcactaacgactctcttttcttggtaggagttcacactcgtggatattaattcactgcattcccctctcaacctgcatccatgagcagagagaagcaggaagccacaggcatacacagcagtgtctgcaggtgacctctggggaggccctagtggattttgggtggggcactgccagcaccttccacagccctgtgtgctcaatgtctccttctcctctctgtcctaccctctccccctcactaattctattcaaatacactggctgttccctctgcctggaatgctcttcccctagatatccacaaggctcaccccctcatctcctccacacttctgttcaaatgccatctcctcaaagacaccctctctgaccagcttatctcaaatagcccctccattattccacctccaccttgtcctgtgctatcttttcttttcttatcttttcttttctccttccttccttccctcctttcttccttccttccttccttccttcctttctttctttctttccttctttctttctttttctttctttctctctttcttttcttttcttttttagagaaagggtctcactctgtcacccaggctgggttacagtggcacgattgtagctcactgcagccttgaactcctgtgctcaagtgatcctcccacctcagcctcctgagtagctgagacaacagccgcacaccactacatctggctaactttttaatttttatttttttggtagagatgggggtcttgctatgtttcccaggctggtctcgaactcctgggttcaagtgattctccactttggcctcccaaagtattgggattacaggtgtgagcccccacatcaagccgctatttttttggtagcactttttaccacctgacatatgatatatttacttgttttatgttgattgtttctctcaccagactgggagattcctgagagcagggaccatgtccagttttgctcatggcagaatccctatcacagggcctgggaagtcaatacataattgtgaaataaatggctctgaaattgaaatgctctccgagagtctttctgggtctgaccatttcaaagtcttggaaatgactatgattcccctccccaacatttccagtggccaggggtggcctctaaaggccagttaccgccaagaagctgctaatgtgggagcctccctcagcctctccccatccaggcccatgtggtaggggtcaagggtcaacctggtccagccctctgtgggtcccaaggtggaggagacgcagtgctggggtccaggccgagggatgcctggtgagccccatttctgctttggcaaacatccccctttccttctcagggcctgtgcctgcatttctgaaccagaaggtgtttatacaaaacatcctgggtttggcgacaaattcaccctcagtgaggaatccttaatgaatctccctccttccccacaccaggtggctgaaggaaaaattagctctgcctctggtagttgaaggcagccaatggctaggcaacatagaggtgctgctggggcttctggggccacaatttttggggagggttttttcagggtccggaaatggcatggacaccaggcactcctggcttgctgtgtgatgaggcactgcctttctcctggcctcagtctgcagctgtgaaatggggcagtaataatcccatccatacaaaggttgctttgacactcaagtaaggcaaggggtgtgaaggggcttggttacaagaggtcaaaaggagagaataaaacgctggaatcagggaggcgagacatcagagtgataatatcggttctgctctttagactttcaaagtcctttcccagcgccttttacagccatgtgggctcaatgcctccttccctctgacctcctgcctgcttcccccccgcccattctgttccacatacgctggctgttccctctgcctggaacactcttctcctaggcatccacatggctcacccctcaccttcttttcaaagccttgcctctctctgaggtttgttttttccagctatccaatgaggagtttgggcgtgaagacctcgtgggaaccctctggttctgatggtaaccattttccacctgcctgccttctctgggaagtcctcccaatcctaccacccacacccacctgcttttctgagctagcacttcattgcttactgcccatagttttcaagtcccttccttatgtataggccagctactctggacattgggcccaacacaggggctcaagtgaactctggttaaacggaattaaaagtgattactgcttcctttgttttttgagacagagtctcgttttgtcacccgggctggagtgcagtggtgccatcatagctcagggcagcctcgactccccagatgcaggtgctcctcccgcctcagcctcctgagtagctgggaccaacgggcgcgccccccctcacccagctaattttttttttttgtatttttagtagaaacggaggttttactgtgttgcccaagctggtctcgaactcctgggctcaagtgatccccccgctttggccttccaaagtactgggattacaggcatgagccactgcgcccagctgattcctgcttccttccgatcctgtggagagacactgaggcggatttttattcaccccctttttataaattagaaactgaaagtgtcagagattaaacataagtcacactgccacatgggccttcttggtgtttcttagccaggggaagaataatatttcccagatcctaatcactacctgccacggtatataattgttttgccattaattgtcggtgtttcccactaggatgaagttccatgagggcagggattttgttgtgttcactgctgcatcctaagcacataaaactgcttggcacataataagtgctcaagaagcatgaaccgagggagtaacgggtcagaggcagcccgaggactgagctctctgagcctgcagagggcgctccagccccgcccccaaagctaggccccgcctctcgcagccggctggcgcactagtgttagagcctgcgcaccaccgttcttttaactgcgcaggcgcgccggaagcacctagagagcggcgcgtgcgcagcgggagtcgaagcggagatcccggggtcgcgcgagagccgcaagcggagttggtgggcgctatgctatcacccgaggcagagcgagtgctgcggtaccttgtagaagtggaggagctcgccgaggaggtgctggcggacaagcggcaggtgagaggcccctccgcggcgctggggcctggcggccggcgccgtgggaaagcgcgcggggtcgcagtgagttgacctggacaggcggttaacggctccgaggcgacagacctgggccgataaatattcggccgctactaagtgagcgcctgcgctatgctggacattcctctctcttcatcctttctctgccccttgccatgctctgtggatctcgacccatcatgctctgggccgtttccctgagcacctgtttcaaaatgcacttcccggccccatggttgatctaggggcaccgccctgtaaaggccctcaggggagagctggaaccgaaaagaagcctgagggggccttgtgaccgggcaggggtggggacgtgggggaaggtggcgccctgtttatggggtgtcttgttttaagtgccaagtttttgaggggagttcctgggggaaggagggtgacgtaattggatttaggttttaaaaggatcccccctggctgctgtgtggaatacagaatataggtgggcaagggcggaggcagggagatgggtgaggggccattggtatggtccagaccagagatggatttggactaggtagtggtggtggagagaagtgaaggggtcagaaatgtattttggagacagactcagtaggccgtggtagtggagccgggggagtcgtgactccctctcatctccagttagaagggtcaggtatttactgagaaggggaaaacttgggcaagatcctgtcaaattaagtactggatcagggtgtgctggatgagaataagagcagttaaagtttatcagctacttactatgtgccaggtactgtgttaagtcatttaattgctggctcaataacctgtaaggtaggtactgtcc

SEQ ID NO: 2963 - DNA, 6000 bp, Homo sapiens
gagcccccactgttatatccacaaaaaagaaacaatcagaccccctagttgaatttgatcgctacattgaagatagtgtggtttcacaggaacagtaccttgtaacattgatagtcctatgatcaggtcttaaaacagctaaggaatgggtgattacatgaaaattattgcaccaggaatttgtggaaagcattctgagtaaatacagtgctgttagattaaatggattttaacatttaatgaaattgccagattatttttatgccaatatttaatattttatctagactagagagagatgaataatggtaatgcaaacattttagttcttcagaaataggggaagggttaagctagttttgtgtattttctatacaacttattctaaaatatgtcacttttttttttttttttttttttagcaccccagatactcgcccagctggtctggaagaggctgatcagccaccgttgcctggagaacaaggaattaacttggataactcaggccctaaactgccagaattttcaaaccggccaccaggtgataaaatgttagctagattatatacttattacatgtgcatgtggcattacaaggcttccatgtcttcaaggaaacaatagtattttattttatctgctaactagtctacttcagtgatttaatgtgtctggtatttggaagctttgccttgatattaagtaaaaatttcaaatataacttttgaaggcacatacacacacacattctattcaaatttgtctttgttattttaagtcctcataaaatcggactgaaatgtggttgggcatgatggctcatccacctgtaatcacagcactttgggaggccaagatgagcagatcgcttgagcgcaagtgttcaagaccagcctgggcaacatggtgaaaccttgtctctactaaaaattttttaaaaattagccaggtgtggtgacacgcacctatagtcccagctactcaggaggctgaggtgggagcatcacctgagcccaggaagtcgaagttgcagtgagccatgatcatgccactgcactccagcctgggaccctgtctcaaaaaaaaaaaaaaaaaccatgaaatgtgaagtgcctctttattcttgtcaatgtcaagattctagttggcatcagaacaggataagattaaatggagagatgatttcactctaatcctgcttgcctgcctttcctgcagcgtttcttcctggggcttctcaaagcagggaactaccagggtttaaaacaagatgatcttttttatagaagtttcattaatgagtctttaaaatataaagaagatataaagaataaaagagacacccatgtatctaccacataggttaataatttataataaataggaccaatattggaagccccctttgttgtatcctctctgattataaaataatactatcctttaaatgttgaaaaattatgtcaaagatggaaaagctcctaaaattaattcattcaaacctagatattatagaaccaaggccagctgccacaatatctctatacctggttatcttggcctgagcaatgacttgtaactttattcccctatgacacggttgaagatacacaacccttcacacttaggccactctcccctgtgtgtacagagggtatgttttgtttcttcctcactagttatttcaacttctttttggcatgaaaatgagagcgacattattttaggagtaacctttaatctacccctaatttatgtattttaaaattgaatccaaacaaaaagctaaatccatcatgatatcaatactttgtgttatttattacaaattatttgggcatatcacacttcccgtcagtgagatgcagcagcatagctgagactgggaggtcatcagtctttggggagtatgtccagaaggcattgagagcaggaacatgcctgcttgcctcagacacatctgaactcttcttataagaatcccaggggtctttgtatacatttattgccttctttctgcaaactgggggcctgcaggctgaatttggcctataatggttttgagttgctatgcagtgtcttaaacaaaagtccgagtttaaatgcctttaaatagggcatctgctctgcagtttggcactgttgacaggactcctgctgtcttataccagtccacttctattctctactacctgcctggcccctaaaggcataggagtttgcattccctgagtaataaattcagtttgtgattgtgttatgggcactatgtgtgtcctggctttccctcttcaccattctgtcacgtcagccccaatctgtcttatcattagtgccttttggactgctgcctccagcttctggactctgtagcagccatgcccttaactgttacttttgagaggctgctatattgtctatgctgtcctctttggtatttactgtctggtgggctgattttaaagataaaaggcatccatgtcataaccctgacatcaacaggcttttgtagcaattacaaatttcttaatgtgggaaccccagactgaatgtgaaaaataggaacccactgtatttgactatgtagtcgaaaggacagttgaaccatagaaatgccatgttattggctttataaaggtgaagaagttactcgggcctaaaataaaaaaggatttttttaaaaatcttcaaaactggattctacacattgtattcattgataccatggaaatctttggccagaagacattaattgagtgctgagtctgacccacaaaatttggtagctgctctatgaaaatgttgagtcagcatttcttttgactgccagagccagttgttcttattcctacaccttcttaaaacctccctaatgtactcttcatgcaacaatggaataaatctagtttgtggaactggaattgtatcccatatatgcccagctgtatgcccactttttcccacagaaccaccgttattcttggtttgcgtatctttttatcttttctgattgtaaggttttggttctaaaatgccaagtaaaatcttcacaaaaaaagagaataatttgagatgttgccctctgcatatctagaagacattgtccttcagagttcttttcccaaaattattttttattcctgagggctatgcttctgccttacttattctccagctgtggattcatggaaaatatttctccaaatagagatttgcatgtaagaaagtaagtgcaaattaatatccataaaaacttcaatgccctaattttattttcaatgtgtatatcagcttccattagctcctactgtttattaaactgatttacacctgaagggcaattttaattcagtcggtttcccccaaaggattaagcctgaaggatgcggcgtagtgtatggagccaatgaattggaataattttaaattcctctttcttaaggaactgaatcctagaattttatattttacttctgttgaaagaataaaaaggctgtcttcagtgctgttattttcaacaaaaccacatcttaaaaaaattattcctgtgctaacagaagaagtgaatcctaaatgctttacttcattcacaagtacattgaaatattgattatgactacatgagacctgaatcttgggtggccaggcacttgatgttgatggagtttttctcatttcatctgaatgtttggctggtatagacacagccattttcagtgcatagcacagaaaatcaggctcttagtacagtcatggctcattcagatcctacacaccgaggagctccaggttttttgatgctttgctttttgcttccttaagcactgtgccccttttgcttatgtcaagtaatgaggggctgccccctgccccaggagtgggcatgcctgagctgtttgtgcatagtctgtgccacctagatgagtattgcttggctatactctaaaggtagcaacattttcttgctgaaaaatctaacttccctaatttggggggcttgttttaggttatccttctcaaccagttgaacagaggccacttcagcagatgcctcctcaactcatgcagcatgtggcacccccaccacagccaccacagcagcagccacagccacaactgcctcagcagcagcagccaccacctcccagtcagccacagtctcagcagcagcagcagcagcagcaacaaatgatgatgatgctcatgatgcagcaggatcccaaatcagttaggcttccagtctctcaaaatgtccatcctccaaggggccccctgaaccccgactcccagagaatgcccatgcaacagagtggcagtgtgcctgtcatggtcagtctgcaaggacctgcctccgtgccaccatcacctgataaacaaagaatgccaatgcctgtgaatactcccttgggaagcaattcaaggaaaatggtctatcaggagagcccgcagaatccttccagctcgccactggcggagatggcctcactccctgaagcaagtggcagtgaagcaccatctgtcccaggaggcccaaacaacatgccttcacatgtagtacttccccagaatcagttaatgatgacagggccaaaacctggaccatcgcccctttcagcaactcaaggtgcaactccccagcaaccccctgtaaattccctgcccagctctcacggccaccacttcccaaatgtggctgcgccaacccagacatctaggcccaaaacaccaaacagagccagccccagaccctattatcctcagacacccaacaaccgccctcccagcacagaaccttcagaaatcagtctgtcaccagaaagactcaatgcctccatagcaggactcttccctccacagattaatattcctttacctcctaggccaaatttaaacaggggctttgatcaacaaggcctaaatccaacaactttgaaggccatcgggcaagcaccttcaaatcttaccatgaatccttccaattttgctaccccacaaactcacaaattagattctgtggtagtgaattctggaaagcagtctaattctggagcaacaaaacgggcaagtccaagcaacagtcgcaggtctagtcctgggtccagtaggaaaaccactccaagccctgggaggcaaaattcaaaagcccctaaacttactctggcctctcagacaaatgcagccctattgcagaatgtggagttgccgagaaatgtattggtcagtcccactcctctggccaatccccctgtacctgggagctttcctaacaacagtgggctgaatcctcagaattctactgtgtctgtggctgcagttgggggtgttgttgaggataacaaggagagcttgaatgtgcctcaggacagtgattgccagaattcccagagtaggaaggaacaggtaaacattgaactaaaagcagtccctgcccaagaagttaaaatggttgtccctgaagatcagtccaaaaaggatgggcagccttcggatcctaacaaacttcccagtgtcgaagagaacaaaaatttggtgtctcctgctatgagggaagcaccaacatcgttaagtcaacttcttgacaactctggagctcccaatgtgacaattaaaccccctgggcttacagatctggaagtaacacctccagtagtttctggggaggacctcaaaaaagcatctgtcattcccacactgcaggatctgtcttcttctaaagaaccttctaattccctaaacttacctcacagtaatgagctgtgttcatcccttgtgcatcccgaattgagtgaggtcagttctaacgttgcaccaagcatccctccagtaatgtcaagacctgttagctcttcctccatttccactcccttgcccccaaatcaaataactgtatttgtcacttccaatcccatcacaacttcagctaacacatcagcagctttgccaactcacttgcagtctgcattgatgtcaacagttgtcacaatgcccaatgcgggt

SEQ ID NO: 2964 - DNA, 6000 bp, Homo sapiens
cccttgaaccagggaggcggaagttgcagtgagctgagatcgcgccactgcactccagcctgggcgacggagtgagactccgtctcaaaaaaacaaaaataaaacaaaaaacaaaaaaaaaaccacacacacacaaaatttacttgtacattttaaaataactagagtataattgggttatttgtaacacaaaggataaatgcttgagttgctagataccccatttaccatgatgtgattacacatcgcatgcctgtatcaaaatctcatgtaccccataaatatattcacctactacgtacttacgaaaatttaaaaaatacatcagtgtagtgtgggaaaaaacagaaaatttttaaaaaagagtgaaagccagatatgaatccaggcctgtatgacagacatgaagtccagtgctgaggaggcctttctacgtttgggaagaggggaggggccacactcgttcgatcaataattctatttactgagcattttagcttgctagggaggtaatgatgggaaaaagaagagagggatttagaggcaaataataatgaaagcttttatctatatcccattaagcttattattagacagtatgtgtcaggcacggtgacaagtgctttccaagcccacctccatttgctcttcacaagcactatgattttccccatatttcagatgggtaaactgaggcttggagttgccatgtccaaggatactcagagcgctcgcaaaagactgtgcaatgtgtgcttccgaagtgggactcactggcgagagaatagccctggaaagccgacagagacccacgagatcccagcactaagcactcagcaccgaagggagctggcgcgcgctccacctcgcgctcccggggacgtctggtcacgtgggcaatgccccgcccctcgagtccgccccgccccctctcgcgctccctccctctctccctccctccccctccctccccggcccggtccggcccatccccctccccgccggctccgtgaggccctgccgggtcgggctgcgggcggccgggcgcgggcggcgggacagacgggcgcacgcgaggactgacggacggacgcaccgagggcggcgggcacgcacggcccgggccggcgctccaaggcccgcccgggagggccggggccgcgctcaggtgaggggacggcggcgcgggcccgtaaggggtgggcccgccgggcgtccgcggtccttgtcgggctggcttcgcggggaggaggcgccgcccgggcccgcgcggaaaaatggcgccgggcgaccgagtggcacggtctgagagcgggcccggcccggagccgccccgcccgccgcgcttgtgtccccgtcgccatgttggggagcgggccccaggcctgcgggcgggggcgctggagggagcggcggccgggctgggtggggagggtgctgggcgcgggggccggtgcactgagggagtgcagggctggccggggtctgcacggggtggcgctccaggcctggggaacaggcgggagccggtcgtggggtcgtggtcagggtcgcggagaaggaacactgggtccgaagggaaccgggattggggtctatgggctgagaggatggcaggacgtggaactgggttaggccttaggcggtgttagagccctaatgcaggtaggacctggggattggggtggaggcatgggggccaagctcaggctgtcagggctggagcagttctttgctgggagggaaggaggtgattgatgaggaatgagggccctttgggtacagacgctggttcagattggggcagtccttggggtactggggctgaattgcaaagctgtataactcccaaggctctgaagacttatgtcccaagcatcctccaccccctcttgggggaagcaacaggaaaaaggaggtgtttgatgagagaaaagggggacaaagggagactgaggtttgggtgcaggagctggccagcaaaagaggcacagagagtggaactggttggcaaggaaggagagaacctttatcaacttagggagttgtgtgtgtctttaaaaggagggacctggctgtttgggggcggtgacccaaggtgtcttccctggaaggggacagcccacagcttaagagcagagtcacctggagaggtcatcagaaaggcgttattgaagccagtaaaatggtgaagaagagtgaatgtataaaaactacaaaggcctgagagatcaagtaaagatttcaaatcaggtagtgattttagctgaaacatagaaaggtaaagttgacttttcaagatcttacaagttagtggcagaggggtactagaaattgtcggctgcttcctcactaaacacattgccttaaaggaatttgctagctgggagaaaggtgttaagaaatgaagcataacattcttgtgatgaaactaaaagcaaacaaacaaaaacaacaagaaatgaagcataacagtatataccagataactattaaatttgttttcttcctgtaatgagtgtggcaatacaaaggctgaagggaatacaaaaaagtataggcagccagttatttggtatttcctggttcatctctaattgtgcaaagaagttatctttgagaccttctaactttctagagttttaagaggtgctccggccagccacagtggctcacgcctgtaatcccaacactttgggaggccaaggtgggaggatttcttgagcccaggagctggcagaccccatctctacaaaagaaataaaaaaaattagccacctgatgtggcttgtacttgtagtcccagctactcaggaggctgaggtgggaggatcgcttgagcctgggaggtcaaggctgcaatgagccatgctatggtcattccatgacattcctgcctgggcgacagagcaagacactgtctaaagaaaaaaaaaaaagagagatgctccttctcttctaggtgtttaccacaaaggaacacaaaatcctaaaaaagaaaagtgaaaaattgtagacacccagagtctctattttattaattgaagttggatcatgttagagaagaattcaaagttcgcatgggctatgggagagttctgaaggaaatatgcaaattagtcatggaaaataggtccagggccccatataatcaaagagaattagcgaacaaaaatattatgcgggcatatataaaataaaactgtcaataccatatgtatatacagcaacacaattcatttgttctgggtttttcttttcttttcttttcttttttttctgtttgtagagttggggtttcaacatgttgcccaggctggtcttgaaatcctgagctcaagtgatctgcccacctgagcctcccaaagtgctgggattacaggcgtgagccaccgcgcccagcctattctgggtttttctaatgcaggaagacctgaccttatctgtgccatggacccctttcagaataatattttttaattgtataaaataaagtacattgaattataaggaacaccaattatattaaaatacagtttccaaaatatacaaatctaatatgcatatacttgtttatcagcacgttaagaaatcagatttagtgatggatccgataattataatttcaaagacatgatgcgcataaaggctacttcaagattatatgcaacaattgtagtatgatataaagatatttgagatttctgttgttacagagtcacagaactgctaatactagaatggtatgttacctacactcatatttgaatagaatggtaattttcagttaaaagttagtaaaagagatttttttctccctgtccaagttcacaagccccactgaagtcctatctatagactcctgtctatgaaccccaggttaagaaaccctactcctactgccaggcatgtcttccattcagcaaacgtttactgtgcctcaaggcatctactgcatatcaagcattatactgggctctgtagcttcagaagtttttaaggcagagtcacttcactttgggtatgcagccccatgagtgaagtagacatgtgaacaatcatagttcaggatggtcgatgccaaagaagagttattaaacgctataaggacacggagatgggtgtgtctgctcaaagaatcagggaaggtgttgcgaaggggtgacatttgagatgtgtcctaaaagatacaggaatttgccagtgaaatggagagaagggcctttcaggtaaagacacgttttcagggaatgtattaataactgaatgtggctggagcatagaatgtgtgtgaaagcatggccagagatgagactaggaagaccatgttaggaacctggttgtgaaggaccttgctaaggagtttggactgaatccttagctgagagaggcattcaagatcttcgagaaggggagtatgtggtggaggtttaatttctaggagataaatggatgttctttggaaggagggtagactgaagaccagagaggtaatgaggatctgaactaaggcagagactgtgggcactgagcagagttagaagtaatgaggatctgaactaaggcagagactgtgggcactgagcagagttagaagtaatgaggatctgaactaaggcagaggctgtgggcattgagtggagttagaatttgcaggtgttgattattgacattgtgagtggcttagggggagttttttaaatttctggtttggggtggtgtctgtcaaagaggtttaaaaaagtgaaaggaagtctgggcgtgttggctcacgcctgtaatcccagcactttgggaggccgaggcgggcggatcacgaggtcaggagatcgagaccatcctggctaacatggtgaaaccccatctctactaaaaatacaaaaaattagccgggcgtggtggcgggcgcctgtagtcgcagctactcgggaggctgaggcaggagaatggtgtgaacccgggaggcggagcttgcagtgagccgagatcgcaccactgcactccagcccaggcaacagagcgtgactccgtctcaaaaaaaaaaaaaaaagtgaaaggaaaatgaggggagaattctcattgataataagggcgaaaaggtttttttggcagagtaatagagttttggaaaccattgcaaagctgtcaagtgtggtgtagtttttggttaaggaaatcagaggtgtcagcagacataaaagacaggggaaaacatgggaagtgtcctacctatagtgtagaaaaagcacaactatctatgtcagaggtcgacagactgtggtccataggtcaaatctggcccacgatctgtttttgtaaataacgttttattggaacatagccacactcatttatttatatattgtccatatcttcttttgtggtaccaatagcagagttgagtagtcgtgacagagatgtgttgtgtcagctcacaaagctggaaatactctttacaaaaacatttgccaacccctgatctatgtgtttgagtgttggatgttcaacctctaatttgccatccaatgtctatatgatgatagagaatgaataaacgtcttggctctgccctttgggctggattacccatgctctgtgtacctgcagcataacacagacccctgaatatttatatcagtcagtgatggcaaggtctattgttctggagtgtactgtgtggtaactgtggtagtgccagctttacacggattagataatgctcgggcttgttttgccattttttttattgggttgtcttttacaaaagatttatttatatattctgattattaatcctttgttgttggtagatattacagatgtcatttcccagtttcttgcttattttaatttttttttttttttttttgagatgaagtcttgctctgtcgcccaggctggagtgcagtcgtgccatctcagctcattgtaacctccgtctcccaggttcaagtgattctcttgcctcagcctcccaagtagctgggactacaggcatgt

SEQ ID NO: 2965 - DNA, 6000 bp, Homo sapiens
tacgggcacacacgaccatgaccagctaatttttaaattttttgtagagatgaagtcttactgtgttgcccaggctggtctcaaactcctggactcaagcaatcctcctgccttggcctcccaaagtgctggaattacaggcatgagccatagcacccagtcttattgctgagtttctggaatctttgagagctttcttatctctagaagtctttgtgggtttggaaatatgtcagtgaggtcttctcagcctctgggctggctgttgtcaggacctctgtgtctgtaggatgaagtagccagagcttttcattcagtctttcaggttaattaatcaagtcattcattaattgtatctttatccaaaaaatcaccctttggctatgtcagatttccaggctaacacaagagtacaaactgtatggttctgtttctatggagatcaaaaactgtcaaagttaatctacggctgggcgtggtggctcatgcctgtaatcccagcactttgggaagccaaggcgggcagatcacaaggtcaggagatcgagaccacggtgaaaccccgtctctactaaaaatacaaaaaattagcctggcgtggtggtgggtgcctgtagtcccagctactcaggaggttgaggcaggagaatggcgtgaacccgggaggcagagcttgcagtgagccgagattgtgccactgcactccagcctgggcgacagagcgcgactccatctcaaaaaaaaaaaaaaagttaatctatggtgctagaagtcagaataatggttacatctgggggagcaggtatttattagaagagaacatacaaaagagaacaaaagggaactttctgggttgatagatctataacttgatctaggtggtggtaacacaggaatgtaggcaaaaaaattattagatatacacttaatagtttttcattttattgtatataaattatatttcagtttttaaaagttaaaataaaaagcttcagaaaagtttttttttccaggatattttaaatttatttggtgttaatttcataggctcaaaggtctaaggtgcccccctgttgcggttgcctgtggttctctttgctcctgtctgccctcttgggcccaatacctagtattgtgcttaggattcacaaacgcaacaaatacttactgagcacctactctgtgccaggtgctgtgctatatgctgagaaaacaatgttaaacaagatggataaggttttcttccttatggtgtccatagtctagtggcaaagacaggtaataatgactcagtgtattctactaaggacaagcatatcgtgctaagaaaacctgtgtgggaatgggtcagggaaggtatccttggagtagccccgtttgaactgggatctgaagactgagagttatctaagtggggagagcattgcaggcagggggatcagcatgtgcaagggttctcagaaaggagggagaacaatgtgtaagaaatatcactgtagttgcaacccagagaaaggggaagagggccctaagataaatctagagatgtggggaggccaacatttatttggtctttatcttttttttagagacggagtcgcgctctgtcgcccagcctggagtgcagtggcgcgatctcggctcactgcaagctccgcctcctgggttcacaccattctcctgcctcagcctcccgagtagctgggactacaggcgcctgccaccacgcccggctaattttttgtattttcagtagagacggggtttcaccgtgttagccaggatggtccgatctcctgatcttgtgatctgcccgcctcggcctcccaaagtgctgggattacaggcgtgagccaccgcgcccggcttggcctttatcttaagagcaatgtagagccatcagatttttttttttttttgagacagggtctcactctattgcccaggctggagtgcaatgatatgatcttagcttactgcagcctcaacctcccaggctcaggcaatcctcccacctcaacctccaaagtggctggggccacaggtgtgcagcaccatgcctgctatgtttttgtcttttgttgtctttttgagacacggtttccctttgccacccaggcaggagggcagtggtgttatctcggctcactgaagcctccaccttccagctcaagtgattcttgcctcatgcctcagcctcccgattagctgggactacaggtgtgcaccaccatgcccagctaatttttgtattttcagtagagatggggttttgccatgttgcccagactagtctcgaacttctgagctgacgtgatccacccacctcgacctcccaaagtgctggaattataggcatgagccactgagcccagccatttttgtattttttgttgagacagcgtttgccatgttgctcagcccggtcttgaactcctgggctcaaacaatccacctgcctcagcctcccaaagtgttgggattacaggtgtgagccactgcacctggccatcaacagatacttttaagtagagtagtgacatgatcatatttctgatcattagaaacattactctgacagcagggtggagaatagattagagggcggtcagggtaatgtgaaaagatggtgggtatctactacaccagtccaagcacactgtgtgtactcaataaatattgatggaatgaaagggttcctgactccctttcttctatgggatcagtaggactgatttgtttaattagtttacaatccacctgctcatcctctatctcctgggatgctcagaacagaccccaactcccattttacagatgaagatgctcaagttcagagaggcaaggacagctatcaagagcgaaagccaaagagagctgccatacaatccagcaatcccattcttaggtatacaccggaaagaaaggaaatcagtgtatggaagagatctgcactctcatgtttactgcatccctgttcacaacagccaagatttggaagcaacctaagtgtccatcaacagatgaatggataaataaaatgtacatatacacaatggaatactattccgccattaaaaaagagtgagatcgtgtcatttgcaacaatatggatggaactggaggtcattatgttatgtgaaagaagccgggcacagaaagacaaacttcacatgttctcacttatttgtgggagcaaaaaattaactattttttatttttttttgagacggagtctcactcagccacctaggctggagtgcagtggcgcgagctaggctcaccgcaaccaccatctcccaggttcaagagattctcccgtctcagcctcctgagtagctgggattacaggcacccgccatcatgcccacctagcttttgtattttagtagagacagggtttcaccatgttggccaggctggtcttgaactcctgacctcaggtgatccgcccatcttggcctcccaaagtgctaggattacaggcgtgagccaccatgccgggccaggagcgaaaaattaaaacaattgaactcatggagatagagaatagaaggagggttaccagaggctggtaagattaatggggaggtaggtgggaagtgggaatgattaacgggtacaaaagaatagttagaaagaataagacctagtatttgctagcacaagaaggtgactacagtaaaaaacaattggccgggcgcggtggctcacgcctataatcccagcactttgaggggcagaggcgggcggatcatgaggtcaggagttcctgaccagcccggccaatatggtgaaaccccatctctacttaaaaaatatacaaaaattagctgggcgtggtggcatgcgcctgtagtaccagctactcaggaggctgaggcaggcgaatcccttgaaccagggaggcggaagttgcagtgagctgagatcgcgccactgcactccagcctgggcgacggagtgagactccgtctcaaaaaaacaaaaataaaacaaaaaacaaaaaaaaaaccacacacacacaaaatttacttgtacattttaaaataactagagtataattgggttatttgtaacacaaaggataaatgcttgagttgctagataccccatttaccatgatgtgattacacatcgcatgcctgtatcaaaatctcatgtaccccataaatatattcacctactacgtacttacgaaaatttaaaaaatacatcagtgtagtgtgggaaaaaacagaaaatttttaaaaaagagtgaaagccagatatgaatccaggcctgtatgacagacatgaagtccagtgctgaggaggcctttctacgtttgggaagaggggaggggccacactcgttcgatcaataattctatttactgagcattttagcttgctagggaggtaatgatgggaaaaagaagagagggatttagaggcaaataataatgaaagcttttatctatatcccattaagcttattattagacagtatgtgtcaggcacggtgacaagtgctttccaagcccacctccatttgctcttcacaagcactatgattttccccatatttcagatgggtaaactgaggcttggagttgccatgtccaaggatactcagagcgctcgcaaaagactgtgcaatgtgtgcttccgaagtgggactcactggcgagagaatagccctggaaagccgacagagacccacgagatcccagcactaagcactcagcaccgaagggagctggcgcgcgctccacctcgcgctcccggggacgtctggtcacgtgggcaatgccccgcccctcgagtccgccccgccccctctcgcgctccctccctctctccctccctccccctccctccccggcccggtccggcccatccccctccccgccggctccgtgaggccctgccgggtcgggctgcgggcggccgggcgcgggcggcgggacagacgggcgcacgcgaggactgacggacggacgcaccgagggcggcgggcacgcacggcccgggccggcgctccaaggcccgcccgggagggccggggccgcgctcaggtgaggggacggcggcgcgggcccgtaaggggtgggcccgccgggcgtccgcggtccttgtcgggctggcttcgcggggaggaggcgccgcccgggcccgcgcggaaaaatggcgccgggcgaccgagtggcacggtctgagagcgggcccggcccggagccgccccgcccgccgcgcttgtgtccccgtcgccatgttggggagcgggccccaggcctgcgggcgggggcgctggagggagcggcggccgggctgggtggggagggtgctgggcgcgggggccggtgcactgagggagtgcagggctggccggggtctgcacggggtggcgctccaggcctggggaacaggcgggagccggtcgtggggtcgtggtcagggtcgcggagaaggaacactgggtccgaagggaaccgggattggggtctatgggctgagaggatggcaggacgtggaactgggttaggccttaggcggtgttagagccctaatgcaggtaggacctggggattggggtggaggcatgggggccaagctcaggctgtcagggctggagcagttctttgctgggagggaaggaggtgattgatgaggaatgagggccctttgggtacagacgctggttcagattggggcagtccttggggtactggggctgaattgcaaagctgtataactcccaaggctctgaagacttatgtcccaagcatcctccaccccctcttgggggaagcaacaggaaaaaggaggtgtttgatgagagaaaagggggacaaagggagactgaggtttgggtgcaggagctggccagcaaaagaggcacagagagtggaactggttggcaaggaaggagagaacctttatcaacttagggagttgtgtgtgtctttaaaaggagggacctggctgtttgggggcggtgacccaaggtgtcttccc

SEQ ID NO: 2966 - DNA, 6000 bp, Homo sapiens
cttcccagcagaggggcaaaaatggccctcatcgaggagcactgttgagcctctggggttctccaaaatagtgttttttctgtttttttgagatggagtcttattctgttgcccagggtggagtgcagtggcgtgatttcagctcacggcagtctctgtctcccgggttcaagcgattctcctgcctcagcctccctagtcgctggggttataggcacataccaccacacccggctaatttttatatttttagtagagacaggtttttgccgtgttggccaggctggtctcagactcctgacctcaggtgatccgcccaccttggtctctcaaagtgctgggattacaggcatgagcccaccacacccggccaagtgttttatgtgtggattagagcctggatgtgtgtttataccctggagtactggtacccatgcttcagaggaactgaacataattacaggggtgtaggaagtaaaagaaaagtgatcctttctctgattcattatgctcaccatcgaatgaaacttaagttggtgtgtggtgtggttctacccacttttgctgtgggtatgcaaacgtaaatatatatctttttaagaaaaatgggatcttcctatgcataatgttttacaacttaattttttttcacctaatagatggtggacatctttctatatcagtgcatattgactgatctcttttttaaaagctttgaggcggggcgtggtaactcacgcctgtaattccagcactttgggaggccaaggcgggcagatcacctgaggtcaggagttcaagaccagcctggccaatatggcgaaacccggtcgctactaaaaaagtataaaaattagctgggcgcggtggcagatgcctgactcaggaggctgaggcaggagaatcacttgaacctgggaggtagaggttgcagtaagccgagatcgcgccactgcttgcaacaagagcgagactccatctcaaaaaaaaaaaaaaaaaagccttaagttatatgactgattaatgaatatgaatatattcttgtaaaaatttttaatgacaaaagcccaggtgtggtgattcacgcctgtaatcccagcgctttgggaggccgaggcaggtgaatcacttgaggtcaggagtcgagaccagcctggccaacatgttgaaaccccatctctactaaaaatacaaaaattagctgggcgtagtgatgcacgcctgtagtcccagctactcaagaggctgaggagggagaatcgcttgaacccaggaggcagaggtttcagtgggccaagatcataccactggactccaacctgggtgacagagtgagactcttgtctcaaaaaaaattttttttccaacaatacagagtatatagaataagaggttaacttagtcccgctttaactctgtgtcagtcaggaaaagagaaatcataccagctaatttttttcccagctttattgagatgtaattgataaataaaagctgtatatatccaaggtatacagtgtgatgatttgatatacattgtgtaatgattaccacaaccaaattaatcaacgcatccatcaccacgtgtagctaccttgtgtgtctgtggtaaggacacttaagatctactcttttaccaaatttcaagtaaacaatccagtattattaactgtagtcaccatgctttacattagattcccagaacttactcataactgaaagtttgtgccctttgaccagtatctccccttacaccctggtccctgtcaaccactgttctgttctctgcttctgtgagttctacttttagattccatgtataattgagatcatacactttttgtctttctgtgtctggctgatttcacttagcataatgtccttcaggctcatctatgttgtcatgactagcaagatttctttttttttttttttttgagacagagtctcgcactgttgcccaggctggagtgcagtggcgccatctcggctcactgcagcccccgcctcccaggttcaagcaattctccgactggcaggatttcttatttatggctgaataatatttcattgtgtgatatatgccatattttctctaggacatttaagttgtttccatatattggctattgtgaataactgcaatgagtgtggaagtgcagatgatctctttgagatactgatttaatttcctttggattgatacccaatactaggcaacagagataatttaatataggaagttgatcaaatagatgttggactaaaaaatcaaagaaggcacaatatgagaacacagagatactgctgcagaaacagtaaccaccctctgggtttgggaggccagcagaggaagcttgggctgtcagaacctggcacttggggaaaaggtgccccctctgctgctgctggcacctgcggggcaggggcaagcctggttgggggagtgcaaaagacactgaagcccagaaccagctcttgctgccgaggtaaggggctcatactggggtgatacctaaaggaacagcaagcaaatgtgaagggtcaaatgcctcctactttttattttctattaggatcatgtggttaatttgaccattcagtccttaagaatatttgagtgccacccaaatattctacaacctaactagagaagtgaaaacttactattgcctagagatgggccccgtgctcactcagaaagataccatgaatggtgggaagagggagagtctctgtacaaaggataattgtgtctcgtcgctgtgcagagaggtgcctgctgctgctggctaggaaactccaagcccacttctctccactctgctttggatgctggggctgggactctgcacactacacttttcctttgtcagctggcttcctctgaaggttccaccagtcagggacacaagagagagcctgaaaggcatggggaagggaaaagggatttgctgtatccagtttgcctgtttgttctgtctgtaccaccctggtaacagcccttcatcctggcatcagcagtgtgtttcaacctccagctttctggggacattcacaaaaccagcctcatcacatcccgccaagccccctccttggaggttctagcagcagccaggcagcaccccttcctcagagttctgagttcaactcttcagacctcttccttagcctccaaccctggtaaactcaaccctggtaaactccagcttatccccccctcccttaagagtttccatcctgcttcatttcgttattacatctgtgttagcttagattccctttgaacattttcagtccactgacgcctgtttaagcaatgtcttatattaaattctgttataaaacctagtgtggagtcttttttcctgatttatccctaactgccatatccccactcttctccccaacagttactgtgatctgcattctaacatagcatgtacccacattgtacattaaacgtaatttgtatataactatgtaagattggaactgaatagcaggtgactggttgacctaatgtttcctttttgtatgtttagattttgtaattttccttgcatatttttgtaattaatacctttttccttttctcatatctcatacttttttttttttttttgagatagggtctcattctgtcacccaggctgaagttcagtgacacaatcacagctcactgtagccttgacctcctgggatcaagtaatcctcctgcctcagcctccgaagtagccaagaccacaggcgcaccaccacacctggctaatttttttttactttttgtagagacagggtctcactttgttgcccaggctggtcttgaactcctgggctcacgcagtcctcctgtcttggcctcccaaagtgctgagattacaggcgtgggccaccgtgcctagcctagctcatacatttttaaaacaaattttattttctaatacttacaggcttatagaaaagttgcaaaggtagtacttcctgtgctaccttttccctgttgctagcatcttatgttattatggtacatttgtcacaaccaataaaccaacgttgatacattattattagctaaagtccatactttattcaggtgttcttagtttttacttatatctgttttttgttccagaatcccatccaagataccacattacacttagtcatcatatctctggctcctcgtggcaatgacatttctcaggtttttcttgtttttgatgcccttggctgttttgaggagtactggtcaggtattttgtagactgtctctctattggaatttgtctttttttttttttttttttaatgattagactggggttatctcatatgtatgcatttggcccaggaaaaatttataatctccaggctctgggcctgtagtgcctaatggacaaagtagcctgtgtgcacacaaatatatccagaattggaagaaagtgtatgtctgcttttataggctatacatatcctacaatgtatcgtctatacctggtgccatgttttgccagtctttcgtatgtgtgtgtgtgcccaaggagtgtccctcggcctttgagaaggctacgaagtctccgggttatatgaatatgccatgttcatatagtcccttgcaaggagacatgtagattgtagttatttttgctattgcagacagtgcttcacattttgtgcacaagtttgcgtctctctgaaggaaattgctaggaaggggcctgctggtctgagcatgcccatttcacatgttgatgagcactgccaaacggctccacaaagcatgagccatatcaacaaagtggaaagtgtttgtttcatgatcaaataatgaatcttaagagcagtatttctcacagacgcagaatgttccagcaattctccttcaggcacatttcctttgctgaaacctttttagcaggtccctggagcactcatgaacaaaataaaaaaaccagaaaccctgtaaccctggtttctattaaagtctagcttggggctttttttttttttttttgacaaagtgtcgcaatgtcacccaggctggagtggagtggtgcagtctcggctcactgcaacttccacctcccaggtttaagcagttcacctgtctcagccccccggttagctgggactacaggcacctgccaatatgcctggctaatttttgtatttttagtagagacagggtttcatcatgttggccagatgggtctcgaactcctgacctcaggttatccacccacctcggcccccccagatgccgagattacaggcgtcatccaccgcacccagccttagcttggggttttttgttttttgttttttgtttttgagatggagtctcgcactgtcgcccaggctggagtgcagtggcgcaatctcggctcactgcaagctccacctcccgggttcgtgccattctcctgcctcagcctcacaagtagctgggactataggcgcccacaaccacacccggctaatgttttgtatttttagtagagacagggtttcaccgtgttagccaggatggtctcgatctactgaccttgtgatccgcctgtctcggcttcccgaagtgctgggattacaggcgtgagccagctcacccggccttaggttggggcttttaaatgacccttcaggtgtgtgtctgtgatgacttgaggcttttttttttactgtcttccagtgaaattaccagatgaatatcagtggtgagaaatttgattccttaaaatgtaaggaatttcattcttgaattgtgtgacaaaaccagggagcatgatttttgctccattcaggatctattcagtcaacactgagtatatagttgttgatggagactatgataggttctgaggatggatctgttatattctccataaatctgtatgtgagtcatgcctttgtttgcttcctacttgttctgtttactgggttttttttttctttgaggaaacaccttaattgcaatgaggtgtttattttataatataa

SEQ ID NO: 2967 - DNA, 6000 bp, Homo sapiens
aaagtgctggataggtattggataactatcacactgagagaaggtgtgtgtgcctatatgttactgataatttatgtatagggaaattttgacaagcaggtaaaaagccaagcaaactttttttcactgtggtcctgaaatgtgtaaaatttttttttttttttttttttttttgcttataaatgtgaagtccagttctatacacattaaacatcatgagaattgcttgaacctaggaggcagaggttgcagtgagctgagattgcgtcattgcactccagcctagggaacaagagcgagactttgtctcaaaaaaaaaaaaaaaaaaagttctttgaggtcttcaatgattttgagagtataaagcattcttgagagcaaaaggtttgagaactgctgttcaaatgaaataaatgtttattgtaattgttcagtagatagcagttatagatatttatatgtatatcacaactcctagttgcaatacagatagatattggccagtccaaagtttttcatttattaaactgtttctggtgctggctttacaacttgagtcagaatcaaattgtcctataatgcaggaacaaaagaaagctgacctttccctctgtgggtctcaattcctgttccaaatcctagcctaaaataaattgacctgacttatttctttggttcagttgtatgtgtgggctttgcacacttgtttttaagtaatcgaatatctaatccagtagaaatgtatgttggaagtataggattaattactaatatattttgccctacttcacaagtaaaaattaaatatcagaaaattataacttgaattcactgttttgaaactaatagcaacaagcttgtgatatttgaatgttaggatttcctaatcagatctgattgttaggtgaaaaggtaacctttcagccatagagaagttctttgcttaagtttgcaagaggaatagtcctactataaatagtccagctgacatttaaatacctgacataagaaactaacacatttttttgtcttgccaaaaagagcaactcaaaatagaggtcacttgtgtaatacagcttccattcagtaatgaagggcttaactgtagaagctgttatactttgccatttatttgacagtcttaacacttttttttttttggagatggagtcttgctctgtcactcaggctggagtgcagtggtgcaacctcagctcactgcaacctctgcctccagggttcaagcaatttttctgcctcagcctcccgagtagctgggactacaggtgcacaccaccacgcccggctaattttgtatttttagtagagacggagtttcatcatactagccaggctgatcttgaactcttgacctcatgatccacccacctcggcctcccaaagtgctggaattacaggtgtgagccaccgcgccccgtcttttttttttttttttttttaaatagagacaggttcttgctctgttgcccaggctggaatgcagtggcgtgatcatagctcactacagacttgaccttccaggctcaagcagtcctcctgtctcagcctcctaagcagctgggactacaggtgtgcaccaccacacccagctaatttatttattattttttgtttatttttggtttttgagacagggtctcactctgtcgcccaggctggagtgcagtggtgcagtctcgcctcactgcaacctccgccttcctggctcaagtgaccctcccctctcagcctcctgagtaactaggactacaggtgggcaccaccatgcccagctaattcttgtatttttttgtagacatgagatttctccatgttgcccaggctgatctcgaactcctggcctcagacgattgtcttggcctctcaaagtgctgggattacaggtgtgagctgccatacccagctgaccaagttttagtaacattaaaatcattgtccattaaaagttagtcacttaaggaatgccgttaagtgagattcctactcagagaagaacccttgatccttattgagatgaagtgctggacaaccaaagccctaaagaagctgagggagcttggcttatggattcctaggggaaggagccttctggacagcaggaatgacagtcgcacaggccctgggtaggtccttgcgtgggggtgcagttgaaatggttcctaattggttttttgttatgcaaataacatgggattgttgtaaaaaaatcaggaaatagagaaagtagggggaatcatccataattcttttacccagagataacagctgttaacatcttgttctgtatccttaccaactctataaagctccttaagatgtcacttatcatctatatgagtttgctagtgctgtcataacaaaataccatagactgggtggggcttaaacaacaaatttctcacagctctagagaccagaagcccaagatcaaggtgtcagcaggttttgtcacattctgaggtactgggagttaggacttaagtatataaatttgaggggaacacagttcagcccagcccatagcacgatctgtgaacaagtacctcagtcatcagccttcctatcaatatgattcttttgatgttcatttttattagtgcaggcttgtaaattaaccagtagtaatgtagtgacttttcccccgctagcctaattaggattattaaagatttagattgaaccctttctgaacaatagttgtgttgtctggctttttgcctataatgtcaccactatctttcagttttatgtttgctacaggagacttaatccagtatagctgaataatccagttggctgctgtgcagatgaaaatgccagtgttttccaaacaagcagttcaagtatgcttgcaggttttgctgtttcctttcaaataccatatgtagtactatttaatatttttcttgtaatcaactgactcttttgcttacatttattttaaaggaaacttttaccattattataaatgggaagttagtatattacttaccctaaataagttattcttaaacataaatacgtgactgtaaaacgaagtgttcaatcacataccaccgaaagtcctctaacataccactaccaactctgtccttcagttgcttggaccaaaaacctgggagctgtagttgactcttgtctctcacacctcacaggcaacctgatagcaaatctccacagctcagacctctgaaatgcctagaattacgccactcctcactactttcctgctatcaccctggtccaaacgggtattatcttttgctaggattattgcagtagcctcctagctgcttctgcccttgctcccttcactctcatcctcacacagcagtctgagggatcctattaaaaacaagacagatcatgtcactcagtaacagttggcatccttaatctcctcttgctctctcatcttcctcacttggtttgagctaaattggcctccttgctgtcctttgacaccctaagcagcctctattttagggcctttgcacttgtttgctctgtctcaaagactttctcctcagctatccataaatcatgccctctcaccttctttaggtctttagttatgacacctgattgcaataacacttttcctttatccctccatttaaaagtatagcccctcccgtattactccctcctccggaacaccaggatctgtcatactgtataatttacatattcatttttgtccattatatgtcttctactagaatgtaagctgcaggcatttttgttttattcactgcttgttcttcagtgcttagaaaagtccccgatgtatactaagtactcaaatatttattccaattgaattaatggcgtgtgtcctacactttgggaaatacatatactggcaacacctcccacaatctggggtccctccagtgagcctctcttcacagtcacatggttagtcctgtttgtctctgagagtctggccaattgagagctcagcattcaaggcagagaacttgaaacttgactggatcctgagttttttccagagaaaatagtgcatatgccagggaaaatggaggaaggagagacagtcaggattggttgggagtgcaaccctaggagagatgatttgttccccaagcacagaaggaaagtccatctctctctcctcccatagccccctcccttgtctggccccagtacctaggttctgttctggaagacacctagaaatggctcaagcctcagcctgaacccggtactgtggcttgaacctgtgaggtgttttcatgcgttgctttcaagagctacttgccaggctttgggatttttggaaaacaattgagaaccagctattcccttttagcttttttgtaagttaaaagagaaactatcacttaaataattgaaaaacaatagaatattttatccttggtgccttcagttgactcttagttgattaagaggataccatttttatttcccatatccatggtgactattcctcctaaaggttgtttgagagtcatgccaacaaataagcgtagtcttagcctcttgtcttccaaggtacttttgttagcacctgatattgatggttttcatctcatactagttgaccccaattcatagacatttagacatgtaagccccttaggaggtttgtccaaggggtaggggtggggtatctttctaagtttggttatctagccctagtcacttcacctgtcagagaaccatgtgccccttccctctggttgtgctggttgatactgatagctttataagtagcaagtttgaggtgtgataactttccgtgatttttttgcatgttagcatcttgattcccagggagagataatgagcagctagctctaggcttacaagttcccctggagttgctggtatcttgaatttctttccatttattttaggagtaaaagtccctcgcaatttccgactgttggaagaactcgaagaaggccagaaaggagtaggagatggcacagttagctggggtctagaagatgacgaagacatgacacttacaagatggacagggatgataattgggcctccaagagtaagcgtcgagctacggctataaatgtcaatgtcttaaattcactgtgcctccttttaaaaaatattagccttatcacggaaaaaaagctcaccaatggtatattttctgaaatgtggctattcttttttgaccagtttcagtttatatatttgaaccccctctgatgctgtttaacccctctaaatggtaagcaaaaacctgtttagactcatagtgtgaatttatatgacaatgtagacagtgaggtgtgaagtcattgcaccatcagatgtcgttcagaacaatctctgggctaaccaaataactaggccctaggtatagccagcattcctgaagccagtctccaaattaactctggaaagccttcccagttgtggtttttcttcactgtctcccaggtctgccgtgcacctgtatcctagttccttgggccattcagcaaaggtccctggcaagcctgtcagctcctggtctattccaggcactactagacccagaggcctttgcaaagaagacgaagacaatgaggatggggaaaagtggcctctttcagaccttcctgatttgtgagagttcccagtcttcataatgccagccaaccgttttttgaggacacatagtaaaccctcaagaaatgtctcttaactctcacaagaccccattgttaggtgcaattgcattccatttcacagatgaggagacagactcagaggagtcagatctcttgcccaaagtcacatagctggtaacccccaaaccagatctgactccagagcctgtgctcttaaccactgtgctgtggtgtctcccttttgtttacattttgagttttcatctgttaccattatagaagatactaatcaagtagtaacttgatgtaggagtcaagaaattgatttccatactgtgacacacacttcaga

SEQ ID NO: 2968 - DNA, 6000 bp, Homo sapiens
agaagtaacatataatacaaaattaagacattacaaaaattgtatcagaagaagccaatggaaacaacttagatgtccattgatagagtgagttaatgaagtacaccaagaccccctgcccacccatccccaccgctttttgactgtatatttcggaaactacatcagacattaaataagatgtctcagcgccatggctagacacacctcagggagccatgactccacataaatgccatagaatttcactagcaaatgcatcacacatcctgtttgtttgtttgtttgtttgtttgtttgtttttagatggagtttcgctttgttgcccaacctggagtgcaatgctgcagcaacctctgcctcccaggttcaagtgattctcctgcctcagcctcccgggtagctgggattacaggcatgagccaccatgctcggctaatttttctattttcagtagagatggggtttcaccatgttggccaggctggtctcgaattcctgacctcaggtgatccaccggccttggcctccctaagtgctgggattacaggtgtgagccaccatgcccggcctcatcacacactctgttaaccacacatcccttctcctctctgtcttctgcaagtccacagtccttcctgtcgacagtttgtcagctttactttctgcagcttatgctacaaaaactgtagcacgaggttgggggggttccttaactataaataggaaattgaaggttgtggataacattatataatttttgttttttcaccttttgaatatactttttcaaactactcatgccttttacatcccagagattccaaaccagccctagtgttttcccacttgaaaagagagttcacgaatggacattgtggatctgtcaggtctacatgcctctcaaccgaaccactgcgtcagcttcctgtatctattaggtatgctttttggtggtaggtaacaaaaacctacctttaagaacaacttaagcaacaggcacattatctcatgtcttcagatgtctgcagttgggcagccctgcaattccttcagcagctcagccacatcacccaggattctaattctaaccattacaacctcatattgtaggaaggaggaaaggggacaaaaataggctttttcttcagcttttttgtttgagacagtctcgctctgtcgctcagactggagtgcaatggcacgatcttggctcactgcaacctctgcctcccaggttcaagcgattctcgtgcctcagcctcccgggtagctggtattacaggcctgagccaccaagctcggctaatttttgtattttcagtagagacggggttttgccattgtggccagggtggtctcgaaatcttgacctcaggtgatccgcccgcctcggcctcccaaagtgttgggattacaggtgtgaaccagggcgcccaaccttctcttcagcttttatgaggggagggaaagtttccaaacacccaccttgccatgtggggccatggcgactggaatggcggtaaacatgcccaatacaccttctctctgggttccctgctaccaatattgctgctgcccaattgggtgtcctcgccctgtctcctcatggcagcacgatgcactttgtaaaaaggcaaacctgcccacatttagctcaaaacctcccaggctccacctccctcatcacgggagagccagcgggtgacacagggtaaagagaactggattccaaaactgattttactccttccttgttgtgtgaccttggaaaagccatctaactcctctaagtctcagttttctcatctcacaaatggaaatggtaacagctactttgcaaggttcattgaggattaggtaataatagcagctaatacttatattgcacttagtgccaagccctcttctaaattctctagttctattaaccattttaatcttccccaaaatccgataaaacaagactcttatcccatcagctgagtttatcagctcaagcgcagagcggtgatcaggcgcaggcgccggaaggaatcctgctctggggaccggctgtgacgtccaggaatggggcagaaactcttcgagggagcgtgtgcgcgggacgtactacaactcccatcaggcactgcgccaacgctagactacaacaaccagcatgcctcgggctgtcccgcctaacctcttcctgcgatgagctcggcacgggaattattattgtcaattttacttgcaagaagtttcctacaagagccaaggaatccatgcgagtaaacatttacgggcaccatagataaaaggcttgtgttttaatcctcatcctctccacctgttagctctgagtctcagttttctcatctctaaaaatggggatattcacaggagttgctgcatcgagttgtgaggattaaaagttggatgtaacggcttggtaattatgagctcttctagtgtcccttcctcttccctgtgcccaaggggttttaggaaagcattttatctccacagcaatcctatgaggttgatactactatcctcatagaaggggaaactgatgccaggagaggttcaagcgtcttacctgaagtcacaaagcaaactgagtgatgaaggaagacttgaacctagaaaatttcactgcaaaggtgagtccaccttaggaacccaaatgcttccacttgctactgatgctttacagtgaccccaagtccagggcaagtattttctgtgctccccaaagcaaacttgtatcacgtgatacacgaaaagtcaagttgcttcacctgtagccagtgctggcactttgagagctaattatagctgaatttgatgtggttggaggaatcgaggaaggcttccctgaggggatggtgctggatctgagaactgaagagtgggaacagcacaggcaaagcccctgaagtgggagagggcatgtgttccagggggcttgcaaagggccagtgtcgccgcagaggtacagaaagtctcagaggcgcaggctgtgccaaggctatggtgaggcaagtggggtacctagggtgcagattttttttttttttttgagactgaatctctctctgttgcccaggctggaatgcaatggtgcaatctcagctcactgcaacctctgcctcccgggttcgctcgattttcctgcctcagcctcccgagtagctgggattacaggtgtgtgctaccacgccccgctaatttttgtatttttagtagagacgaggtttcaccatgttgaccaggctggtctggaactcctgacctcaggtgatctgcccacctcggcctcccaaagtgctgggattacaggtgtgagccaccatgccctgccctagggtgcagattttaaggagtcactcacctgcagcgctgtgcaagtgcggagtcaggacctgagtgaaagccccgttaaatctgaccaccccatcctcgtccctgccctgggtgcagagcctggtgcacagggtgtccaggcatcctgctttgccctggagagccctggtttccacttgtcctggtgagattataataagtccccttttaatctgatgtgtgtcctcattaggtgataattctatggtcgctcaacttgtaaagtttgtattttatccagagggaatggggagccactgaaggctttagctggagggtgttttgagcagatgttggtctatatggagaatgggccataggggagagaatggaagctgctggggtcttccaagtgggagataaaggcagcttgccctgagtggagaagtgaacggagtggagagatgcagagtaggcactgctatcagacaaaggtgatgaattggatgtgctgggtgagggcttccagcttccttgtccctctatgtttagagtcctggtccttctgccagtattttgctctgtgaccttaagccagtcccttcacctctctcagcctcagtgtctacatccatataagggcttctcagacaatttataataaaggaggagtaccttcttgggtttatttatttgcaaaaatatttcccaagggcctttgcacaagctgttccctctacctcctcattgttacggtctctgctgaaatatgaccaccttaggaggcccttcctgaccatcctctgctgctcttgtcttggtttatctctaccctatcagaattatagtttcctgtttatttacttgctgtctacgactagaatgtaagtccctgaaagcagggatttgcttcttcagagatgtctatccatccccagcgcctagcacagtgtctggtacatagtaggtgcttaatgtttgtttgtttggttgaatgaatgaatgaacgaatgaatgaatgaatgaatgaatgaattgggtagatggttagcaaatgctttccctgccaccttaatgcccctaaatcatttagctgcacccactccaagccttctctggccggggagcatcaatcctaggagccagatcatctgacctggagggtgatgattcaaaaaatttgaacctggaggttaaaattctgcctgtctctgccacttaacagctgagtttagataaatcgcttgatctctctcggctgcatttttcacattaattctgaccttgcggagatgtggtgaggatctagataggaactagacaggaaaaagccccaagcgaattcggcgcttttgtttgaagctatattttctttttctttcacaatcgcgccttcccaagcctagtcacccctgcccttctcactaagcacatcacaacctccctcgcacccgatgtgtggggacttgcaggttgctgggccctcgagcacgcagatatttcctttctctaaaagggaaggaaaagagccttccaggccacgggtcgtgcaggtctccggggcgggcgtcagcggcggcgtatgtgcgtgcgcgcgcgcctgcgcatcagggccgggggacgggtaaggggggggtgaagaaggggccggccttcaagcaagagcgacgcaagatggcagccaccacgggctcgggtgagcgggggcgccgggcccggccggccgagggggcatgggcttgggccgggggccggggaccctcaaagcctcctgcagcggagccagggtccccgcgccgcctctgtctgctgggctccgcggcagccaccggcgcggcctgaccgggggaggaggagcaggcggtggccggaagcacgggcggggggctgaggggcctgtgggcggcgcggcgaggccctgaggctcccccgggaggcgtgagggccctctgtgctgtctgggggagccggagtgggcgaggagcgagctccgaggcactcctgaggataccggggctggcgactcttaaggggcgatctagaggtcccctagaggaggcgccccacagcggatggaagtcccatactgggtgccaggggtgcggctgagaggggccttgggatgtctggaggggacatcagagaagcccttcaggctggatggaagaaacgggatcctgagggggtgacttgagaggatcccctatcggttgagggaacggctccggcgttagttttagagatggggttagctgaggaaatagctatgttgactagaaaggaggagccttggagcagctgcttttggggagaatgaagggggtctccgcatgataagtgagaggagggaaaaggattcagatgccagagggacctaatagcggtgatagtgaaatgaccccatcattaccagtctcctgttcgaggatacagatggattgcttcaagttaggtttcaggggacaaggtccgagtggggcagttggtggaagcctctgatattggatgagggagaacagatgaattgggagccccgaggatgtctctttgggagtggggattcaactgagggaagcccctgaaatgagggagtggaaaaggtcgggttccggagatgtttcctgtaaaggagaaaagtctcctctttttgaattgagtgagggaagcat

SEQ ID NO: 2969 - DNA, 6000 bp, Homo sapiens
tacccctgtgtgctcactgttctttagaaggggcctgggcacatacctttgggcgcctgcccccaactgaaactccatcaccccgccttttttttttcctggagacggggtcttgctctgtcacccaggctggaacacagtggcatgatctgcgctcactgcagactcaacctcccaggctcaagcaatcctcccatttcagcctcttgaatagcgggaacgacagacatgtgccaccacccccagctagtttctttttgtattttttgtagagatggggtttcaccatgttgcccaggctggtctcgaacgcctgagctcaagcgatcggcccacctcagccttcctaagtgttgggattacaggcatgaaccaccgcgcccagccaaccctcctttgataaaccaaaaatatttttcaagctacccacatatatatatgggtatatatatatatatagcaatatatatattgctatataagcaataggtaatgcttgcataggtaaagaataagaatcacgccgggtacagtggctcatatcaaataatataaacagggctagagtatggataagctgaccctggacagtgggccaaatccagccacttgcttttctatagctcagaagcttttgtgggttgtttgtttgtttgtttgtttgtttgttttttagagacagggtcttgctctgttgtccaggctggagtgcagtggcacaatcacagctcactgtaacctcagactcctgggctcaagtgatcctcccacctcagcctcctgagtagctaggactacagatggacaccaccacatccagctaatttttttttttttttagagatggggtctcgctatgttgcccagggtagtctcaaactcctggcctcaagtgatcctcccacctcaacctcctgaagcactgggattacaggtgtgagccaccatgtcagccacgagcattttttaaatggctgggggagggggaacaatatttcctaacacagaaaattcaaattccagtttgtaaagctgaattggcacacagccatgcccctcatttacatattgtccgaggctgcttttgcactgcagtggcagaattgagtcgttgcatcggagaccacgtggtccacacagcctaaaatatttacgatctggccctttacagagaaaagttaccaacctctccctagtctagaatgaagggtaaattgctccccattcatgttccctcaggtactcagttcccctccttagaggccatcattttgacaagacacttgcaatgccttatgtaggcagaggggtatgtctgccccactccttttcacacaatatgtaggatattatgcacacagttctgcaccttgccttttttcacttaatatattttggagatagtgttatcattaatgttcacaaaccattattattttttacagctgcatagtgttccaccttcaggatggaatggacttgacttttttttttttttttttttgagacaaagtcttgctctattacctgggctagagtgcagtggtgcaatcccagctcactacagcctctgcctcctgggctcaagctatcctctctcagcctcccatcccaagtagttgggactacaggtgcatgccaccatgctgagctaatttttttttattatttttagagacgggggtcttgctttgttgcccagactcgtctcaaactcctgtgctcaagcaatcctcctgcctcagactcccaaactgctgggattacaggcttgaaccacgagtgtgttttaaattttgatagtgcataccaaattgtcttccagaggccatgccggtttaagttcacaagttttcagagtccctgtttcctcacacccttgccaacacagcgtgttatcaaatgttttgttctttgccaatctgataggtggttttaatttgcattcctcttactgtatttcattgattctaagatgtcactgattctaagatgcatcctgatttcagaagttcacatgtaaaaatgtggctgggtgtggtagctcacgcctgtaatcccagcactttgggcggatcacgaggtcaggaattcaagaccagcctggccaacatagtgaaaccccgtctctaccaaaaatacaaaagaaataattagctgggtgtggtggcgggtgcctgtaatcccagctacttgggaggctgaggcaggagaattgcttgaacccaggaggcggaggttgcagtgaactgagatcgcgccactgaactccagcctgggcgacacagcgagactctgtctcaaaaaaaaaacaaaaaaaaagtaaaaacgtatagcttcaaatcactgaaatacaatatgttttgtgagattgggtatcttactgtgagtttaaaatgcatttgcatttcctcatctgttcatgtccttttcctatttttcttggaagggagggtagcattggttaagagtgtagggttcaaatcccagttctgccacttacaagcttgtgactttgggcaagttacttaaccgttctgtgtctcagtttcctcacctgcaaaatgggaataataatggtacctacctcataggataggtgtgaagattaaatacattattatatgcaaaataccatgttcctggaatatggcaaatgctcaataaatatttgctgtaactgtcatctttgagttattttttcttaatgagtttcaagggctctttatacgttaaggaaacatcctttttgtccccccacctccctgccccaaaccccagttttcattcctttttccttgaccacagaagtaacatataatacaaaattaagacattacaaaaattgtatcagaagaagccaatggaaacaacttagatgtccattgatagagtgagttaatgaagtacaccaagaccccctgcccacccatccccaccgctttttgactgtatatttcggaaactacatcagacattaaataagatgtctcagcgccatggctagacacacctcagggagccatgactccacataaatgccatagaatttcactagcaaatgcatcacacatcctgtttgtttgtttgtttgtttgtttgtttgtttttagatggagtttcgctttgttgcccaacctggagtgcaatgctgcagcaacctctgcctcccaggttcaagtgattctcctgcctcagcctcccgggtagctgggattacaggcatgagccaccatgctcggctaatttttctattttcagtagagatggggtttcaccatgttggccaggctggtctcgaattcctgacctcaggtgatccaccggccttggcctccctaagtgctgggattacaggtgtgagccaccatgcccggcctcatcacacactctgttaaccacacatcccttctcctctctgtcttctgcaagtccacagtccttcctgtcgacagtttgtcagctttactttctgcagcttatgctacaaaaactgtagcacgaggttgggggggttccttaactataaataggaaattgaaggttgtggataacattatataatttttgttttttcaccttttgaatatactttttcaaactactcatgccttttacatcccagagattccaaaccagccctagtgttttcccacttgaaaagagagttcacgaatggacattgtggatctgtcaggtctacatgcctctcaaccgaaccactgcgtcagcttcctgtatctattaggtatgctttttggtggtaggtaacaaaaacctacctttaagaacaacttaagcaacaggcacattatctcatgtcttcagatgtctgcagttgggcagccctgcaattccttcagcagctcagccacatcacccaggattctaattctaaccattacaacctcatattgtaggaaggaggaaaggggacaaaaataggctttttcttcagcttttttgtttgagacagtctcgctctgtcgctcagactggagtgcaatggcacgatcttggctcactgcaacctctgcctcccaggttcaagcgattctcgtgcctcagcctcccgggtagctggtattacaggcctgagccaccaagctcggctaatttttgtattttcagtagagacggggttttgccattgtggccagggtggtctcgaaatcttgacctcaggtgatccgcccgcctcggcctcccaaagtgttgggattacaggtgtgaaccagggcgcccaaccttctcttcagcttttatgaggggagggaaagtttccaaacacccaccttgccatgtggggccatggcgactggaatggcggtaaacatgcccaatacaccttctctctgggttccctgctaccaatattgctgctgcccaattgggtgtcctcgccctgtctcctcatggcagcacgatgcactttgtaaaaaggcaaacctgcccacatttagctcaaaacctcccaggctccacctccctcatcacgggagagccagcgggtgacacagggtaaagagaactggattccaaaactgattttactccttccttgttgtgtgaccttggaaaagccatctaactcctctaagtctcagttttctcatctcacaaatggaaatggtaacagctactttgcaaggttcattgaggattaggtaataatagcagctaatacttatattgcacttagtgccaagccctcttctaaattctctagttctattaaccattttaatcttccccaaaatccgataaaacaagactcttatcccatcagctgagtttatcagctcaagcgcagagcggtgatcaggcgcaggcgccggaaggaatcctgctctggggaccggctgtgacgtccaggaatggggcagaaactcttcgagggagcgtgtgcgcgggacgtactacaactcccatcaggcactgcgccaacgctagactacaacaaccagcatgcctcgggctgtcccgcctaacctcttcctgcgatgagctcggcacgggaattattattgtcaattttacttgcaagaagtttcctacaagagccaaggaatccatgcgagtaaacatttacgggcaccatagataaaaggcttgtgttttaatcctcatcctctccacctgttagctctgagtctcagttttctcatctctaaaaatggggatattcacaggagttgctgcatcgagttgtgaggattaaaagttggatgtaacggcttggtaattatgagctcttctagtgtcccttcctcttccctgtgcccaaggggttttaggaaagcattttatctccacagcaatcctatgaggttgatactactatcctcatagaaggggaaactgatgccaggagaggttcaagcgtcttacctgaagtcacaaagcaaactgagtgatgaaggaagacttgaacctagaaaatttcactgcaaaggtgagtccaccttaggaacccaaatgcttccacttgctactgatgctttacagtgaccccaagtccagggcaagtattttctgtgctccccaaagcaaacttgtatcacgtgatacacgaaaagtcaagttgcttcacctgtagccagtgctggcactttgagagctaattatagctgaatttgatgtggttggaggaatcgaggaaggcttccctgaggggatggtgctggatctgagaactgaagagtgggaacagcacaggcaaagcccctgaagtgggagagggcatgtgttccagggggcttgcaaagggccagtgtcgccgcagaggtacagaaagtctcagaggcgcaggctgtgccaaggctatggtgaggcaagtggggtacctagggtgcagattttttttttttttttgagactgaatctctctctgttgcccaggctggaatgcaatggtgcaatctcagctcactgcaacctctgcctcccgggttcgctcgattttcctgcctcagcctcccgagtagctgggattacagg

SEQ ID NO: 2970 - DNA, 6000 bp, Homo sapiens
cacttctcctctgtagctatttctttcatgaaggcagcattcattcattcatttatttttgagacagagttttgctcttgttgcctagcctggagtgcaatggcgaaatctcggctcaccgcaacctccgcctcccaggttcaagccattctcctgcctcagcctcctgagtagctgggattacaggtgcccaccaccatccctggctaattttttgtgttttttgtagagacaaggtttcaccatgttggccaggctagtcttaaactcctgacctcaggtgatctgcccaccttggcatcccaaagtgctgggaggagtgcaatggtgccagctctgcagctctgcactgtgctccagcccagcctgaaggcagcatttagagatgtcattagtccgagctatggggacaggacctcgagatacctcagttgacctcattaagcaagtaaagatgctgaggcctagagtaggcacagtgtcacacagcaatatggtagcaagagctgaggcccccaacacttgatctagttctgtcatagctcttggccacatggccttttgtccctgctggtagacagaggcagtgcatacacagcatcccaaagtatgcagtaggagctctaataatgccatggacctgctgcagtgcagtttaaggacacaaaagggtgctggttttggaggcaggtcgacaggcctcttcccatcccacagctgccatttccaggccacttgactgggaggcagtggttcaacttctccaggcctctttcttcatccaagaagggatgacaaatgaggccatctcaggggatgacaagtgccatgaaagaaatgaagcagggagatgtgagcgagagcaactgcccggaaggatggctttagccagaagggttggctgaccttcgctctgagcaagaaggccgaggaggagccagcacaggggatctggagtgggggtggggtgctgtgtagaggaacagaaaatccagaagcccttctggggcttccacctccctcgccttctacatccccgcccctgcccctggcctgggtccaccctccccatcacaaatgggcaagactgcccagaccagagcagggccactgggtgcacaggctctggggccttgctgagtcccaacccctttacctcagcccagccactgtgcagtgacacccttcagcctgtccttaggcgtctgtgtgccaggaggtgtagctgccacctgtccccacctgcccttccgcccttatccccaggaacttgcaggtgcctgcatgaagctgtgctgcccccacccccaccacccctcccgtgcttggcacctgtgatggataccacagggcctctggaaagtcggcatccagtggctgcccctcaccccaggcctggacgtcaggattgcacattcacagtgacttgcgtgcttacttttgtcccttcaaccacaagtctcactcacccaggaggcatccaggggcttttctgcagtctccacagtacccccaagaccctggtcccctgtcaccaaggggttgagggcaccagcagaactcagaatcttggacaaccagttgacacagacaaaccgagtctgggaaggggtttgtctgaagccccatgagccagggggccacacgtgtcatcactcacagctgcctttgtcctctgctggactttacagcgtttccccatagacatgtgttcagtgtctgacatgtttctgtccctagagcttatcacacaggaggcctttgtggagtgtggcttagttgattgactcaatgacagcaacagtaatatggcctgagggcttactatgtgccaaacactgcacttagtagtgctctactgagttctgaataggtgccaagagctgggatgcagccacaagccagactaaagccctggccatggtggagccaacctccttgttgggggagaaaataaaccagcacaagagcagtcagaggtgccgagtgcttggagaacaatatacataggagatcggaaatgctggaagatgaggtggttgcaattttccatcaggtgtccagggaggacatttgagtaaacatctgaagaggtgagggagtgagctgtgttgcatcttaggaaagaatgttccaggcagagggaacagcaaatgcaaagacccagaggcatgcaagggaaaggagataaagtaggcctgggctgcagcgaaagaggagagtgatgggaggcagcaggggtggaagcctcagtttccacctctataaagtgggaataaaaaagctaccaacttaaaacaaatggtgagaattcatcaagatctagcctgtaaagcatttgtgcttggcattgagaaagtgctcgtaaatgttagcatcattcccttttatttatttattttttcaagacagagtctcactctgttggccaggcaggagtgcagtgcatgatctcgactcactgcaaccaccatctcccgggctcaagccattctcctgcttcagcctcctgagtagctgggattataggtgtgtgccaccacacccggctaatttttgtatttttagtacagatggggtttcaccatgttggccaggctagtctcgaactcctgacctcaggtgatccgcccacctcggcctcccaaagtgctgggattacaggtgtgagccacggcgcccagtcgcatcattcccattttacaagaggaaactgggcacagagaggctaaataacatgtgcagcgtcacagctagtgagtgccagcactggaatttgagtccaaatctactgaaccctcaagtgagtgaatggtgttggagtctgagggaaccctgctcaagttccgaacagattgagaacagaaacaaggaaaaggctgctggagaccaaatgatcatgtttattgctgataaaagctggaggggtgggggtggagcagcgaggcttctatctgcaggtaaggtactttctttttttttttttgagacggagtctcactctgtcacccacgctggagtgcagtggtgtgatctcagctcactgcaacctccgcctcccgagttcaagtgattctcctgcctcagcttcccgagtagttgagactacaggcgcatgccaccacacctggctaatttttgtgattttagtagagacggggtttcaccatattggtcaggctattctcgaactcctgacctcaagtgatccgcctgcctcagcctcccaaagtgctgggattacaaagcatgagccaccgcacctggccgaggtactttctttctaacaccaaacccagaaggacattgctgcagttccaggcagcactggtgcagagcaggctttccttatatggggcagagagaagggcacagcctgctcctaatagggaaaggttgagctgatctgagcatgcccagtttatgctctccagactctccaagcacatgagtcttggcatctccccgagcacagcaagtaacaggcaggaggagtgttaagcctgaggctccatcttcagggaagaaaacatcccaactagagaagaagggacaccttcccctcctaacaaatgaatgagcgggcaagtgagtaaatgaatgagtgattctgattgggggggtgcagggatgtcccttcactcaccctcttgtccacagttgcaggggctctcattgctgacttcttgtctggcctggtacactggggtgctgacacatggggctctgtggagctgcccattgtggggaaggtgagtatgttgacctaaccatgtcctcaagaaggaggttgggctgtatggccttgagtgagtcccctttcttctctaagactgtttccctatctgaaagatgggaaccatcattgcagcctgtccctcacccctgtgctgcaagactagaacaggagtcccttgggattttggaagcaaaagcatcaggcttgggatggtccaagagtttagatatgtgcctgcctcatcagaacccctgaatttgggggtgtcttgcttttccattgtctcccctgctgcttcttgctgttttaactgcattttatcctgtattagtcacttttttggttttgacagaaaatctaaactggcttaggcaaacaagggtactgattcatgtaactgaagatttcagggttagagccaaattaaggaatggctgcatccagtaggaccgacagaccacattcttcaggcccagtcttcttccatctctatctctactttcccctcataaggtggccagtgtgctttctcaccgcccagagatccatccttccagctcccaagaaaagagaactgtccttctccttccaggagaacagcatttctccttccctgtagtttccgccaactgaagtcccacggctcactcccattggcccagattgggtcacgtgctgggccctcaggcagtcactggctagagggaggagatgctatgattggccaggcctggtcacgtgttctttctcagcccggggcgaggtcagccttgtcagaagagcctggactaaggaggggaggctgttaccccagcaggtgcagggggtccagagggtcccaccttttacttagagggacctcctcaactgccttggggtggggaggaagggcggaggttgtctccaagcccccttacagcacaggtagggagactgaggcccagaggcagacagtgccaacccaaagcccttccagggtcatttcggctcatctccccaaaggctggatggggtctgtgtctggcagtgggccaggtgggaatgttcaagcatcccgggtggaggaaacttaggatcaaaggcgggaggtgagcccagggtgaatgtgtttagggggctgtggagagcagctgaccaccttaggctgactgctggggctgtgtccccctcaactccaggctttcatccgacccttccgggagcaccacattgacccgacagctatcacacggcacgacttcatcgagaccaacggggacaactgcctggtgacactgctgccgctgctaaacatggcctacaagttccgcacccacagccctggtgagacacccagctagtggtgggctgggagggggccttgggggcagaggccgacccccaggagccttctggggcttatgtgtttggctccttatggtattttaaaagagttttcattcattgtcttcatgtaaaatcaggaaacctgacatgaagatggaggtttccagcttctcttgcacaatctgctctggcccccctgggtccatgttcccacctggcctcactgggtgggagctgagctgcagccactgcctttgacaggacgcgtctttccagtttaccaccgtccccactattccttgcttccctgcacccaacccaccttgttcatttgtgttacctgcctggcagggcttctggggttttgctaccgtggcctagtggaaaatgtctaggctgtgaaaacagggcctgcctatttttagagggactggtcccaaagtaagtgatttcaccactctgagcctcagttgccttatctgtcaggtggaggtaggttggggcccggtcctgttccagcaccttaacacccatttgttcttcaggcagcctccggtgggtagaggtggtgaggacgtgtagtgtagtgggtgctatggcaccctgcccatccccttccctgggggtgcacccagcccctgcttctgtgagtggtggctgctgacagctcccagcttctccagggatggaggggaggtcccacctgtctccttgggataaggctggagccagtgactgaaacgcctccgacgctagtccctttgcctctgagtgggtctaattctaaagagccgttaacacctcagagctccttgcaggaacagactgagacaggacgccacccaccccatctttgctctgctcttcccctgccgtgtcttgcttccctccctcccttcgaggttttttcctgaagaggctcccttgataaatca

SEQ ID NO: 2971 - DNA, 6000 bp, Homo sapiens
cccaagaggcggaggttgtagtgagctgggatcacaccactgcgctccagccagggcaacagagtaagactccactcaaaaaaaaaaaatacaaaaaattaactgagtgtggtggcccatgcctgtaatctgcctgtaatcccagctacttggatgactgaggtgggagaatcacctgaacccaagagttcaaggctgcagtgagccatgatcacaccactgcactccagcctggacaaaagaatgagaccctatttaaaaaaaaaaaaaaaaagtgtatgtcaaagaacattatcaaggaagttaaaagacaaccaacagaatgagagaaaattgtcgtaaatcctatatatgataagggattaatagccatactatatcaagaactcttacaattcaagaaaaataccaataactgaatttgaaaaaaggcaaaggatttgattttttgtttgtttgtttttgatatggagtttcgctcttgctgcccaggctagagtgcaatggcgtggtctcagctcactcggatcactcgcctcccaggatcaaatgattctcctgcctcagtctcccaagtagctgggattacaggcatgagccaccacatccggccaaggcaaaggattttaatagatatttctccaaaaaagatatacgtggccgggcgcggtggcgcatgcctgtaatcccagcactttgggaggccgaggcaggtgtatcacctgaggtcaggagttcacaatcagcctgactaacatggtgaaaccccgtctctactaaatacaaaaaaattagctgggcgtgatggcgcatgcctgtaatctgagctactggaagaataaaaaagtgcagttctgacatgtgctacaacatggatgaaccttgaaaacattatgctaagtgaaagaagccagacaaaaaaggcttcatataattatagattatatgattccattatattgaaatgtccagtagaagcaagtccttagaagcagaaagtagattaatggttaccaggggctggggaaagagggaagtgagggagtaactgctaatggatatggggtttcttttgggggtacttaaaatgttctggaactagatagtcgtgatgattacacaactgtgtgaatatactaaaaaccacggaatttaatatggttcactttatactttaaaaggtatgaaatttatatctcttggtggggcatggtggctcatgcctgtaatctcagcactttgggaggccaacacggacggatcacgaggtcaggagttcgagaccagcctggccaacatggtgaaaccccatctctactaaaaatacaaaaatcagccagggattgtgggcgcctgtaatttcagctactcaggaggctgaggcaggagaatcgcttgaaaccggaaggcaaagtttgcagtgagccgagatcacgccactgcactccagcctgggtgacagagcgagactctgtctcaaaaaaaaaaaaaaaaagatttatatctcatgaaacaaaagatataggctgggcacagtggctcatgcctataatcccagcactttgggaagctgaggtgggaggatggctttagcccaggagtttgagaccagcctgggcaacatggcaaaaccccatctctaccaacaatacaaaagttagccaggcatggtggcgagcacctgtagtcccagctacttgggagactgaggtgggagaatcccttaagcctgggaagtcaaggctgcagtgagccaagattgtgccactgctgcactccagcccaggtgacagagtgagaccctgtctcaaaaaaaaaaaaaaaaaaaaaaggcgggtggggtggctcacgcctgtaatcccagcactttggaaggctgaggtgggcagatcacgaggtcaagagaccgagaccatcctggccaacacggtgaaacccggtctctactaaaaatacaaaaattagctgggtgtggtggcgcgtgcctgtagtcccagctactcaggatgctgaggcaggaggatcgcttgaacccggggggcagaggttgcagtgagacgagattgtgccactgcactccagcctggcgacagagtgagactccgtctcaaaaaaaaaaaaaagtcggccgggcgcggtggctcacgcctgtaatcccagcactttgggaggccgaggcgggtggatcatgaggtcaggagatcgagaccatcctggctaacaaggtgaaaccccgtctctactaaaaatacaaaaaattagccgggcgcggtggcgggcgcctgtagtcccagctactcgggaggctgaggcaggagaatggcgtgaacccgggaagcggagcttgcagtgagccgagattgcgccactgcagtccgcagtccggcctgggcgacagagcgagactccgtctcaaaaaaaaaaaaaaaaaaaaaaaaaagtcagatcatgtcattcctctactcaaaaccccacagggaagggacttcccagctcattttaagtaactgtctcccccatatcctttaggtcttggatccaatgtcaccttcttaaacaggacttccctaaccttcacccccacctcccaagaaagcagggattctgtcacattccctgctgtttccctgggacaggttggtgtttaataaacatgttcagtgaatgaatgaaggaatgagttatctcaggcagtctgtccatcaaccatctggtgctggccactgtgagggtctctggacagcagcagtaaccagccaccctaccctgtttggaggctgtgggatacgagcagagagctttagaaggtatttacctgaaatctgacatccagcccccaccaaagccaccaaccgcgcccccccccccccgtccgccgccccccacccaagccttaagctcctgggttaaaaaatccaactgttggattaactgtgctgttaatactgatgcaaaaccagccagcttcaccggaattcaccaggacttgggttgcaacccatccctgccactggaaggtggcttttccttcctgggagcaggtgtgggaaagaaacggagggagcataggcctgggtggggacagtggctgtctatggtaggaacactcaggaaacagccctggggtgactggtagtgcaggaatccaggacttaaaccctcagagaacctggattctggaaggggatcttaccttccctctctgctcccccagcacctttcaggaccttccacagcctctagggaggctcctatgtgatctcactgtatggattttttttttttttgagaccaagtctcactcttgtcacccaggttggagtgcagtggcgccatctcggctcactgcaacctccacctcccaggttcaagtgattctcctgcctcagccttccaagtatctgggataagtagcttgcctaatttttgtatttttagtagagacaaggttttaccatgttgtccaggctggtctcaaactcctggccttaggtgatccactggcctcggcctcccaaagtgctgggattacaggcctgagccaccgcgtccagcctgtatggaattttttttttttttttttgagacggagtctccctctgtcgcccaggctggagtgcagtggcgcgatctcggctcactgcaagctccgcctcccgggttcacgccattctcctgtctcagcctcccgagtagctgggactacaggcgcccgccaccgcgcccagctaattttttgtatttttagtagagacggggtttcaccgtgttagccaggatggtctcgatctcctgacctcatgatccgcccgccttggcctcccaaagtgctgggattaccggcgtgagccaccgcgcccggctgcctgtatggaatttctatgagaaattattgcatactttgttgtcggttagacctggggtaaatccctgctgctgtcatttatctgccgaagtattagacgcatctggctgagccttaattcattcatcaagcatttattgagcttctaccatgttccagccccgatcctggcacgggggccctgctgtaaacaaagctgttctctgccctcaggagcttgctctctgataggagagacagggactgcaagctcaatccccaccagaagcgctgtgaagacaaaacagggtgatgtcacagtgactggaggagggggcacctttgagcagggtggtggtggtggggctctctgaggaggcaataccattggtgtttaagagtcaaataaatgttgctcgtctagctcttggtccagcacctgacagatattaagcgctcagcaaatctcatagtgaccctagttgtcattttcattagtttactgtcctcgccaccgggagaacatgagctggggaggatgcggggcaggctcgacgtttctcctctttgggcgcacagcacagagctggcacacagctgatgaacacatggcacccgaaacctctgcacacagtagggcttgataaaccagcccactctccatcggcctcgctagggagcatcgtacagagcacccgccaaatgcttcctggcctcggccccagcccggcgccctgccctcgcgttccttgcacacagtgggcgcttaacgctgccggctcaagaaatgcccatttctgggccctgcctcggcccattgcatgggcccgtgaaccgaagcctagctgggcggcgacgcgccgcgagctcccagtgggctggagccgggagccctgccggggctgagctgggaaggcgggcacgcgcctccgccccaagcttccgcgcccagctgcgtccagctgcgtcccagcctccggctcgcggcggttggctgcggctcagcgacgtccgattggcctgcgcggctccggcgcgagccccgattggctgtgacgcgcggccgggcgaggaccccgcccgcgccgccgccgcgcccggcgctgggcggtcattgggcggcgtgatctcgccgcggttccgcggccctgccgccgccgccgccagcagagcgcaccgggccgatcgggcgagtggccatggcgggcgccgagaactggccgggccagcagctggagctggacgaggacgaggcgtcttgttgccgctggggcgcgcagcacgccggggcccgcgagctggctgcgctctactcgccaggtaagacctctgggcccccctccaggcctgcggtcaccagccccggctgcggacagcgaccccagactggagtcccaacctcgggcccagatgcggaactccagcccgggtgtctaacttgcaaatagcaagttcggggaccccaccccagtgtcccttccgaacccaagccagaaccttggccccggggtttcctggctgcagagacactccccagatcaagaaattaccatgagctccctgggcgacaaacggagctcccatcggacccgcagatacggaatcctagccccggggcattctcggttgtgaagagtgctcctagacttagaaccccaccccctcatccccccaggacccggtccaagcccaaagctgcccttcagctgtaagcactgccctcaggcccctaaaagtcacacctcatcctgggttccccagatctggaatctacatcctagtacctcctctgtgccctagcccaggccctgggctgcaaacaatgacctcacctccctaacctgggaatgtcagcccctctgcccagggaaccctaactcaggggcttccagctgcacggtaccccccacacccttcccccaaaaccccatcctagtgatagcttcagtggctacagaccgatatcctctccccaaccctccagtggtgagcatcagtccttgccccatattcctggatcccaggcagtgaggggactgaatgtaccccactgtaagctcccctgtacataagccccaactctagctcttgcccctccctcacatccatgtattggccccttccttaggacttgggactggaacccccatattccc

SEQ ID NO: 2972 - DNA, 6000 bp, Homo sapiens
ccagcaagcttgtccaacctgccttgcttggttgtgtttttttagttttttttccccaggctggtctcaagaacttctgggctcaagggatctgctcacattggcctcccaaagtgttgggattacaggcatgaaccactgcttctggctttaaatatatatatattttttgagacaggctcttgctttgtcacccaggctcgagtagcagtggcgcgatcacagctcactacagccgcaatctcccgggctcaggtaatcctcccacctcagcctcctgggtagccaggaccacaggcacacaccactatgcccagctaattttcgtattttttgtggagacagatttttgacttgttgcccaggctggtctcaaaattcctgggctcaagcgatgcactcccccacctcttaacctcctaaagtgtggggattacaggaatgagccctaacttagggttttgttttttttgtttgtttgtttttctgtactctgtatactccagggtatttcagatgtaaggtatttcaatacatctaataaatttcctggtctagacttggtgacagccatttctccaaaagttctgcttcattttgtgggaaatgctatttgaagataataatctaggcacagatatagtcattgtttctagttaggccatttctttttcttcttcttcttttttttttttttttttttttttcttttgcgacaggtcttgctctgttgcccaggctggagtacaatggcataatcatagctcactacatcctcaaactcctgggctcaagtgcttcgccttcctcagcctcccaagtacctgggactataggtgcatgccaccatgcctggctgattttttttttttttttctagatacggagtcttgctacgttgcccacgctggtcttgaactcctgggctcaagtgatcctcctgcttcagcctcccaaaatgttgatattaccggcataagccactgtgcctggcctagtttgggcatttctaggcctttttagtagactgaactaaaagagactataatatagtctcttttgctgaaaatctgggttcctaaccacacaagtatttgctcttcctaatgtatacataaatacataggtatgcatatatgtaacaataccaatattttctagccatagtatgactgaaggtaagctttctttggggtagtataaaatttctgtgtttgccaatcacttgaaataataactccttgtgtgcatcacacacatccatgttgctgcctgtgtcagtcagtgtagagttctccagaaaatcggagcccaatatgatagatgcaagagattgatcaggaggagtggcttaagtggttatggagtctgagaagtcccatgatctgctgtctgcaagatggagacccaagaaagcctgtggtataacttagtcccactccaaagccctgagaaccagggacaccagtggcataagtcctggagtcaaaagacctgagaaccaggagctctgatgtctgagggtggaagaggatgtcccaactcaagaagagacagaatttgcccttcctctactttttgttcttttcagactcaacaggttggatgatgccccagatactgcccaggttggtgagggcggatcttctgtactcagtctactgattcaaatgctaaagtcttccagaaacaccctcatagtcagaagtaatgttgaccacctatcgggtatgtcttagcccgggcaaactgaggcataaaattaactatcacagtatttcttttggattaccgagtagaataccgtggtatgaatatggcacagtctgattaccttttctcctgtgggtggacatttggtgtctttctagtttggggctattatggataatgattcttgtatgagtttgcttttgttttcctgatatatatgccaaggagtggaattgctgagtcatagggtaggcgtatcattaactttattagacagtgctgaacagttttctaaagtatttacatcagtttacacttccaccagtagtgtgccagaggtcccgttgttctcaatctcctgtattgatttccgtcatttctatttttctttttctttctttttttttttttttttttcagactgagtctgtttctgtcgcccagactggagtgcagtggcatgatcttggctcactgccctctgggttcaagtgattctagtgcctcagcctccgagtagctgggattacaggcgccaccaccatgcctggctgttattattattattattattattatttttgagatggagttctgctcttgttgcccaggctggagtgcaatggcgcaatctcggctcactgcaatctccgcctcccaggttgaaacgattctctggcctcagcctcctgagtagctgggattacaggtgcctgccaccgcgcctgacctattttttctatttttagtagagatggggtttcaccatgttggccaggctggtctcaaattcctgacctcaagtgatccgcccgcttcagcctcccagatgctgcaattacaggcgtgagccactacgcctggcttctcctagttttcttattctgatatttgctcaacatttttttccaaccctgtactgaattttgtatgtctgttatcaaagctttttttttttttttttttgagacagaatctcactctgccacccaggctggagtgcagtggtgccatctcagctcactgcaacctccaagtcccgggttcaatggattctcttgcctcagcctccctagtatcccgagtagctgggattacaggcacacactaccactctgtatagtttttgtatttttatagagaaggggttttgccatgttggccaggctggtctggaactcctagcctcaagcaatctgcctgctttggcctcccaaagcgttgggattatagatgtgagccaccatgcccggctcagattttgattttagaatgttcacacttacaaatggaaattaaaatgccttgagaagttttttttcgaagctgagttaagagttagtccctttatatcaattttcattattaaaaagttctcaggaaccaaataacattggtccccttaaattgaggcagttctgctcaaaatggatgcttggggcccaagctgaacaacagtggttgttgaggaatctagttagaattgcgttataggaattcccttttttttttttttttttttttttgagacagagtctcgctctctcgcccaggctggagtgcagtggcacgatctcggctcactgcaagccccgcttcccgggttcacgccattgtcttgcctcagcctcccgagtagctgggactacaggcgcccgccgccacgcccgactaattttttgtaatttttgtagagatggggtttcaccatgttagccaggatggcctcgatctcctgacctcatgatccgcccacctcggcctcctaaagtgctgggattacaggcgtgagctaccgcgaccggcaggaattctttagtccaacatttgtggtgcaaactttgaggttttgaacaaatacttttttttttttttttgagaaaatatttgacagcccagggcctctctctagagccgcatcccctgcccgtgttggctcatcaagttggcactgaagtcggatctctaaaatgttcgccaagaaagccaactccttcatgtacttttaatacttaaagcatgtgtttttatcttttaaatccacagttcagagtcgtgacacttcaagaggtgggcagattattcatttgtgaatgaacagcatttatgagaaatttggagaaattttatgtttgagagacacgaagaatccagagctttccaaaacagactgatgatcacacccaccggggagtttatgaaaatgcaagcccctggagcacgggcctctgctggatattcggaatcatggggctgagtagggccaggaatctgtacttttagaacagccatattatctaaagtatatagtcattcccagtccaagctctgtaaatcctgaagagaaaaatctaaaaactgcatatccggattatgttattctagcttcctgtagaaatcaggcttcaaggagcatacagccattctcatcaacatgagacacggatttgtaggcaatttctgtacctttcataaagctggctaaaagcatcagccggtatttatataagaatccatgtctgttctttttttccaaaaatcctagagcagttggctcctcagataaccctgtgtgtttcttttatccagtaaaagcagcgcatccagaggtacttgtttcctggccttctgcgaagcccacagataaattaggtctcatttggaaacgtcccatttcgaaaagcctgaggtatctatctctgcctaccgactgatttacagcctcactttaaaatgttagtctgttcttaaaaagggtttataactgcatctactataataataaaatgtaagcaaccttgcgctaggtactgaacaatttcatagctttgaactctccaaaatgttctagaagccaatacagaaaacccaaaaatctcagtttttgtttgcagaaggggcaagagaaccggttgtgttagccctccaagtgcccagcgccagcatagggtctgtctaacacacagcccaggctctgtaaacctttgctaaaagagcgaatcaacaaggaataagtaatggataataataataaataataatgaatccattcttccttcggtcgtgggtctggcaggcataaattccggccgggattccgaccccagggccagagcaggactcgccttggcgtctatgagtgggcggggcttccctggggtaccgcccacgtcgggcgggacctgagggccgctggaggggcggggcgtctatgaggtcccgcccatgcgggggcggggcctgcggcgcgcgggaagcggcgcgcgctgcgcgggaggtgacggtgcctctgactgtccgggtccctccaggtacggcttccctggcccgggcagctccgcggctcttttggtcgcgtcggtccgggccagaggccctcgccgagggcgggcccctgggccccgggatagctccggagcggcgcgcgttggggcggcggggccccgtccacccccggccccgcgcggcctcctcccggcggcctcagtcccagcttcccgggcccagcgcccggtccctgggaaaggcggggttctcctctcgccccgccgccccggtcccctaccccgtttggccccctcttccgggaggctcctcccggggcgggcccctccccgggctctcagggcgcgcccctagcccctactaagcggggacaggccgtgcagacggccggggcccctaggtagcctttacctgggtgtttcgttttgcttttctggatgtagcggcgtatcataaacttgtggatgtcaggacccagcgaagcattttaggtggagctagcaaggtgttattgtcagatggcaacgttaacatcctttcccaatgcagtgtgcattttaaatggctcctggcccctattcagcgctcaataaccctttgctgctgttaacactgttgtttaatccatcaccagcattttgcagctttctcctgtcttgaagaagtagaacggtgcccgagaaacgtttttccccttcgagactcaggaggatgaaagtcatcacttgtgaaatagcctggcacaacaaggagcccgtgtacagcctggacttccagcatgggacggctgggaggatccacagactggcgtctgccggcgtggacaccaatgtcagggtaaactggggcagagatagacatccgggaacactgcttgaagcaatagttttcattcttttacttaaaaccagtgtcggctgggcgcggtggcttacgcctgtaatcccagtgctttgggaggctgaggtgagaggatcgcttgagtccaggagttcgacacca

SEQ ID NO: 2973 - DNA, 6000 bp, Homo sapiens
tgcctcccgggttcaagagattctcctgcctcagcctcccaagtagctgggattatagacgcctgccaccatgcccagctaattttcatatttttagtggagacaggtttcaccatgttggccaggctggtctcaaactcctgaccccaagtgatctgcccgcctccgcctcccaaagtgctgggattacaggcatgagccactgcacccgggcctcactgtagttttgatttatatttctccagtgatcagtgatgttgagcatttttttaatatacctgttggccatttgtatgtcttctttcgagaaatgtcttttcggatcttttgcccatttcttttttttgagacagaatctcactctgtcacctagcctcgagtgcagtggtgcgatctcggctcactgcaacctccgtctccgtctcctgagttcaagtgattctcgtgtctcagcctaccaagtagctgggattacaggcacgggccaccatgcccagctaattttttgtatttttagtagagatgtggttttgccatgttgaccaggctggtcttgaactcctgacctcagatgattcacccaccttggcctcccaaagtgctgggattacagatgtgaggcaccgtgcctggcttgcccatttcttaaattggattatttgtctttctgcagttgagtttcatctccttatatattctggttattcatcccttgtcagatggctagtttggaaatgttttttcccattctgtgggttgtctcttcactttgttgattgtttccttggctgtgcagaagctttttagcttgatgaaatcccagttgtctgtttttgctttagttgcctgtgcttttgaggtcttacgtaaaaaccctgtgcccaaaaaacctgtgcccaagatgagtgtcctggagcacttccccagtgttttcttctagtagttttataggttttgggactggatttctgtctacagtcctggagttttgctgccctcactttggtttttcactcacttctctgcatggctttccaatagcaatagctcccagatagcaagcatgggtgggtggggggagtattacatgcgtcacttcacttaatcctcatggtctgtctacttattttcagatgagaaaacaggtttagagaagttgtgatctacctaaagtcatgcacagtttcactcaagtgtctgactccagatccgcttgcctctaatctctcatagtaacttgttgacacattttctccagttgtcctgtcttgcttaaaaagctgtggggaagactcagcctggctcaggtagtattagaccagcagtccctggtgtggcatactcagttttggcattgccttcctggtatgttttaaagaaaactcatcagaacctttgtatcttttttattttccttgagacagggtctcgctctgtcacccaggctggagtgcaggctcgatcacggctcactgcagcctcaacctcctggactcaagtgatcctcccacctcagcttcccaagtagctgggactacaggtgcacaccaccatgccctgctaattttttgtattttctgtagatactggatttcaccatggtgcccaggctggtcttgaattcctgggctcaagcaatctacctgcgttggcctcccaaagtgctgggattacagacatgaaccaccacacctggcagaacctttgtatcttgaaagctgtgtaaatacaatcagtgtgggtatcttagtccctccttatcagcggtagtagtttcacttaccaatggtcagctgcgatctgaaactattaagtggaaaattcataagaaatagtcaattcatggctgggcatggtggctcaggcctgtaatcctagcagtttgggaggctgaggtggacctgaggatcacctgaggtctgcagtttgagaccaggctggccaatacggtgaaaaccctgtctctactaaaaaaaatatacaaattagccgggcatggtggtgtgcgcctgtaatcccaactacttggaaggctgaagcaggagaattgcttgaacccaggaggtggaggttgcaatgagccaaaattgtgccactgcactccagcctgggtgactgagactccgtttcaaaaaaaaaaaaaaaaagaaataatcagttcataagtcttaaattacatggttttgcagtgcttgtgttcatgtcacccttatatttaataatggccccaaagcaaaagatgctggcaatttggatattgtaaagagaagctgtaaagtgtttccttttactgaaaaggtgaaagatctcaatttaatatggaaataaaaaaatttgtatgctgaggctgctaacgtctatggtaagaactaatcttctatttgtgaaattgtgaagaaggaaaaagaaagttgtgcataatttatatagggttctgtactatgcgaggtttcaggcatccactggggggtcttggatcttatccccctctgatggtggggactactatagtgttgtttcctatgttctcctagagtagtagcctgagtttggggaggaagagaatgccctcctctccctcccttttttttgttaatccgattaggtcagcagtggatgttactttgattttactggtggttctgttatcagagtcttggtttgttttctgttctttggagatagggtctcactctgccacccaggctggtatgtaagtggtatgatcatagctcactgcagccttcaactcctgggctcaagtgatcctcccacctcaccttcctgagtagctgagcccacagctgcatgccatcatgtctaattttcttattttttgtacggggggcggggggggtcccactatgttggccaggctggtattgaactcgtggcctcaagtggtcctcttgccttggcctcccaaagtgctgggattacaggtatgagccactgcacccagcctgttatgacagtctaactgtctatcaggttaattctaagacaagggtggaagcctctgttacggtctccagtttataaaagaatggttcctgcaagattacatcaaggccggaaggccatttaggatgctgaaaagataagccctatggttatttagcatcacaaagggataggtggagttgttaagagctgtcttcctttgtgttctgcctcattaagtcactgggtccttaggtgtcagggaatatagattgaacgaacaggtgtgtttcactttaggagcaagcctgggggaaaaggggtaccagtgacattttatgtaaatggaccctttggagtaatgcagcaggttattgtacaatttctttttgacttttatatcaagccacctgattttttgtcttcttttgctttccaaagtacacagatgctcctcaactttcaatggcattatgtctaaataaaaccattctaagttgaaaatattgttaaattgaaattacatttaatacacctaagataccaaacgtcatagtttagcctagcctcctttaaacatgctcagaacacttatgtcagggtacagttgggcaaaattatctaacacaaagattattgttattattttttgtagaggtggggtctcaaacacctgccctcaagcaatcctcctacctccaccacccgaaatattgggtttacagttgtgagtcactgcacctggcctattttattttattttaaaattttatttatttaattaattaatttttttgagacagggtttcactcctgtcacccaggctggagtgcagtggcgcgatctcagctcagtgcaacctctgcctcctgggctcgagcaattctcctgcttcagcctcctgagtagctggaactacaggcgcctgccaccacacccggctaatttttgtatttttagtggacacggggtttgactgtgttggccaggctggtcttgaactcctgatctcaggtgatctacctgccttgaccccccagagttctgggattataggtgtgagccactgcacctggccacctggcctattttataataaggtgttaaatatctcatgtaattacttgaatactgtactgaaggtgaaaaccagaatggttatgtgaggacttggagaagtaagtgtctactgattgctttcacagaaagtctaaacattgttaaatagaagcattgttaaattgaggactgtatatatgagtttttttttttgaaacggagtcttgcactgttgcccaggctggagtgcagtggtgcaatcttggttcactgcaacctctgcctcccgggctcaagcgattctcctgcctcagcctcccgagtagctgagaatacaggtgcccgccaccacgcctggctaattttttgtatttttagtagagacggagtttcactatgttggccaggctggtcttgaactcctgacctcatgatctgcccgtcttgtcctcccaaagtgcgggactacaggagtgaacccccgcgcctggccccctgtatatatgaaatttaaatgtagtgttgattgtatcagtacatttttggtttcagtcttaatttaaaagaattggacaaatgtaagcttttatgagccccccagctcaattttattgctttttacttatttgtaaccttcagataatttgtttttccctgtagtttatggctgtcagataaaaaactgatctggtgacaatgatctggtgaaaagctcagcccagaagaactataggtctgggctgttaggacttttaatttttggagagcatgtttgccctgtttttttttttttcttttcttttgctgttgtaataggcccatcatttactttttaattttaagtcttgtgccttgaaactcacctttgttgttggacactttctttttgaggtcgtgatgtctcgggagtcggatgttgaggctcagcagtctcatggcagcagtgcctgttcacagccccatggcagcgttacccagtcccaaggctcctcctcacagtcccagggcatatccagctcctctaccagcacgatgccaaactccagccagtcctctcactccagctctgggacactgagctccttagagacagtgtccactcaggaactctattctattcctgaggaccaagaacctgaggaccaagaacctgaggagcctacccctgccccctgggctcgattatgggcccttcaggatggatttgccaatcttggtaagaccctttgttgtatagtatcacgttttgttcagaaaaacacttacagaaagttgtattaccaggtggaaggttctgattggagttgtccaggtttttggcacgttgaacaaataattgaacatcatgcatgaacaagcaatgaaagcatagatttattgaagtggaaggcaatagaagctaaagtacatgtcacaggatgggagcaggcctgagcaagtggctgcagagcccttgtagcaaagtcttctggggttcaagtaccctctagaggtctcccactgtttacatcctatgtaaatgaagtgctggctcacagcccattagaggccaaagtgaattggagctcggccattccaagactggtgtggattgacgccttatgcaaatgaaggtcctagaatggacggatcataggccagagtgcaaattcttccttttttgtttagtttcaggaatttttttttttttttttttggcaacggagtcttgctctgtcgcacagacaagtgcagtgacgccatctcggctcggctcactgcagcctctgactcctgggttcaagcgattctcctgtctcagattcctgagtagctgggattacagacacacaccaccacacctggctaatttttgtatttttagtagagacggggtttcaccacgttggccaggctggtctcgaactcctggcctcaagtgatcctcctgcttcggcctcccaaagtgttgggattacaggcatgagcaaccgtgcccatctattccaggaagtttg

SEQ ID NO: 2974 - DNA, 6000 bp, Homo sapiens
gtagttgggattacaggcatgcaccaccatgcctggctaattttgtattttaggcagagacggggtttctccatgttggcctggctggtctcgaactcccaacctcaggtgacccacccgccttggcctcccaaagtgctgggattacaggcgtgagccaccacacctggcctacgcttggctgatttttttgtatttttttagagatggggtttcgccacgttgcccaggctggtctcgaactcctggactcaagtgatctgccttcctcggcctctcaaaatactgggattacaggcatgagccactgtgcccagccctaccctatagattttagatgtgtcagctcccacaattatgtgagctaattccttaaaataaataaccttttttttttttttttttttttgagatggagtctcgctctgtcgcccaggctggagtgcagtggcctgatctccgcttactgcaatctctgcctctcgggttcacgccattctcctgcctcagcctcccgagtagctgggactacaggcacccgccaccacgcccggctaatttttgtattttcagtagagacagggttttaccatgttggccaggctgatcttgaactcctgacctcaggtgatccacttgccttggcctcccaaagtgctgggattataggcgtgagccactgcacccgggccattatatactctacgttcatttttcactaatccttggacaagtgttcataacagcaatgaaatacattcagtgctattttatctttcacctttgacaatggattcaatctctttcatggcagcttcactttcagcttctgcgagtttttcattgatttccattatttctatgaggaattgcctgtccatttcataatctgtcctttcaggaatctctattccatggagctttagctattggggtagaaagcaagaaaaataagttgaagaagctatgggcagagtaatgtaaatcctactcatccattaggaaataataccactaatagagaaaactgcaactgtcccgataatgaaagactaaggggtatcaaaagcttggactgaaacagaaatgctggaatgggatttccactcatgctacccaaaactatgtgaccttggtgtgatcttggggtagtcattcctccactcagaggttgaactagatgtttgtaaagattctattcaattataaaattttctagattgtaagatacttttttttttttgagatgaagtctcactctgtcgcccaggctggagtgcagtggtgtgatctcagctcactgcaacctctgcctcctggggaagcaattctctgcctcagcctcccgagtagctgggattacaggcacccgccaccatgcccggctaatttttttgtatttttggtagaggcggggtttcaccatcttgaccaggctggtcttgaactcctgacctcgtgatccacccgcctcggcctcccaaagtgctgggattacaggcgtgagccaccatgcctggcctcttaagatactctggagaggaaaaaaaaacaaaacagaaaatgactcttaactaaaagctaccatcatcaaatccttgaaattcacagaaaaaagctagaaaatcacaatttaaaaaatgcagttgaggcaagtaatattcacagagaaaattatacttgtgctctgaggctaaatactattgggtccctggactttttttttttttttttgagagggtgcagtagtacaatcacagctcactgcagccttgacctctcaggctcaagtgatcctcctgcttcagcttccagagtagctgggactacaggtgtatgccaacatgcccagctaatttttgtattttttgtagaaatggggtgtcatcatgttgcccaggatggtcttgaactcctgggctgaagtgatctgaccacctcagcctctgaaagttctgggattacaggtgtgagccaccatgcctgacctcaagcactcttctgctgaataaaggggacgtggctgtcctacgccataatgggcatcaggacgtcatacacagaagtgttgggaaatcaccttacaaggtacagtcctctgctcaggggggccaggagggtcttataggcatcattcaccagggtcgaatgcttctctgagaagtccttttcagtctgttagtggagatgaagatagtactattaccatccaaatcacaaagtttttttgtttttgtttttgttttgacgttgagtcatccaggctggagtgtgcagtggcgcgaactcagctcactgcaacctccacctcccacgttcaagtgatcctcctgccttagcctcccaagaagctgggactacaagcatgtgtcactgcactgggctaatttttatatttttagtagagacagggtttcaccctgttggccaggctggtcttgaactcctgacttcaagtgatctgcctgcctcggcctcccaaagtgttgggattacaggcgtgagtcactgtgccaggcccacaaagttttataatattctaatgggcaggcacctaaggaagtggttaagtagagctggtgtgggatgaggtgtctttatattcagctgataggttttaagttatctgggaagtcagacaaaagctgtgagtgaatggcagctctgggtctgacaggctggggtcagactgccatggggcagacacagctgattttccagctcagtccctgataatcacataaccacaaggctactgccacccagtgtgcacacatatttggggattattggggttggccaataagctacctgagacctctggctgaagaaatctgggtggacaagacgctgcagttgctggtacctgtgctggagcttcgctgtatcaactctgaaggaacggttgctggaaggaaattgggagattaaatttatacaacaaatatttaaaggtttatctaccatgagcctggttcttgctcttatggggaagatgcaataacatataagcagttaatttcaaaaagtggtaagtcctatgaagggacacagaacagagtcagagagtgtagcagatgtagtggacaaagagatgacactcagctgaaacctgaatgatgatgagtaatcaaagatcagaggaaagagacgtccaggtagaattgcaagagcaaggacctcgaggtgggagcaagatggggatgcctgaggaacttaaagatcagcgttactgtagcccctcatacatgttcagtgactggtggggaagatcccatagttaaggaaaagggacattcctaaattacacagacaaagattctttgcctggccaaactttagtcagatttctgaaccttctcctaggcccagatgtatgctttcttgtaaaatacagttttggcaaataatcttgccaagtcagtttagctagaatcctcgatcctcatatttttgatcatcctagatctctgatcagattcttcatcctctactatcccccaggtggtgtctaagcagcctggcctgtcttcagcaagaatcccgttaggtcggcttagccagaatcccgtttactctgctccttggctacaaatttccttctgcccatgccctttttggagttgagaccaatctctctccccaactgcaagaccctattgcagtggcccctctacaagatggtcttgaagaaagtctttctggtgcttgaacaagtgtgactgaatcatgttttctttaataccaccctaacttttccacggcccaggtcccttcatccctgtctctcccggtttattttaattcagcccctttcacattctactcccagagtctgtcctatttccttaccagttcagctctatccacactgccccgtctctccaagaacctcagtctcagggggaaaaaccatttattggaccctctccctccaattctcacttttccctcaggcctcgcccacaatattaagcttttcatgctttactccctaatctcggatcacacttctgcagtcctttcttaaatacatcaacccaactttaaaccttactcaccctattcattcaagtcttccagtctcccaggccctgcccctcaagtaccctttcctcaagttccgcccctcgacttctccttccctttcccgtaggtaccgcccctcaaatctccctcccctctagcctcggcccccctatttcctctaacttcagcgcccgcccctccagtcccgttcgtctcccttctccacacctcaacgttgcttccctcagtccccgcctctcaatttcctcctgagaaatcaagacacttctctcacgcctgctctctagacctccgcccccccatcagtcccgccttctcttccgccagccagatccgtcctcccctctcgcaggccagacctcgacgtgtctctcgcccgggcccgtttcccgaaaccgtcgctcgtaccagtccataaggctgaagtagtctcgagtggggtcaggtgcctgcagcgctcggcactgtgggcagaagaacctgtcctcccgcccggggccccatgggccgccgcagttccaacagcggggataattgcttcccgcctgcgacgcagcatcgcagcttagcggtctccttctgggaacccctgtcggccaaaacccccacacccggagcaaagccccggctctcccccgccacatctggccggcggcctatctagccgtggtcactcgtggggaaaagcaaagagagcgtctaaccagactaatgttgctgattggctggggagtcgagggggcgggatcacccgaggggaacccgggttctaagttccgctctcccttctaaactacaactcccaggaggcattgaggcggcgcctgacggccacatctgctgctcctcattggtccggcggcaggggagggggttttgattggctgagggtggagtttgtatctgcaggtttagcgccactctgctggctgaggctgcggagagtgtgcggctccaggtgggctcacgcggtgagtcatatggggaacttctgttgggtgtttggtggttcgaatcccatcttaagcgttttgtgcgaacggagtctcctgagcttcgctttgtctgtagttttgagctgaagggggagtgtgtgggcgactctcttccttttcagtagatcatcctcgaggtgaagttcacttcccgtattacttgcaagctgaaacaggcctgaacatacaggataagaagaacagcgttgtattcttcaatatcagagcgaagtgacttcgtaaaaattctatagatgttagaaatcgttgccattctttaggttcaatctataaaatacttatagagaagccagtcttagctactgggcgctgcagggactggaaacgcactgagctgtgtaggaggatgttctgcgtgtccctaaataagtccctaagtaaatgtatgggatagggtggccagaagtgggtaggagggcatcagtcctccttcggacttaggttttctgcttgaaaaaaatattgtgtttcacttgaaagacctctggaatttttaaaaaaaattatttatttttgatataaagtatacatatatgattaccatctgtaccttttttttttttttttttttttttgagacggagtctctctctgttgccaggctggagtgcagtggcgcgatctgggctcactgcaacttctgcctcctgggttcaagcgattctcctgcctcagcctcctaagtatctgggattataggtacccgccaccatgcccggctagtatttttagtagagacgaggtttcaccatgttggccaggctgatcccgaactcctgacctcaggtgatccacctgccttggcctcccaaagtgctgggattacaggtgtgagccaccgcgcccggcctattttcaattttttgaggaatcacaatactcttctctatagtggctatactaatttgcattcccaccagtggtgtatgtgaac

SEQ ID NO: 2975 - DNA, 6000 bp, Homo sapiens
actactctaggagaacataggaaacaacactatagtagtccccaccatcagagggggataagatccaagaccccccagtggatgcctgaaacctcgcatagtacagaaccctatataaattatgcacaactttctttttccttcttcacaatttcacaaatagaagattagttcttaccatagacgttagcagcctcagcatacaaatttttttatttccatattaaattgagatctttcaccttttcagtaaaaggaaacactttacagcttctctttacaatatccaaattgccagcatcttttgctttggggccattattaaatataagggtgacatgaacacaagcactgcaaaaccatgtaatttaagacttatgaactgattatttctttttttttttttttttgaaacggagtctcagtcacccaggctggagtgcagtggcacaattttggctcattgcaacctccacctcctgggttcaagcaattctcctgcttcagccttccaagtagttgggattacaggcgcacaccaccatgcccggctaatttgtatattttttttagtagagacagggttttcaccgtattggccagcctggtctcaaactgcagacctcaggtgatcctcaggtccacctcagcctcccaaactgctaggattacaggcctgagccaccatgcccagccatgaattgactatttcttatgaattttccacttaatagtttcagatcgcagctgaccattggtaagtgaaactactaccgctgataaggagggactaagatacccacactgattgtatttacacagctttcaagatacaaaggttctgccaggtgtggtggttcatgtctgtaatcccagcactttgggaggccaacgcaggtagattgcttgagcccaggaattcaagaccagcctgggcaccatggtgaaatccagtatctacagaaaatacaaaaaattagcagggcatggtggtgtgcacctgtagtcccagctacttgggaagctgaggtgggaggatcacttgagtccaggaggttgaggctgcagtgagccgtgatcgagcctgcactccagcctgggtgacagagcgagaccctgtctcaaggaaaataaaaaagatacaaaggttctgatgagttttctttaaaacataccaggaaggcaatgccaaaactgagtatgccacaccagggactgctggtctaatactacctgagccaggctgagtcttccccacagctttttaagcaagacaggacaactggagaaaatgtgtcaacaagttactatgagagattagaggcaagcggatctggagtcagacacttgagtgaaactgtgcatgactttaggtagatcacaacttctctaaacctgttttctcatctgaaaataagtagacagaccatgaggattaagtgaagtgacgcatgtaatactccccccacccacccatgcttgctatctgggagctattgctattggaaagccatgcagagaagtgagtgaaaaaccaaagtgagggcagcaaaactccaggactgtagacagaaatccagtcccaaaacctataaaactactagaagaaaacactggggaagtgctccaggacactcatcttgggcacaggttttttgggcacagggtttttacgtaagacctcaaaagcacaggcaactaaagcaaaaacagacaactgggatttcatcaagctaaaaagcttctgcacagccaaggaaacaatcaacaaagtgaagagacaacccacagaatgggaaaaaacatttccaaactagccatctgacaagggatgaataaccagaatatataaggagatgaaactcaactgcagaaagacaaataatccaatttaagaaatgggcaagccaggcacggtgcctcacatctgtaatcccagcactttgggaggccaaggtgggtgaatcatctgaggtcaggagttcaagaccagcctggtcaacatggcaaaaccacatctctactaaaaatacaaaaaattagctgggcatggtggcccgtgcctgtaatcccagctacttggtaggctgagacacgagaatcacttgaactcaggagacggagacggaggttgcagtgagccgagatcgcaccactgcactcgaggctaggtgacagagtgagattctgtctcaaaaaaaagaaatgggcaaaagatccgaaaagacatttctcgaaagaagacatacaaatggccaacaggtatattaaaaaaatgctcaacatcactgatcactggagaaatataaatcaaaactacagtgaggcccgggtgcagtggctcatgcctgtaatcccagcactttgggaggcggaggcgggcagatcacttggggtcaggagtttgagaccagcctggccaacatggtgaaacctgtctccactaaaaatatgaaaattagctgggcatggtggcaggcgtctataatcccagctacttgggaggctgaggcaggagaatctcttgaacccgggaggcagaggaggcagtgagccaaaatcgcgccactgcattccagcctgggcgacagagtaagactctgtctcaaacaaacaaacaaacaaaaaaacccacaatgagataccatctcacccaagttaaaatggtttgtataaaagataggcaaaacagatgctggaaagaatgtgcagaaaggggaactgtatagagtgctcttgacataagtaattttatcttagaaaaaggctctatcttatattttaaaaggcattatgccaacagggaccagatgtttgtctaattaataaagactgtactggccatgtacagtggctcacgcctgtaatctcagcactttgggaggccaaggcgggcggatcacaaggtcaggagatggagaccatcctggtcgacatggtgaaaccccaactctactaaaaatacgaaacttagctgggcatggtggcgcgtgcctgtagtcccagctactcgggaggctgaggcaggcgaatcgcttgaaccagggagtcggaggttgcagtgagccgagatcgcaccactgcactccagcctggtgacaaagcgagactctgtctcaaaaaaaacactgtactaaaccagataaggatataaatatgtacacgcttttgttattagtcctcacaagaaaattctttggtcataagagcaggactttattaggtcaaaatggctgtcctaacagacaccatcttgctgtcactcatgattaacacccagtatccgccatcaaaggctctgcccgcatcaaaaactcttccttacaagacactgacaccccagataaagccaaaacactctctttgtccacattgctctccttggactggtttgataaccactttccctatccccttttctccgaatgttaaatgttactttaatgtaagatttttaatctataacatttacatattaaataaatatactattgtgtacggtttacaatactgactgacttgtggaatggcttgagcctgtgtgcccatggctctgaccaccaagtaaacagggagtactacggaaaattgcttccttgggaactccatatagctcgtggcttttacaattaaaataaaacatcaataagtctgatcttgtggaaagacacaaatgtgcatggacctggttatgtctgaccttgcactgttcacatacaccactggtgggaatgcaaattagtatagccactatagagaagagtattgtgattcctcaaaaaattgaaaataggccgggcgcggtggctcacacctgtaatcccagcactttgggaggccaaggcaggtggatcacctgaggtcaggagttcgggatcagcctggccaacatggtgaaacctcgtctctactaaaaatactagccgggcatggtggcgggtacctataatcccagatacttaggaggctgaggcaggagaatcgcttgaacccaggaggcagaagttgcagtgagcccagatcgcgccactgcactccagcctggcaacagagagagactccgtctcaaaaaaaaaaaaaaaaaaaaaaaaggtacagatggtaatcatatatgtatactttatatcaaaaataaataattttttttaaaaattccagaggtctttcaagtgaaacacaatatttttttcaagcagaaaacctaagtccgaaggaggactgatgccctcctacccacttctggccaccctatcccatacatttacttagggacttatttagggacacgcagaacatcctcctacacagctcagtgcgtttccagtccctgcagcgcccagtagctaagactggcttctctataagtattttatagattgaacctaaagaatggcaacgatttctaacatctatagaatttttacgaagtcacttcgctctgatattgaagaatacaacgctgttcttcttatcctgtatgttcaggcctgtttcagcttgcaagtaatacgggaagtgaacttcacctcgaggatgatctactgaaaaggaagagagtcgcccacacactcccccttcagctcaaaactacagacaaagcgaagctcaggagactccgttcgcacaaaacgcttaagatgggattcgaaccaccaaacacccaacagaagttccccatatgactcaccgcgtgagcccacctggagccgcacactctccgcagcctcagccagcagagtggcgctaaacctgcagatacaaactccaccctcagccaatcaaaaccccctcccctgccgccggaccaatgaggagcagcagatgtggccgtcaggcgccgcctcaatgcctcctgggagttgtagtttagaagggagagcggaacttagaacccgggttcccctcgggtgatcccgccccctcgactccccagccaatcagcaacattagtctggttagacgctctctttgcttttccccacgagtgaccacggctagataggccgccggccagatgtggcgggggagagccggggctttgctccgggtgtgggggttttggccgacaggggttcccagaaggagaccgctaagctgcgatgctgcgtcgcaggcgggaagcaattatccccgctgttggaactgcggcggcccatggggccccgggcgggaggacaggttcttctgcccacagtgccgagcgctgcaggcacctgaccccactcgagactacttcagccttatggactggtacgagcgacggtttcgggaaacgggcccgggcgagagacacgtcgaggtctggcctgcgagaggggaggacggatctggctggcggaagagaaggcgggactgatgggggggcggaggtctagagagcaggcgtgagagaagtgtcttgatttctcaggaggaaattgagaggcggggactgagggaagcaacgttgaggtgtggagaagggagacgaacgggactggaggggcgggcgctgaagttagaggaaataggggggccgaggctagaggggagggagatttgaggggcggtacctacgggaaagggaaggagaagtcgaggggcggaacttgaggaaagggtacttgaggggcagggcctgggagactggaagacttgaatgaatagggtgagtaaggtttaaagttgggttgatgtatttaagaaaggactgcagaagtgtgatccgagattagggagtaaagcatgaaaagcttaatattgtgggcgaggcctgagggaaaagtgagaattggagggagagggtccaataaatggtttttccccctgagactgaggttcttggagagacggggcagtgtggatagagctgaactggtaaggaaataggacagactctgggagtagaatgtgaaaggggctgaattaaaataaaccgggagagacagggatgaagggacctgggccgtggaaaagttagggtggtattaaagaaaacatgattcagtcacacttgttcaa

SEQ ID NO: 2976 - DNA, 6000 bp, Homo sapiens
gtcaaggctgcagtgagctgtgattgcaacactgcgctccagcctgggtgacagagtgagaccatgtctcaaaaaaaacaaaaaccaactagtttagatgatcctgtgaaagtattcgtagatgtgattaacatttataatcagttgactttaagtaacagatgttactctatataatgtgggtgggcctcatccaatcaagtagaggcattaagtgcaaaaacaggttttctgggaaggaattctgtatcaagactgtaacatagaaatcctgcctggactttcagcctgcttatctacccctatagattttgtttattttttttgtgacagggtctcactctgtcactcaggctggagtacagtggtgtgatctcagctcactgcaacctctgcctcctgggctcagatgattctcccacctcatcctcctgaatagctgggaccacaagtgcgcacctccacgcttggctgattttttttttttttttgagacggagtctcactctgtcgtccaggctataatgcagtggcacgatctgggctcactgcaagctccgcctcccaagctcaagcgattctcctgcttcagcttcccgagtagttgggattacaggcatgcaccaccatgcctggctaattttgtattttaggcagagacggggtttctccatgttggcctggctggtctcgaactcccaacctcaggtgacccacccgccttggcctcccaaagtgctgggattacaggcgtgagccaccacacctggcctacgcttggctgatttttttgtatttttttagagatggggtttcgccacgttgcccaggctggtctcgaactcctggactcaagtgatctgccttcctcggcctctcaaaatactgggattacaggcatgagccactgtgcccagccctaccctatagattttagatgtgtcagctcccacaattatgtgagctaattccttaaaataaataaccttttttttttttttttttttttgagatggagtctcgctctgtcgcccaggctggagtgcagtggcctgatctccgcttactgcaatctctgcctctcgggttcacgccattctcctgcctcagcctcccgagtagctgggactacaggcacccgccaccacgcccggctaatttttgtattttcagtagagacagggttttaccatgttggccaggctgatcttgaactcctgacctcaggtgatccacttgccttggcctcccaaagtgctgggattataggcgtgagccactgcacccgggccattatatactctacgttcatttttcactaatccttggacaagtgttcataacagcaatgaaatacattcagtgctattttatctttcacctttgacaatggattcaatctctttcatggcagcttcactttcagcttctgcgagtttttcattgatttccattatttctatgaggaattgcctgtccatttcataatctgtcctttcaggaatctctattccatggagctttagctattggggtagaaagcaagaaaaataagttgaagaagctatgggcagagtaatgtaaatcctactcatccattaggaaataataccactaatagagaaaactgcaactgtcccgataatgaaagactaaggggtatcaaaagcttggactgaaacagaaatgctggaatgggatttccactcatgctacccaaaactatgtgaccttggtgtgatcttggggtagtcattcctccactcagaggttgaactagatgtttgtaaagattctattcaattataaaattttctagattgtaagatacttttttttttttgagatgaagtctcactctgtcgcccaggctggagtgcagtggtgtgatctcagctcactgcaacctctgcctcctggggaagcaattctctgcctcagcctcccgagtagctgggattacaggcacccgccaccatgcccggctaatttttttgtatttttggtagaggcggggtttcaccatcttgaccaggctggtcttgaactcctgacctcgtgatccacccgcctcggcctcccaaagtgctgggattacaggcgtgagccaccatgcctggcctcttaagatactctggagaggaaaaaaaaacaaaacagaaaatgactcttaactaaaagctaccatcatcaaatccttgaaattcacagaaaaaagctagaaaatcacaatttaaaaaatgcagttgaggcaagtaatattcacagagaaaattatacttgtgctctgaggctaaatactattgggtccctggactttttttttttttttttgagagggtgcagtagtacaatcacagctcactgcagccttgacctctcaggctcaagtgatcctcctgcttcagcttccagagtagctgggactacaggtgtatgccaacatgcccagctaatttttgtattttttgtagaaatggggtgtcatcatgttgcccaggatggtcttgaactcctgggctgaagtgatctgaccacctcagcctctgaaagttctgggattacaggtgtgagccaccatgcctgacctcaagcactcttctgctgaataaaggggacgtggctgtcctacgccataatgggcatcaggacgtcatacacagaagtgttgggaaatcaccttacaaggtacagtcctctgctcaggggggccaggagggtcttataggcatcattcaccagggtcgaatgcttctctgagaagtccttttcagtctgttagtggagatgaagatagtactattaccatccaaatcacaaagtttttttgtttttgtttttgttttgacgttgagtcatccaggctggagtgtgcagtggcgcgaactcagctcactgcaacctccacctcccacgttcaagtgatcctcctgccttagcctcccaagaagctgggactacaagcatgtgtcactgcactgggctaatttttatatttttagtagagacagggtttcaccctgttggccaggctggtcttgaactcctgacttcaagtgatctgcctgcctcggcctcccaaagtgttgggattacaggcgtgagtcactgtgccaggcccacaaagttttataatattctaatgggcaggcacctaaggaagtggttaagtagagctggtgtgggatgaggtgtctttatattcagctgataggttttaagttatctgggaagtcagacaaaagctgtgagtgaatggcagctctgggtctgacaggctggggtcagactgccatggggcagacacagctgattttccagctcagtccctgataatcacataaccacaaggctactgccacccagtgtgcacacatatttggggattattggggttggccaataagctacctgagacctctggctgaagaaatctgggtggacaagacgctgcagttgctggtacctgtgctggagcttcgctgtatcaactctgaaggaacggttgctggaaggaaattgggagattaaatttatacaacaaatatttaaaggtttatctaccatgagcctggttcttgctcttatggggaagatgcaataacatataagcagttaatttcaaaaagtggtaagtcctatgaagggacacagaacagagtcagagagtgtagcagatgtagtggacaaagagatgacactcagctgaaacctgaatgatgatgagtaatcaaagatcagaggaaagagacgtccaggtagaattgcaagagcaaggacctcgaggtgggagcaagatggggatgcctgaggaacttaaagatcagcgttactgtagcccctcatacatgttcagtgactggtggggaagatcccatagttaaggaaaagggacattcctaaattacacagacaaagattctttgcctggccaaactttagtcagatttctgaaccttctcctaggcccagatgtatgctttcttgtaaaatacagttttggcaaataatcttgccaagtcagtttagctagaatcctcgatcctcatatttttgatcatcctagatctctgatcagattcttcatcctctactatcccccaggtggtgtctaagcagcctggcctgtcttcagcaagaatcccgttaggtcggcttagccagaatcccgtttactctgctccttggctacaaatttccttctgcccatgccctttttggagttgagaccaatctctctccccaactgcaagaccctattgcagtggcccctctacaagatggtcttgaagaaagtctttctggtgcttgaacaagtgtgactgaatcatgttttctttaataccaccctaacttttccacggcccaggtcccttcatccctgtctctcccggtttattttaattcagcccctttcacattctactcccagagtctgtcctatttccttaccagttcagctctatccacactgccccgtctctccaagaacctcagtctcagggggaaaaaccatttattggaccctctccctccaattctcacttttccctcaggcctcgcccacaatattaagcttttcatgctttactccctaatctcggatcacacttctgcagtcctttcttaaatacatcaacccaactttaaaccttactcaccctattcattcaagtcttccagtctcccaggccctgcccctcaagtaccctttcctcaagttccgcccctcgacttctccttccctttcccgtaggtaccgcccctcaaatctccctcccctctagcctcggcccccctatttcctctaacttcagcgcccgcccctccagtcccgttcgtctcccttctccacacctcaacgttgcttccctcagtccccgcctctcaatttcctcctgagaaatcaagacacttctctcacgcctgctctctagacctccgcccccccatcagtcccgccttctcttccgccagccagatccgtcctcccctctcgcaggccagacctcgacgtgtctctcgcccgggcccgtttcccgaaaccgtcgctcgtaccagtccataaggctgaagtagtctcgagtggggtcaggtgcctgcagcgctcggcactgtgggcagaagaacctgtcctcccgcccggggccccatgggccgccgcagttccaacagcggggataattgcttcccgcctgcgacgcagcatcgcagcttagcggtctccttctgggaacccctgtcggccaaaacccccacacccggagcaaagccccggctctcccccgccacatctggccggcggcctatctagccgtggtcactcgtggggaaaagcaaagagagcgtctaaccagactaatgttgctgattggctggggagtcgagggggcgggatcacccgaggggaacccgggttctaagttccgctctcccttctaaactacaactcccaggaggcattgaggcggcgcctgacggccacatctgctgctcctcattggtccggcggcaggggagggggttttgattggctgagggtggagtttgtatctgcaggtttagcgccactctgctggctgaggctgcggagagtgtgcggctccaggtgggctcacgcggtgagtcatatggggaacttctgttgggtgtttggtggttcgaatcccatcttaagcgttttgtgcgaacggagtctcctgagcttcgctttgtctgtagttttgagctgaagggggagtgtgtgggcgactctcttccttttcagtagatcatcctcgaggtgaagttcacttcccgtattacttgcaagctgaaacaggcctgaacatacaggataagaagaacagcgttgtattcttcaatatcagagcgaagtgacttcgtaaaaattctatagatgttagaaatcgttgccattctttaggttcaatctataaaatacttatagagaagccagtcttagctactgggcgctgcagggactggaaacgcactgag

SEQ ID NO: 2977 - DNA, 6000 bp, Homo sapiens
gacctcaggtgatcctcaggtccacctcagcctcccaaactgctaggattacaggcctgagccaccatgcccagccatgaattgactatttcttatgaattttccacttaatagtttcagatcgcagctgaccattggtaagtgaaactactaccgctgataaggagggactaagatacccacactgattgtatttacacagctttcaagatacaaaggttctgccaggtgtggtggttcatgtctgtaatcccagcactttgggaggccaacgcaggtagattgcttgagcccaggaattcaagaccagcctgggcaccatggtgaaatccagtatctacagaaaatacaaaaaattagcagggcatggtggtgtgcacctgtagtcccagctacttgggaagctgaggtgggaggatcacttgagtccaggaggttgaggctgcagtgagccgtgatcgagcctgcactccagcctgggtgacagagcgagaccctgtctcaaggaaaataaaaaagatacaaaggttctgatgagttttctttaaaacataccaggaaggcaatgccaaaactgagtatgccacaccagggactgctggtctaatactacctgagccaggctgagtcttccccacagctttttaagcaagacaggacaactggagaaaatgtgtcaacaagttactatgagagattagaggcaagcggatctggagtcagacacttgagtgaaactgtgcatgactttaggtagatcacaacttctctaaacctgttttctcatctgaaaataagtagacagaccatgaggattaagtgaagtgacgcatgtaatactccccccacccacccatgcttgctatctgggagctattgctattggaaagccatgcagagaagtgagtgaaaaaccaaagtgagggcagcaaaactccaggactgtagacagaaatccagtcccaaaacctataaaactactagaagaaaacactggggaagtgctccaggacactcatcttgggcacaggttttttgggcacagggtttttacgtaagacctcaaaagcacaggcaactaaagcaaaaacagacaactgggatttcatcaagctaaaaagcttctgcacagccaaggaaacaatcaacaaagtgaagagacaacccacagaatgggaaaaaacatttccaaactagccatctgacaagggatgaataaccagaatatataaggagatgaaactcaactgcagaaagacaaataatccaatttaagaaatgggcaagccaggcacggtgcctcacatctgtaatcccagcactttgggaggccaaggtgggtgaatcatctgaggtcaggagttcaagaccagcctggtcaacatggcaaaaccacatctctactaaaaatacaaaaaattagctgggcatggtggcccgtgcctgtaatcccagctacttggtaggctgagacacgagaatcacttgaactcaggagacggagacggaggttgcagtgagccgagatcgcaccactgcactcgaggctaggtgacagagtgagattctgtctcaaaaaaaagaaatgggcaaaagatccgaaaagacatttctcgaaagaagacatacaaatggccaacaggtatattaaaaaaatgctcaacatcactgatcactggagaaatataaatcaaaactacagtgaggcccgggtgcagtggctcatgcctgtaatcccagcactttgggaggcggaggcgggcagatcacttggggtcaggagtttgagaccagcctggccaacatggtgaaacctgtctccactaaaaatatgaaaattagctgggcatggtggcaggcgtctataatcccagctacttgggaggctgaggcaggagaatctcttgaacccgggaggcagaggaggcagtgagccaaaatcgcgccactgcattccagcctgggcgacagagtaagactctgtctcaaacaaacaaacaaacaaaaaaacccacaatgagataccatctcacccaagttaaaatggtttgtataaaagataggcaaaacagatgctggaaagaatgtgcagaaaggggaactgtatagagtgctcttgacataagtaattttatcttagaaaaaggctctatcttatattttaaaaggcattatgccaacagggaccagatgtttgtctaattaataaagactgtactggccatgtacagtggctcacgcctgtaatctcagcactttgggaggccaaggcgggcggatcacaaggtcaggagatggagaccatcctggtcgacatggtgaaaccccaactctactaaaaatacgaaacttagctgggcatggtggcgcgtgcctgtagtcccagctactcgggaggctgaggcaggcgaatcgcttgaaccagggagtcggaggttgcagtgagccgagatcgcaccactgcactccagcctggtgacaaagcgagactctgtctcaaaaaaaacactgtactaaaccagataaggatataaatatgtacacgcttttgttattagtcctcacaagaaaattctttggtcataagagcaggactttattaggtcaaaatggctgtcctaacagacaccatcttgctgtcactcatgattaacacccagtatccgccatcaaaggctctgcccgcatcaaaaactcttccttacaagacactgacaccccagataaagccaaaacactctctttgtccacattgctctccttggactggtttgataaccactttccctatccccttttctccgaatgttaaatgttactttaatgtaagatttttaatctataacatttacatattaaataaatatactattgtgtacggtttacaatactgactgacttgtggaatggcttgagcctgtgtgcccatggctctgaccaccaagtaaacagggagtactacggaaaattgcttccttgggaactccatatagctcgtggcttttacaattaaaataaaacatcaataagtctgatcttgtggaaagacacaaatgtgcatggacctggttatgtctgaccttgcactgttcacatacaccactggtgggaatgcaaattagtatagccactatagagaagagtattgtgattcctcaaaaaattgaaaataggccgggcgcggtggctcacacctgtaatcccagcactttgggaggccaaggcaggtggatcacctgaggtcaggagttcgggatcagcctggccaacatggtgaaacctcgtctctactaaaaatactagccgggcatggtggcgggtacctataatcccagatacttaggaggctgaggcaggagaatcgcttgaacccaggaggcagaagttgcagtgagcccagatcgcgccactgcactccagcctggcaacagagagagactccgtctcaaaaaaaaaaaaaaaaaaaaaaaaggtacagatggtaatcatatatgtatactttatatcaaaaataaataattttttttaaaaattccagaggtctttcaagtgaaacacaatatttttttcaagcagaaaacctaagtccgaaggaggactgatgccctcctacccacttctggccaccctatcccatacatttacttagggacttatttagggacacgcagaacatcctcctacacagctcagtgcgtttccagtccctgcagcgcccagtagctaagactggcttctctataagtattttatagattgaacctaaagaatggcaacgatttctaacatctatagaatttttacgaagtcacttcgctctgatattgaagaatacaacgctgttcttcttatcctgtatgttcaggcctgtttcagcttgcaagtaatacgggaagtgaacttcacctcgaggatgatctactgaaaaggaagagagtcgcccacacactcccccttcagctcaaaactacagacaaagcgaagctcaggagactccgttcgcacaaaacgcttaagatgggattcgaaccaccaaacacccaacagaagttccccatatgactcaccgcgtgagcccacctggagccgcacactctccgcagcctcagccagcagagtggcgctaaacctgcagatacaaactccaccctcagccaatcaaaaccccctcccctgccgccggaccaatgaggagcagcagatgtggccgtcaggcgccgcctcaatgcctcctgggagttgtagtttagaagggagagcggaacttagaacccgggttcccctcgggtgatcccgccccctcgactccccagccaatcagcaacattagtctggttagacgctctctttgcttttccccacgagtgaccacggctagataggccgccggccagatgtggcgggggagagccggggctttgctccgggtgtgggggttttggccgacaggggttcccagaaggagaccgctaagctgcgatgctgcgtcgcaggcgggaagcaattatccccgctgttggaactgcggcggcccatggggccccgggcgggaggacaggttcttctgcccacagtgccgagcgctgcaggcacctgaccccactcgagactacttcagccttatggactggtacgagcgacggtttcgggaaacgggcccgggcgagagacacgtcgaggtctggcctgcgagaggggaggacggatctggctggcggaagagaaggcgggactgatgggggggcggaggtctagagagcaggcgtgagagaagtgtcttgatttctcaggaggaaattgagaggcggggactgagggaagcaacgttgaggtgtggagaagggagacgaacgggactggaggggcgggcgctgaagttagaggaaataggggggccgaggctagaggggagggagatttgaggggcggtacctacgggaaagggaaggagaagtcgaggggcggaacttgaggaaagggtacttgaggggcagggcctgggagactggaagacttgaatgaatagggtgagtaaggtttaaagttgggttgatgtatttaagaaaggactgcagaagtgtgatccgagattagggagtaaagcatgaaaagcttaatattgtgggcgaggcctgagggaaaagtgagaattggagggagagggtccaataaatggtttttccccctgagactgaggttcttggagagacggggcagtgtggatagagctgaactggtaaggaaataggacagactctgggagtagaatgtgaaaggggctgaattaaaataaaccgggagagacagggatgaagggacctgggccgtggaaaagttagggtggtattaaagaaaacatgattcagtcacacttgttcaagcaccagaaagactttcttcaagaccatcttgtagaggggccactgcaatagggtcttgcagttggggagagagattggtctcaactccaaaaagggcatgggcagaaggaaatttgtagccaaggagcagagtaaacgggattctggctaagccgacctaacgggattcttgctgaagacaggccaggctgcttagacaccacctgggggatagtagaggatgaagaatctgatcagagatctaggatgatcaaaaatatgaggatcgaggattctagctaaactgacttggcaagattatttgccaaaactgtattttacaagaaagcatacatctgggcctaggagaaggttcagaaatctgactaaagtttggccaggcaaagaatctttgtctgtgtaatttaggaatgtcccttttccttaactatgggatcttccccaccagtcactgaacatgtatgaggggctacagtaacgctgatctttaagttcctcaggcatccccatcttgctcccacctcgaggtccttgctcttgcaattctacctggacgtctctttcctctgatctttgattactcatcatcattcaggtttcagctgagtgtcatctcttt

SEQ ID NO: 2978 - DNA, 6000 bp, Homo sapiens
gcctcccaggctgaagcaattctcctgcctcagcctcccaagtagctgggattacgggcgcacatctccactcctagctaatgtttgtattttagtagagatggggtttcaccatgttggccggctggtctcaaactcctgacctcaagtgatccacctgcctcggcctcctaaccaaagtgctgggattacaggtgtgagccactgtgcctggcctttattattattatttttaaattatttatttatttttattttttgagacacggtctcactcttttttttttttttttgagacaaggtctcactctgctgtccaggctggagtgcagtggtatgatcaagggtcactgcagtctcaacctccttgggctccggtgattctcccacctcaacctcccaagtagctgggactacaggcatgcaccaccacacccagccaccatgctcagctaatttttgtattttttgtagagagagcatttcgccatgttatccaggctggtctcaaactcctgagctcaagcaacgcctgcctctgcctcccaaagttctgggattacaggtgtgaggcaccgcctgtggcccagcgccaggattttaaattgggagactgggcccagacgtggtggctcacacctgtaatcccagctttttgggaggctgaggcggacggatcacctgaggtcaggagtttaagaccagcctgggtaacatggtgacacctccatctctactaaaaatacaaaaattagccaggtatggtggtggacgcctgtaatcccagctactctggaggctgaggcaggagaattgcttgaacccgggaggcggaggttgcagtgagccgagatcgggccactgcattccagcctgggagacagagccagactctgtctcaaaaaataaataaataaataaactgggagaccaggagggcctacctctgaaggggacttgagaaaggtgagaggtgaggggggttggtgctctgcgggaagagcgcaccaggcagtggaaacagcccctgccaaggccctgaggccagaggttcattccatgggaggccagtgaggctacagggctgtgagcaagaagaaaacttacaggagctgaggtcaggagagccaggtgcggggagtggaggacagatcctggagggccgttttcaggccagcccttgatgtttagtaaatctatgagtccttagtcaagactgagattcctggggcaggtactgaaatctttctgggtttatctgcagccatatcgtcattatctgggaattccagggctgtccttgggatcccagcccagtgctcctgcgtgccaagtgatcttgaagggtctgaaatagggagcaggtaaaaaatgtcagtttgggaacacagtggctcacacttgtaatcacagcactttgggagggcgaggcagaagggtcacttgagcccaggagtttcagaccagtctgggcaacacagtaagaccccatctctataaaaaatttaaaaattagctgggtgtggtggtgcatgcctgtagtcccagctacttggaaggctgaggcaggaggatcgcttgagcccaggaatttgaggctacagcgaggtatgatcctgccactgcactccagcctgggtgacagaatgagcctctaaaaaaaagacaaaagccagtttggaaaggtgttgtgagagccactattcctgaaccaatgcagagcagctgaaacccagggtgggccccttgggagctggcaattcaccccacacctattctagcctgatttcatcttcttgttggcttgcagagaaggtagctaggggaactttgccacacccttgggttttttgttttgttttgttttttatttatttttttgagacggagtctcgctctgtcgcccaagctagagtgcaatggtacgatctcggctcactgcaacctccgcctcctgggttcaagtgattctcctgcctcagcctcccgagtggctgggattacaggtgcccgccatcgtgcccagctaattttttgtatttttagtagaaacggggtttcaccgtgttggccaggctggtcttgaactcctgacctcaggtgatcacccgccttggcctctgaagtgctgggattacaggggcgtgcccggccccaccgttgggttttaaagttaggagttaaatctgagaggaatcactgtgaaccaagtcggagagagaagtcaggctgtggggctgctggaacacgtaaggttttgtttttcactttggaccagtctcccctcctcagctgggttttgtgtcatggtttgccttcccttatagcttcactgcaaagctctttggaagggcccacacacaggtcttccagggataggaaggacaaggacttgggcccacaactcaggcagtggacaacagcatgtccttccaatggcaaggcagggaggctccctagcaggcctggggatgagccgggctcctcagcctggctggcccagggaactgagcaggatcttaactggggcagggggtggggtgggggtgctggggtgggaggtgtggttacaagtcctgaatgcagaggggagaacgtgaacgtgctgcagtcagacctggcgatctggctgggttaggaaggggcagggggtctgttccagccaggcccagtttaagggagaggttgatctgtgcccttaggcaagcactgggaggagcctgattccttctctgaaagaatacagtgtaatctgttgttgtttgagaggattaaatgagataacaaataacctcctctcccagggctggttgccttgaaagtgctgaagaagaggagggctttgggaagcagggcccaggttggaaggttaggggtggtaaggactggaggacacaggggcagacttcaccccctgctcaattgtgcccaggcctctctgcctgggctcatgtgaggaaagaaacaaaatgggtggcggtggggtggcgctcaggccggctgagaacttgggcccagagttaccggatctcctaatgcccccagagaaacagggaatctggatctgaaatatgaaatcttccagttttaaaactttggggagtggccaggcatggtggctcacgcctataatcccagcagtttgggaggccgaggcaggcggatcacttgaggtcaggagttccagcccagcctggccaaccccgtctctactaaaaatactgtgtggtcctgggcaaaaattagccaggtgtggtggtgcacatctgtaattccagctattcaggagggaggctgaggctggagaatcacttgaacccaggaggcagaggttgcagtgagccgatattgagccactgcactccagcctgagccacacagcgagactctatctcaaaaccaacaaaaacaaaaagcaaaaaaaaaaaaaaaaactttggggattaattaacaaaacaacaacagaaagcaccgcgcaggccaagtaaagcccaccacctggctggtgaccccctgctctggcaaaggtgtcactgaaggcaggccctcctgggaggaggcttctcactctcctgctcttggaaatgggctctagatagacccagtttcctggtgatcgctgggagaacagagctgtcctgttgggctttgtggtcctgggcaaagcccttcccctctctgggccagtttcctggccggcgaaaggacttagtctgtggggctcctgcccgtttggacacgtgtgtgactcagtccctcagcctcgaggagggaagatacggctattatagaagtgactcctcccaggaactgtgcttccgggattggacgcagggcctcaggcattttgcgtgtccacagtcacaactgtgtgaatataggtgtgtcataattggaagctttgcatggctcagtgtaaatatcatcactttaatgactttgttctgcaacctttcatcgcggctctgcatgccggtagaagcttttattaattctgtgacctggggaggacagggtccttcctcccatttgctgtttaaggaaacccaagctcagagctgggaggtggcttggctaaacgtgcaccactcggagcccagactcaagtgtcggtgctttggtacttgtggcacccctccttcaacaggggagaatgaggttgggatctgaggggtcctctctgtgcccatcacagtttgagcttcagggaaaagaagaagaggtctttgcccttcgtttttccacgggaggagaatgtatgagcccaggctacctttctgggccttgtgtcgacatccctagctgtctcctcaaatctcttgccctgaatcaacctggcctgtgttctctgcggcactcggaacctggaggcggactgagcctccagcagtctaacatcttttgcagtgtcgtgaatagccgcctgttttcgcaggggcccagtgctctgcctggagaggagagagatcctggcaggcggggagaggagactttgggtctagaccctcccctcccatcccctcacctccgctttttgtgcgccctcctcttccctctgtcccccccgcaccccgtcttttccacctgtgccctggactgcattagggtgtcagtatctgtgtgctcccccacccccacgcgtaagcccgcgcgcctgcactgaggctggggaactgcgtctcgcagctgcggcccccagcgcggagggcgcgggccctttaaatcctccggggcggcggcggcgggccggggatgacatcagcgggcgggcccggggctcaatgggagccggcgggcgcgcgcggtgcgagagcgcgcgagccggcggcgggggcgggcgggcgggcaggaggccgggaggagggaggcggcggcggcggcggcggcggcggcgagagcccagagccagagcccggccggggccgagcggagcgcggcggcggcggcggcggcggcggctgggccgggagaggctggcgcgccgggcggctccgcgaatcctccggcatccgccccggcgggccgcccccgcccgcggcagccccccgagcagtggcccggcatcggcgccttcccggcggggtaaatatcggggggccgcgggcccgcggaagggtgcaaacctggggggaatcgggctccctcagcctctttgtttttgctggagagggagggaagggagggcagacacacgcgcgttcgcgctggggtgtagggggggcagcccgggcgccgcccgctcggcccggcgaggacaaaggcgcggctggggacgaggaggagggggcctgttattttgcaggctcgcgggggaggccccccggccggcctgcctccgcttccccccgctgggccctccgaggccccggccggccaggcggccaccccggctgtgatttggggacgctgagggagggggcttggggtgctgggcgccggatactgttgattcgggcccgcgtagcgtttcatcggacaatcaccggcgccccctgctctcccggccccggcgcccggacctgggggttcgcaaggctgcgcccgctcgttggatgacgggcgtttgggggtcctaaggtgaagaggtgtgtggtcaccaggccactgatttgtttttctttgtggagagaaagaaaggggtgggggttatttgtcggatcggattctcccatttttgtgtgagagattgatgtcttgcaagtctctaaggaacgcaaaacagtgtctgggtgtcgttagaggattcccaagctcttgttaataccctaactcgaagtggggtgagccccctccccaacttttcccttagttttcttgcatattttcttcctggcatagcctccttcctggagaaggatttggagagaggagaaggggacacaagtgtctcaagttgcttccaagcaatgcctgtgtttgggtctcctttgccttcgtttctatgatgtcccttcaatttttattttaatcgtccgagggacaagggccccggctcagggg

SEQ ID NO: 2979 - DNA, 6000 bp, Homo sapiens
tgtgctggaatagatcctagatattggtgatacagtggtgcccaaaatagcattaactccttccctttatgcagcttagaccccaaagtaaggaatgcagacaaaaaaataaaaattccctgcagagcatgttagatagtgatgtggagttccctacagagcatgttaaatagtgatacaggccaggagaaaaagagacaggcagcagaggcccggcccggcccggtggctcatgcctgtaatcccagcactttgggaggccaaggcgggtggaccacctgaggtcgggagttcaagatcagcctgaccaacatggagaaaccctgtctctactaaaaatacaaaattagccgggcgtggtggcacatgcctataatcccaactactcgggaggctgaggcaggagaatcgcttgaacccgagaggcggaggttgcagtgagccgagatcgcggtgagccgagatcacgccgagccgagatcgcgccattgcactccagcctgggcaacaagagcaaaactctatctcaaaaaaccaacaacaacaacaacaaaaaaacagaaacagacagcagagaaggggaaggcagtgacccatggggatggggttttattattattattattattattttatttttagtagagacagggttttccatgttgtccaggctggtctcaaactcctaacctcgtgatctgcctgcctcggcctcccaaagtggtgggattacaggcatgagccaccgagcctggcctattttttttttttttttgagatggaatcttgctctgtcatccaggcgggagttcagtggcacgatctcggctcactgcaacctctgcctcccaggctgaagcaattctcctgcctcagcctcccaagtagctgggattacgggcgcacatctccactcctagctaatgtttgtattttagtagagatggggtttcaccatgttggccggctggtctcaaactcctgacctcaagtgatccacctgcctcggcctcctaaccaaagtgctgggattacaggtgtgagccactgtgcctggcctttattattattatttttaaattatttatttatttttattttttgagacacggtctcactcttttttttttttttttgagacaaggtctcactctgctgtccaggctggagtgcagtggtatgatcaagggtcactgcagtctcaacctccttgggctccggtgattctcccacctcaacctcccaagtagctgggactacaggcatgcaccaccacacccagccaccatgctcagctaatttttgtattttttgtagagagagcatttcgccatgttatccaggctggtctcaaactcctgagctcaagcaacgcctgcctctgcctcccaaagttctgggattacaggtgtgaggcaccgcctgtggcccagcgccaggattttaaattgggagactgggcccagacgtggtggctcacacctgtaatcccagctttttgggaggctgaggcggacggatcacctgaggtcaggagtttaagaccagcctgggtaacatggtgacacctccatctctactaaaaatacaaaaattagccaggtatggtggtggacgcctgtaatcccagctactctggaggctgaggcaggagaattgcttgaacccgggaggcggaggttgcagtgagccgagatcgggccactgcattccagcctgggagacagagccagactctgtctcaaaaaataaataaataaataaactgggagaccaggagggcctacctctgaaggggacttgagaaaggtgagaggtgaggggggttggtgctctgcgggaagagcgcaccaggcagtggaaacagcccctgccaaggccctgaggccagaggttcattccatgggaggccagtgaggctacagggctgtgagcaagaagaaaacttacaggagctgaggtcaggagagccaggtgcggggagtggaggacagatcctggagggccgttttcaggccagcccttgatgtttagtaaatctatgagtccttagtcaagactgagattcctggggcaggtactgaaatctttctgggtttatctgcagccatatcgtcattatctgggaattccagggctgtccttgggatcccagcccagtgctcctgcgtgccaagtgatcttgaagggtctgaaatagggagcaggtaaaaaatgtcagtttgggaacacagtggctcacacttgtaatcacagcactttgggagggcgaggcagaagggtcacttgagcccaggagtttcagaccagtctgggcaacacagtaagaccccatctctataaaaaatttaaaaattagctgggtgtggtggtgcatgcctgtagtcccagctacttggaaggctgaggcaggaggatcgcttgagcccaggaatttgaggctacagcgaggtatgatcctgccactgcactccagcctgggtgacagaatgagcctctaaaaaaaagacaaaagccagtttggaaaggtgttgtgagagccactattcctgaaccaatgcagagcagctgaaacccagggtgggccccttgggagctggcaattcaccccacacctattctagcctgatttcatcttcttgttggcttgcagagaaggtagctaggggaactttgccacacccttgggttttttgttttgttttgttttttatttatttttttgagacggagtctcgctctgtcgcccaagctagagtgcaatggtacgatctcggctcactgcaacctccgcctcctgggttcaagtgattctcctgcctcagcctcccgagtggctgggattacaggtgcccgccatcgtgcccagctaattttttgtatttttagtagaaacggggtttcaccgtgttggccaggctggtcttgaactcctgacctcaggtgatcacccgccttggcctctgaagtgctgggattacaggggcgtgcccggccccaccgttgggttttaaagttaggagttaaatctgagaggaatcactgtgaaccaagtcggagagagaagtcaggctgtggggctgctggaacacgtaaggttttgtttttcactttggaccagtctcccctcctcagctgggttttgtgtcatggtttgccttcccttatagcttcactgcaaagctctttggaagggcccacacacaggtcttccagggataggaaggacaaggacttgggcccacaactcaggcagtggacaacagcatgtccttccaatggcaaggcagggaggctccctagcaggcctggggatgagccgggctcctcagcctggctggcccagggaactgagcaggatcttaactggggcagggggtggggtgggggtgctggggtgggaggtgtggttacaagtcctgaatgcagaggggagaacgtgaacgtgctgcagtcagacctggcgatctggctgggttaggaaggggcagggggtctgttccagccaggcccagtttaagggagaggttgatctgtgcccttaggcaagcactgggaggagcctgattccttctctgaaagaatacagtgtaatctgttgttgtttgagaggattaaatgagataacaaataacctcctctcccagggctggttgccttgaaagtgctgaagaagaggagggctttgggaagcagggcccaggttggaaggttaggggtggtaaggactggaggacacaggggcagacttcaccccctgctcaattgtgcccaggcctctctgcctgggctcatgtgaggaaagaaacaaaatgggtggcggtggggtggcgctcaggccggctgagaacttgggcccagagttaccggatctcctaatgcccccagagaaacagggaatctggatctgaaatatgaaatcttccagttttaaaactttggggagtggccaggcatggtggctcacgcctataatcccagcagtttgggaggccgaggcaggcggatcacttgaggtcaggagttccagcccagcctggccaaccccgtctctactaaaaatactgtgtggtcctgggcaaaaattagccaggtgtggtggtgcacatctgtaattccagctattcaggagggaggctgaggctggagaatcacttgaacccaggaggcagaggttgcagtgagccgatattgagccactgcactccagcctgagccacacagcgagactctatctcaaaaccaacaaaaacaaaaagcaaaaaaaaaaaaaaaaactttggggattaattaacaaaacaacaacagaaagcaccgcgcaggccaagtaaagcccaccacctggctggtgaccccctgctctggcaaaggtgtcactgaaggcaggccctcctgggaggaggcttctcactctcctgctcttggaaatgggctctagatagacccagtttcctggtgatcgctgggagaacagagctgtcctgttgggctttgtggtcctgggcaaagcccttcccctctctgggccagtttcctggccggcgaaaggacttagtctgtggggctcctgcccgtttggacacgtgtgtgactcagtccctcagcctcgaggagggaagatacggctattatagaagtgactcctcccaggaactgtgcttccgggattggacgcagggcctcaggcattttgcgtgtccacagtcacaactgtgtgaatataggtgtgtcataattggaagctttgcatggctcagtgtaaatatcatcactttaatgactttgttctgcaacctttcatcgcggctctgcatgccggtagaagcttttattaattctgtgacctggggaggacagggtccttcctcccatttgctgtttaaggaaacccaagctcagagctgggaggtggcttggctaaacgtgcaccactcggagcccagactcaagtgtcggtgctttggtacttgtggcacccctccttcaacaggggagaatgaggttgggatctgaggggtcctctctgtgcccatcacagtttgagcttcagggaaaagaagaagaggtctttgcccttcgtttttccacgggaggagaatgtatgagcccaggctacctttctgggccttgtgtcgacatccctagctgtctcctcaaatctcttgccctgaatcaacctggcctgtgttctctgcggcactcggaacctggaggcggactgagcctccagcagtctaacatcttttgcagtgtcgtgaatagccgcctgttttcgcaggggcccagtgctctgcctggagaggagagagatcctggcaggcggggagaggagactttgggtctagaccctcccctcccatcccctcacctccgctttttgtgcgccctcctcttccctctgtcccccccgcaccccgtcttttccacctgtgccctggactgcattagggtgtcagtatctgtgtgctcccccacccccacgcgtaagcccgcgcgcctgcactgaggctggggaactgcgtctcgcagctgcggcccccagcgcggagggcgcgggccctttaaatcctccggggcggcggcggcgggccggggatgacatcagcgggcgggcccggggctcaatgggagccggcgggcgcgcgcggtgcgagagcgcgcgagccggcggcgggggcgggcgggcgggcaggaggccgggaggagggaggcggcggcggcggcggcggcggcggcgagagcccagagccagagcccggccggggccgagcggagcgcggcggcggcggcggcggcggcggctgggccgggagaggctggcgcgccgggcggctccgcgaatcctccggcatccgccccggcgggccgcccccgcccgcggcagccccccgagcagtggcccggcatcggcgccttcccggcggggtaaatatcggggggccgcgggcccgcggaagggtgcaaacctggggggaatcgggctccctcagcctctttgtt

SEQ ID NO: 2980 - DNA, 6000 bp, Homo sapiens
aaggatgcagtcgactaaatccagactgtggggctcagtctagaatcttactcggtgacgaaaaggaaggaggacctgacacacattacaacatggatgaaccttgaaaacacgacactgagtgaaagaagccagacgctgtctccatttacatgagctgtccaaaagaggcaaatccagagacaaaagtccattagcggtccccagaggctggggggagggctgaagtggggaacgactgcgagtggagatggggtttcttttttttttttcttttttttttttgaggcagagtcttgctctgtggcccaggctggagtgcagtggcgcgatctcggctcactgcaggctgtgcctcccgggttcacaccattctcctgcctcagcctcccgagtagctgggactacaggtgcccgccactacccctggctaattttttgtgtttttagtagagacggggtttcaccgtgttagccaggatggtctcgatctcctgatctcgtgatccgcctgcctcagcctcccaaagtgctgggattacaggcgtgagccaccgcgcccagctgggggttttttttaggtcaataaaaatattggggaattaggctgggcatggtgcctcacgcctgtagtcccactgctttgggaggccgaagtggacagattgcttgaggtcaggagttcaagaccagcctggcctacgtggtgaagccccatctctaccggaactacaaaaattagccaggcatggtggcaggtgcctgtcccagctacccaggaggctgaggcaggagaatcgcttgaacctgggaggtggaggttgcagtgagctgagatcatgccacagcactccagcctaggtgacagagtgagactccatctcaaaaaaaaaaaaaattggggaattagatagtattagtggttgcaaaaccttgtgaatatactaaaagctactgacattttcttttcttcttttgagatggacttttgctcttgttgcccatgccggagtgcagtagcgcaatctcggctcactgcaacctctgcctccctgtttcaagtgattctcctgcctcagcctcctgagtagctgggattacaggctcctgccaccatgtccatctaatttttgtatttttcgtagagacagggtttcaccatgttggccagattgatctcaaactccagaacctcaggtgatctgcccgtcttggcttcccaaagtgctggaattacaggcttgagccattgtgcccggctatatataaaatatatattttatatattgtataaaatatatattttatatattgtataaattatatattttacatattgtataaaatatatattttatatattgtataaattatatattttatatattgtataaattatatattttatatattgtataaattatatattttatatattgtataaattatatattttatatattgtataaattatatattttatatattgtataaattatatattttatatattgtataaattatatattttatatattgtataaattatatattttatatattgtataaattatatattttatatattgtataaaatatatactttatacattgtataaaatatataatttatacaatatataaattatatattttatacaatgtataaattatatatacttttatatattatatatttatatgtaatatatatattatgtataatatatatattacattattggtggatgggcctgatagctgacctctcagtcttgcagcttgaactctgggaagctctgtcctccctgggtcctttctgggttggcactgccagcctcaaagccccctgggtgggaggaaggggctccccctcaggaagaaggcagggtgagactcctgcccctcacactctgtggtttccttccacactgcctttttttgaagctgttgcccaagggtaaacaaactctgctccttgactccctttagcccagtgggggctggtagccttttagcctggtggctaaccaggagtttgcctaagaggccctgttgggcttagaacagaaaggcctctggccctttctacacatgtgactttgggaatcaacctctcagaccctcctttcctcatctgtaacatgaacaaataagaattcctaccccaggactatggcaaggattacatgaaagaggcttatcctagattatagtaggtgctcaactaatgggaactttttttttttcttgagtcttgctctgtcacccaggctgaagtgcagtggcgtgatctcagctcactgcagcctccgcctcctgggctcaagccattctcctgccccagtttcctgagtagctgggattacaggtgcccggcatcatgcttggctaatttttgtgtttttatttttacgtttttatttatttttattttttagatggagttttgctgttgtcactcaggctagaatgcaatggtgtgatatcagctcactgcaacctccgcctcatgggttcaagcaattctcctgcctcagcctcctgagtagctgggattacagatgtgtgccgccctgcctggctaatttttgtatttttagtagagatggggtttcaccatgttggccaggctggtctcaaagtcctgacctcaagtgatccacctgccttggcgtcccaaagtgctgggattacaggtgtgagccaccgtgccctgaaactgggaactttttaaggaatgaagaaacttagctgggcgtagcggctcacgtctgtaatccctgcactttgagaggccaaggcaggcggatcatctgagttcaggagttcgagaccagcctggccaatgtggtgaaaccccgccttgactaaaaatacaaaaattaggtcgtatgtgatggctcacgcctgtaatcccagcactttgggaggccaaggcaggtggatcacgaggtcaggagatcgagaccatcctggctaacatggtgaaaacctgtctctaccaaaaatacaaaaaactagctgggtgtggtggcgggcacctatagtcccagctactcgggaggctgaggcaggagaatcgcttgaacctgggaggcagaggttgcagtgagccgaaattgcaccattgcactccagcctgggcaacagagcaagactccgtatcaaaaaaaaattttttttaattaaaaaaaaagaaatgaagaaactttataaaagtgatataagcttattagatgttgaaaaagcaggaaaacagaaggataataaagaagcctcatagtgccaccacccagaaataatcgtagtgaacattttccttccagactcttccttgtgcataaattgttttgcttttaagtatagctgtgaccctgctgtcaccacacattgacatcctgcttttattctcttcatattataacatatttcctcatattattataagctgtttgtaaacataacttaatgcttgcataatattctatcgtgtgtttgctctgttaaagaacccccttctctggacacttagaccagccccaaccctccccattataaagaactccacaatgcctgggtgcagtggctcacgcctctaactctagcactttgggaggctgaggtaggttcatcacttgagcccaggagttcaagactagcctgggaaacatagtgagaccccaccttttttttttttttgagacaggatctcactctgttgccaggccggagtgctgtggtgcgttctctgctcactgccacctccccctcccaggttcaagctatcctcctgcctcagtctcccaagtagctgggactacaggcatgcaccaccacacccagctaatttttgtatttttagaacacacgaggtttcaccatgttggtcaggctggtcttgaactcctgacctcaagtgatccacccacctctgcctcccagagtgctggaattacaggcatgagccaccacgcctggccagagaccccatctctacaaaagatggaaaaattagaaaggtgtggtgctcgcctgtagtcccagctactcaggagactgaggtgggcagatggcttgagcccaggagttcgaggctgcagtgagccgtgatcacaccactgcactccagcctgggcaacagagcaacaccctccctgcttcaaaaaaaaagtaaataaaaagatctccacaatgaacaggtattctgcatgacttccttggaagagatttccagaaatggaattgctgccctaaggcaaacgctaatttacgactcttgggcagctggaacctgtccgacagagcggagacccttatctctgccaccaccagcaggctgatattttcaagaaaaaaatttgccaaatacaagcagtctcagataatacaaagaagatggaaagtttccggagcgcaggtgtcagatccaaagataacttgacccaaacaccccgatctccatgtccctatctctctcttaggtgttggagcgggccggagagaagtagagtgggctgcgaggagaaggaaacaggcctttcggaggctcctcatccctcggaggtcatcccttactccaggtgatctgaacctgaagtccgaggccccaagagttctaagtaacccaggggtggaggtggggtgggggatcccagctctttccgatctgggagatcagaaagatgctcatctgggagagtgggacctcccctttcagtccgcccacccccgaggaccgcacttggagggccgcacttggaggaccgcgcctccaaggcgggcgcggctgacgcccggggcccaggccatgtggggcgtgcgtgccgggagaagtgtcccagcgcctcaccccgcaagcatgagaaccacgaaacccccggggccgggaaaccggggcggggcggggcggggcggggccgggaagcggcgcggggctgggccggtgacgtcgcggccccgcccccggccggctccctcctcccggagcgctccccagcggagtcctcacctgcaggcacaggtgtgcgcacttcgcatctcgaaggccggccagcaagcttcaggtgagcgccagcagcagctgggggtaggtgctgggaggaggagggcccggggtgggggtcctcactcgacggagaggagaaccgggtcaaaggagaggaggaggaggtgggcgtgggtctgtggagatactgcctgctccccccaaatcctcccttgtctctgggttatagtcacgttgtcctgaaaacgtagactttggagggaattgaaggagaggaagttgaagaggaagcagcaggtttccaaatatttcaaccgcaaatgtattgttatcattcttcttattatttatttgtttgttttgtttttttgagacggaggctcactctgttgctggcacgatctcggctcactgcaacctctgcctcccgggttcaagaaattctcctgcctcggcctccctagtagctgggattacaggcatgcaccaccacgcccggctaatttttgtgtgtttttagtagagacagggtttcggctggtctccaaactctgacctcaggtgatccgccctcctcggcctcccaaagtgctgggattacaggcgtgagccaccgcacccggccctataattctttttattattatcattattatcattggtgccttttctttgttgtaaaactgtatgccgattgactatttggcaaatgtagaaaagtaggaaagaaatcatccatagtaccaggacacaatcactctggatattttggtgtgtttcctttcagtcttttttccatgcacaaccattttcatataattttatcatactgtatctgcaacttttatgtcctgcttttcccttgaatattgtgtcataagcattttctcgttgtggtgagtcatttgtgtatgtgtaatcattgttttaatggctgcataatgtaacatttgagagattgaccatggttgggtaccattctgaacactcca

SEQ ID NO: 2981 - DNA, 6000 bp, Homo sapiens
cagagattgcagcgagccgagattagtcactgcactccagcctggcgacagagattccatctcaaataaaaaaataaaattattgaattaattattttagaaacagtcttgttctctcacacaggctggaatgcagtggcgcaatcatagctcactgcagccttgaacttctgggcttgagcgatcctctgccgtggcctcccaaagtattgggattacaggcatgagccaccttgcctggcctgccgattgacctcttttggtgtagattaacagagtcctctgtccttcctactaaggacctagagaggcttaatctgattcaggttttctttcttcagcatgactttatcataagtaacatattttttcctaaaaaggtatataatgtctggtcatctccaagtagctgggattacgggcatgtgccactatgcccagcaaattttctgtatttagtagacatggggtttcatcatgttggtcaggctggtctcaaactcccgacctcaggtgatagcctgcctcagcctcctactcccaaagtgctgagattacagccgtgagccactgtgcatggcctgctgcttcttaataagtttaattagctgtctcctggagaacaaaatggcaatgtgtgtcaagaaccttaaacatgcgatgacgcgatcttggctcaccgcaacctccacctcccgtgttcaagcgattctcccgcctcagcctcctgagtagcaggattacaggcatgcgctaccacgcctggcttattttgtatttttagtagagacaggatctcaccatgttggccaggctggtcttgaactcctgacctcaggtgatctgcccaccttggcctccaaaaatgctgggattacaggcatgagccaccgtgcctgacctattttattttattttattttatttttgagacggagtctcgctctgtcgcccaggctggagagcagtggcgcaatctcggctcactacaagctccgcctcccgggttcacgccattctcctgcctcagcctcccgagtagctgggactacaagcgcctgccaccacgcctggctatttttttgtatttttagtagacacagggtttcaccgtgtttgccaggatggtctcgatgtcctgacctcgtgagccacccgcctcggcctctcaaagtgctgggattacaggtgtgagccaccgcgcccggccttattttttattttattattatttttttgagacagagtctcactctgtcgcccaggctggagtgcagtgatgcaatctcagctcactgcaagctctgcctcccgggttcacgccattctcctgcctcagcctccagagtagctgggactacaggcgcctgccaccacgcctggctaattttttgtatttttttagtagagacggggtttcaccatgttagtcaggatggtctctatctcccgaccttgtgatccacctgcctcggcctcccaaagtactgggattatagaggtgagccaccgcgcccggcccctattttattttttttgagatagagtttcactctgttgcccagactggagtgcagtgttgcaatctcagctcactgtagcctctgcctccccggttcaagcaattctcgtgcctcagcctcccaagcagctgagactacaagtgcatgccaccacagactcagctaacttttgtattttttagtagagatggggttttgccatgttggccagggtggtctcgaactcctgacctcaagtgatctgcccgcctcagcctcccaaagtgttgggattacaggcgtgagccaccacacccagacaaattacagtatatttattgagattacaagtgtgagccaccacacccggccaaattatggtatatttaaaatgagctataggccacgcacagtggctcacacctgtaattccagcactttgggaggccgaggtgggtgaatcacctaaggccaggagttcaagaccagcctggccaacatggtgaaacactgcctctactaaaaatacaaaaattagccgagtgtggtggcgcacacgcctgtcatcccagctgcttgggaggctgagatgggagaatagcctgaactggggtggcggaggttgcagtgaaccgagattgagtcagtgcactccagcctgggcgacagagcaagactctgtctcaataaataaataaatgtatatgcactatcgttacaatacaagaaatcagataggccaggcgcagtggctcacacttgtaatcccagcactttgggatgctgagtagggcggatcacaaggtcaggagatcaagaccatcctggctaacacagtgaaaccccgtctctactaaaaatacaaaaaactggccgggcgtggtggtgggcgcctatggtcccagctactcgggaggctgaggcaggagaatggcatgaacccgggaggcggagcttgcagtgagccaagatcgcgccactgcactccagcctgggcgacagagcaagactgtctccaaaaaaaaagaaaaagaaatcagatacagtctgggcatggaggctcatgactataaacctagaactttgggaggccaaggcttgggggtatcgcttgaggccaagagtttgagaccagcctgatcaacatagcaagatcctgtctctacaaaaaattaagaaattattgggagttggcggcacttgtagtcccagctactgaggtagctgaagcaggaggatcacttgagcccgggagtttgaggttacagtgagctacgatgatctcaccactgcactccagcctgtctctattaaaaaattaaaaaatatatatatttcattaggaaataaatattgaaagatacttgaaagaaaaatacaaaaatgtcaaaatgctggtagtggttgtgttagagtggtagattatagcaaatttttttcttttttgtatttcctatgtttctcacttttttttttttcctgagagagtctcattctgtcacccaggctggaatgcagtggcgccatctcggctcactgcaagctccacctcccaggttcgcaccattctcctgcctcagcctcccgagcagctgggactacaggcgaccgccaccacgcccggctaattttttgtattttttttttagtacagacggggtttcaccgtgttaaccaggatggtcttgatctcctgacatcgtgatccgcccgcctcggcctcccaaagtgctgggattacaggcttgagacaccgcgcctggccgtttctcatttttaataaaaatattcaaaatttttctgctcaggagttaaattaaccagtatgaagattacatgtacccctatttctcttcctttgttttatgtgttactgtgttgcctgcacatacactcccaaacgtggaggctatagtgagggaatcaatcactttcctgtaactgtgttgcttgcgtttattctttggttggtgtagttattgcagggtgggggcatttttacactgaggtcctggaatggtaacactactttcctggatgagaagggtctcacctgaaccacttaagatgacaaaaaatacctatggtcatggccatttatcagggaccaaaagatgtcaaactaccagtgtccaaaaaaaacttagggcacactagagtaagatctgcatataagagcctagggtagctctgcgaagttcaaaggaagaaaagaatttcagaattatctgggaggagaagggcaggccatcaaacagcaaagtccatccagcagagataggcagggaaggtctttcttccacacaccgaatggcactacatgctgaagtcacttaccacttgcttcaaggttctcttcttgttcttcctctgcttcttcatcgccctcggttttgtaatatgactcccaccctgacatgttggctactgctcactaggcgaaagacgttaacgtcagtaacaggcaaatttaaatcgaaaaaataccgacctctaggttcttgtgagatctgttctaaaagcttggttagtagtgaggaatgtggacggtaaatcctgctgcctcgaaagctcggcagtcggactgcatgtaaatgcgcatgggggccatcccagtagctgcctcatctcagctatccctcacgtttcagggccggcggcggcccgcggaagccagatcccggaggtcccgcccccgacgccatttagacggtgagggattcccgctccaggattctatgctgactaacggaccccctcgtcctcaataccgcccaaaaacctccccaaattcctcaatcacgcccaatgagatctcaaacgcagacaggcctcaagcgcaggcgggccgcaagcgcaggcgggcctcaaacgcaggcgggcctcaaacgcgaggtgccgcctccttcccgaggaaggagcgtggtctcgagtctgtcgctgctcctcggattcgcacacttaaggctaacgctaaccctctagcaaggctatgggggcgcgcgagaccgaccgagcgaagcgggacgaggccaggcctagctggcgaacaacacaaatggataacggcccgcttacctttggcgcagggaagcgaccaacttggacagaagacgacaatccacgcatgcgcgggccctgtactcggtcccaatcaacgccctctacgtcatcacgcatgtgcgcactatatcgcgtcaggctggcacgcacactccccaaccagcttctacctatgtccctgacgaaagccaacccatcagcgagagccccgcccccttcggcaaagccccgccccttcctacgtcaggactgtaagcacatgcgcaaaagtgcatccctgcccccgccccctcttccgtgtgggccctccctgtcccctctctgtcacctcacagtagtcgttgccggtagcgggtgtgggggcgcgagcagcgcagggcggcctctcccccacccctcagcccgggcccgggctcggtccccccctctccctccgcttcgcactcccgtcgggtacgggaaggtccaagccgctgccgggtgcccgagggccgtcgtggccgccgtcgccacgggtcccaatggagccgccgaatctctatccggtgaagctctacgtgtacgacctgtccaaaggcctggcccggcggctcagccccatcatgctgggtgagggggaaggggccaggtgggcaggagggcgggagccaggccagagggtggcggctggccgaggtggggagacttgggccacgactcacggggagacacatggccaggaggatggaagaaaagccgagtggagaagagagtggtctgaagtttgggccatctgagccccgctttagcctcgcagataccatcctcacgtttgaattcaaggggaagggatggaggagtcatgcctccaccttgcagggggcttgggcagaaaccgagccctcgagagccccttcgacgagggtgtggggtaaaccagcgctggatcccggcgggttctctgcctcgctcgggtagcccagtgcactcctgcctccttggcgcggtgtaggaaaggtgaggatgcctgccgcgcggtgcccctcgtggtgacagagacactgcggaggtcgggtggctctcggagaaccttgtctcagtgccaaaaggaagctccctttgcagtcccagggataggtgggatgggggagatagagctgcctagggacccagccatcgcccccaggtaggtcaagtcaggataagaggagccccgaactccagaattcaccaagcagtcttctccccacagtttctaagttaattgcttttgctcaaatggcaagaaagcagttttgggggaagtttggatgaggctgtgtgaataaggattagtaaagaaagtatttcggttgtgctccattaaactacttaactggcaggagaaaaaccagccctcattcagtgacgatcacaccttatttcaacttaaatacaggaatgtcttgtgtaacac

SEQ ID NO: 2982 - DNA, 6000 bp, Homo sapiens
acacacacacacacacacacacacacacacttctgcatgtactgtggcacaaaaagaggtcaagaaacttaaagagcagccaaaattattaagaggaggaactgaaggacacttataatagctaattattttaggcaattggtgactatgaaaaaaggtgcaatgaggctatctgctcaattagaatgctgaagataattttgggaccatttttcatagtgaatgaaaagctatagaacagtaatgccttcacttgaggcaattccaggaggctgaaaacaggacaggctaaaactacggaatttacattgcttcaggaaaggggaattaccttgggctttatctagtctaatcctgaactgcgacagagctagatgaggtctcccattggagaactgacataactgaagcctgagagggtactgcagatgagatcacatggatttaatttgggaaaatggagactaagaggcatgatcataaatctagattgtaagtggcacatacacattgaacccagctttttttctcatccaaacttgaaacatttggcaaaggatgcctttacaaacttcaggaaggcatctactttacttcaattttaaaggaacgtattacacagaggtggtatctcaaaatgacagagaacgcgagctctggaagtcagactgcctgtgttcataacccagctctaccacctagtagctctgggacctggggcaaattccttaacactctacttctcaggttcttcaatcaagaaaatggaggcaataacaggacttatctcacaaagttgtggtgaggattataatgcacgcaaagtactcagaaaaaaagggtctgacacatggtaagctctcaataaatagtggctattaatatacttctagaattcatcataaaaatcaggaaacaaattgattttttaaaggttcaaatgtatttaggaatgggaaatcaatatatggctacttatagcactgggacatacccaacttcaagatttgtgttgtctgaatgggatgaatcagtaagaccatgcctattttccttaagtgttcaactctagaaagtaatgactactagctttgctaattctttcttcattaattttgcaaaaggtataaaagcaatatggaaaaaagaggtagagaagacagaagtagattagcacacaaggtgatttcctcagatcagaatctgatgtgcccaatgaatgggtgatgttcccatgtttggctgaggcattccaggactttacatctatataaaagggcggggagtgggaagggggcaggtctattactccatcttcagttacagcactttccccttcacccactacactccacaaaagccttctttcagttccagtatcaggccagactctttcctgtctcagggctttggcaggttgatctttctcctacctggaacactgttactcccttactaccctcctgtggctacttcttcctcatcctaaattcccactttcaaagtcactacccttgatacccttatttaaaataggtctcttcactgggtgcagtggctcatgcctgtaatcctagcactttgggaggctgaggcgggcggatcacttgaggtcaggagttcaagaccagcctggcaaacatggtgaaaccctgtctctactaaaaatataaaaatcagccaggtgtggtggcatgcgcctgtaatcccagctactctggaggctgaggcaggagaatcacttgaacctgggaggcagaggttgcagtgagctgagatcaccccactgcactccagcctgggcaacagagcaagactcgtctaaaaaaaaaaaaaaggtctctcttgttattttctatcacagcacccagtgtgcttcctgtgcagaaggcacttatgcaatttgtaactaattatttatgtatttatttttaatgtctcccccattagatagctccatgatggcaaagaacatctttgttcattatatcaacctcatttaccttaacacgttgactagcatagagcagacgctcaataaacatctgctgaatgaatgaaataatgactcctaaggctcctttcagctgcccaataattattaggtaataggataaaaaatacccagtgtaaagggggaggttttacgtggggtataggaaatatctgattcctcactatgataaaaaaacaaacaactaaatggctccattccaagaagtttagttaaaacttgactgatgtgggctgggcatggtggctgacgcctgtaatcccagcacgttgggaggccaaggcaggcggatcacaaggtgaggagatcgagaccatcctggctaacacagtgaaaccccgtctatactaaaaatacaaaaaattagccggctgtggtggcgggcgcctgtagtcccagctactcgggaggctgaggcaggagaatggcgtgaacccgggaggcggagcttgcagtgagcctagatcgtgccactgcactccagcatgggtgacagagcgagactccgtctcaaaaaaaaaaaccaacaaaaaaaaaacacttgactgatgtaatctattaatgagtaacagcttcctcagtgactttgtaagttttgctttcagatgtgcctcaatcattttaacaactggttatctaggcccaaatccctgtcaaataatgggttggctacataagaattagctgataagctcattaaaaatacagatttttggaccaaaactccaggagattctgatttagtatttgtgaagccttagaatccatataattaaaattttctcattttaaatagatattatgtgtatgtaatacacaggtccagaggtaagaaacagtttacagcaaagtttctcttctacccctgttcccctggcatcaagttcccctttccataagctactgctgttatcaatttcttgtgtatccttacggataattatttgcctaagcaagcacatatatatcctttgatttgcatatttaaagagctattctaaccttgttttttctaatctcatttacaatatatgttggaaatgagggtatctgcatttttaacaagcaccctagatgattttgatgtgaagccaaatatagaaacaactcatggacccacggttgtgagattaagttcaattcactacgacatattagaaactcaaggacattgaaggatgccctcaaaagtagcctcccttacttgatctctgccccctcgtctcacagagatgaactaaatcattcgccagtgtctccacagaagccaggaaaaactagccattcaaatggatgctgtcaaagcttcaattttcaataattggaattctttcctgctcattgttacccgaaattacaaacctgacaattcctgtgttacacaagacattcctgtatttaagttgaaataaggtgtgatcgtcactgaatgagggctggtttttctcctgccagttaagtagtttaatggagcacaaccgaaatactttctttactaatccttattcacacagcctcatccaaacttcccccaaaactgctttcttgccatttgagcaaaagcaattaacttagaaactgtggggagaagactgcttggtgaattctggagttcggggctcctcttatcctgacttgacctacctgggggcgatggctgggtccctaggcagctctatctcccccatcccacctatccctgggactgcaaagggagcttccttttggcactgagacaaggttctccgagagccacccgacctccgcagtgtctctgtcaccacgaggggcaccgcgcggcaggcatcctcacctttcctacaccgcgccaaggaggcaggagtgcactgggctacccgagcgaggcagagaacccgccgggatccagcgctggtttaccccacaccctcgtcgaaggggctctcgagggctcggtttctgcccaagccccctgcaaggtggaggcatgactcctccatcccttccccttgaattcaaacgtgaggatggtatctgcgaggctaaagcggggctcagatggcccaaacttcagaccactctcttctccactcggcttttcttccatcctcctggccatgtgtctccccgtgagtcgtggcccaagtctccccacctcggccagccgccaccctctggcctggctcccgccctcctgcccacctggccccttccccctcacccagcatgatggggctgagccgccgggccaggcctttggacaggtcgtacacgtagagcttcaccggatagagattcggcggctccattgggacccgtggcgacggcggccacgacggccctcgggcacccggcagcggcttggaccttcccgtacccgacgggagtgcgaagcggagggagagggggggaccgagcccgggcccgggctgaggggtgggggagaggccgccctgcgctgctcgcgcccccacacccgctaccggcaacgactactgtgaggtgacagagaggggacagggagggcccacacggaagagggggcgggggcagggatgcacttttgcgcatgtgcttacagtcctgacgtaggaaggggcggggctttgccgaagggggcggggctctcgctgatgggttggctttcgtcagggacataggtagaagctggttggggagtgtgcgtgccagcctgacgcgatatagtgcgcacatgcgtgatgacgtagagggcgttgattgggaccgagtacagggcccgcgcatgcgtggattgtcgtcttctgtccaagttggtcgcttccctgcgccaaaggtaagcgggccgttatccatttgtgttgttcgccagctaggcctggcctcgtcccgcttcgctcggtcggtctcgcgcgcccccatagccttgctagagggttagcgttagccttaagtgtgcgaatccgaggagcagcgacagactcgagaccacgctccttcctcgggaaggaggcggcacctcgcgtttgaggcccgcctgcgtttgaggcccgcctgcgcttgcggcccgcctgcgcttgaggcctgtctgcgtttgagatctcattgggcgtgattgaggaatttggggaggtttttgggcggtattgaggacgagggggtccgttagtcagcatagaatcctggagcgggaatccctcaccgtctaaatggcgtcgggggcgggacctccgggatctggcttccgcgggccgccgccggccctgaaacgtgagggatagctgagatgaggcagctactgggatggcccccatgcgcatttacatgcagtccgactgccgagctttcgaggcagcaggatttaccgtccacattcctcactactaaccaagcttttagaacagatctcacaagaacctagaggtcggtattttttcgatttaaatttgcctgttactgacgttaacgtctttcgcctagtgagcagtagccaacatgtcagggtgggagtcatattacaaaaccgagggcgatgaagaagcagaggaagaacaagaagagaaccttgaagcaagtggtaagtgacttcagcatgtagtgccattcggtgtgtggaagaaagaccttccctgcctatctctgctggatggactttgctgtttgatggcctgcccttctcctcccagataattctgaaattcttttcttcctttgaacttcgcagagctaccctaggctcttatatgcagatcttactctagtgtgccctaagttttttttggacactggtagtttgacatcttttggtccctgataaatggccatgaccataggtattttttgtcatcttaagtggttcaggtgagacccttctcatccaggaaagtagtgttaccattccaggacctcagtgtaaaaatgcccccaccctgcaataactacaccaaccaaagaataaacgcaagcaacacagttacaggaaagtgattgattccctcactatagcctccacgtttgggagtgtatgt

SEQ ID NO: 2983 - DNA, 6000 bp, Homo sapiens
cccgggctcaagtgatcctcctgcttcagctacctcagtagctgggactacaagtgccgccaactcccaataatttcttaattttttgtagagacaggatcttgctatgttgatcaggctggtctcaaactcttggcctcaagcgatacccccaagccttggcctcccaaagttctaggtttatagtcatgagcctccatgcccagactgtatctgatttctttttctttttttttggagacagtcttgctctgtcgcccaggctggagtgcagtggcgcgatcttggctcactgcaagctccgcctcccgggttcatgccattctcctgcctcagcctcccgagtagctgggaccataggcgcccaccaccacgcccggccagttttttgtatttttagtagagacggggtttcactgtgttagccaggatggtcttgatctcctgaccttgtgatccgccctactcagcatcccaaagtgctgggattacaagtgtgagccactgcgcctggcctatctgatttcttgtattgtaacgatagtgcatatacatttatttatttattgagacagagtcttgctctgtcgcccaggctggagtgcactgactcaatctcggttcactgcaacctccgccaccccagttcaggctattctcccatctcagcctcccaagcagctgggatgacaggcgtgtgcgccaccacactcggctaatttttgtatttttagtagaggcagtgtttcaccatgttggccaggctggtcttgaactcctggccttaggtgattcacccacctcggcctcccaaagtgctggaattacaggtgtgagccactgtgcgtggcctatagctcattttaaatataccataatttggccgggtgtggtggctcacacttgtaatctcaataaatatactgtaatttgtctgggtgtggtggctcacgcctgtaatcccaacactttgggaggctgaggcgggcagatcacttgaggtcaggagttcgagaccaccctggccaacatggcaaaaccccatctctactaaaaaatacaaaagttagctgagtctgtggtggcatgcacttgtagtctcagctgcttgggaggctgaggcacgagaattgcttgaaccggggaggcagaggctacagtgagctgagattgcaacactgcactccagtctgggcaacagagtgaaactctatctcaaaaaaaataaaataggggccgggcgcggtggctcacctctataatcccagtactttgggaggccgaggcaggtggatcacaaggtcgggagatagagaccatcctgactaacatggtgaaaccccgtctctactaaaaaaatacaaaaaattagccaggcgtggtggcaggcgcctgtagtcccagctactctggaggctgaggcaggagaatggcgtgaacccgggaggcagagcttgcagtgagctgagattgcatcactgcactccagcctgggcgacagagtgagactctgtctcaaaaaaataataataaaataaaaaataaggccgggcgcggtggctcacacctgtaatcccagcactttgagaggccgaggcgggtggctcacgaggtcaggacatcgagaccatcctggcaaacacggtgaaaccctgtgtctactaaaaatacaaaaaaatagccaggcgtggtggcaggcgcttgtagtcccagctactcgggaggctgaggcaggagaatggcgtgaacccgggaggcggagcttgtagtgagccgagattgcgccactgctctccagcctgggcgacagagcgagactccgtctcaaaaataaaataaaataaaataaaataggtcaggcacggtggctcatgcctgtaatcccagcatttttggaggccaaggtgggcagatcacctgaggtcaggagttcaagaccagcctggccaacatggtgagatcctgtctctactaaaaatacaaaataagccaggcgtggtagcgcatgcctgtaatcctgctactcaggaggctgaggcgggagaatcgcttgaacacgggaggtggaggttgcggtgagccaagatcgcgtcatcgcatgtttaaggttcttgacacacattgccattttgttctccaggagacagctaattaaacttattaagaagcagcaggccatgcacagtggctcacggctgtaatctcagcactttgggagtaggaggctgaggcaggctatcacctgaggtcgggagtttgagaccagcctgaccaacatgatgaaaccccatgtctactaaatacagaaaatttgctgggcatagtggcacatgcccgtaatcccagctacttggagatgaccagacattatatacctttttaggaaaaaatatgttacttatgataaagtcatgctgaagaaagaaaacctgaatcagattaagcctctctaggtccttagtaggaaggacagaggactctgttaatctacaccaaaagaggtcaatcggcaggccaggcaaggtggctcatgcctgtaatcccaatactttgggaggccacggcagaggatcgctcaagcccagaagttcaaggctgcagtgagctatgattgcgccactgcattccagcctgtgtgagagaacaagactgtttctaaaataattaattcaataattttatttttttatttgagatggaatctctgtcgccaggctggagtgcagtgactaatctcggctcgctgcaatctctgcctcccaagttcaagtgattctcctgcctcagcctccctagtagctggaattataggcatgcgccaccacacacagctaattttttgtatttttagtagagatggcgtttcaccatgttgtccaggatggtctcaatctcttgaccttgtgatccacatgtctcggcctctgaaggtgctgggattacaggcatgagccaccgtgcttggccatttatttatttttattttttttgagacgggttctcgctctgtcacgcaggctggagtgcagtggcgcgatcttggctcactgcagcctctgcgtcccagattcaagcgattctcccacctcagcctccatagtagctgggattacaggcatgcgccactacacgcagctaatttttgtatttttagtagagatggggtttcaccatgttgtccaggatggtctcaatctcttgtcctcgtgatccacatgcctcggcctcccaaagtgctgggattacaggcgtgagccactgtgcccagccaaaataattttttattttttatttatttttttgagacagagtcttgctctgtggcccaggctggagagtagtggtgtgatctctgctccctgcaacctctgcctcccaggttcaagtgattctcctgcctcagcctcctgattagctgggattacaggtgggcaccaccacacctggctaatgtttgtttgtttttttttttgttttttttttttgagaccgagtctcactctgtcacctaggctggagtgcagtggcgtgatctcggctcactggaagctccccctcccgggttcatgccattcccctgcctcagcctcccgagtagctgggactgcaggtgtccaccaccacgcccagctaatttttttttgtatttttagcagagacagggtttcaccgtattagctaggatggtctcgacctcctgacctcgtgatccgcgcgcctcggcctcccaaagtgctgggattacaggtgtgagccactgcgcccagcctaatgtttgtattttcagtagacacagggtttaaccatgttggctaggctggtctcgaactcctgatctcaagtgatcctcccgccttggtctcccaaagtgttgggattacaggcatgagccactgtgccccgcctaattaatttttttaaaaaggcaatcagcaaaattcagaatgtggaaaagtgtataacacaaagcatcttggctcttcagaagataaattacaagggaaaaaagagagggtatctgtagatgaagaggctttagaaaattaagtcaaagctaatgtttagaaatgtaggtttgggtgataaaattataaagaaacgtaaggggtgggtgtgtggtagatcatgcctataatcccagctcttaggccagggcggggtggggtgcggtggctcacgtctataatcctagcactttgggagtctgaggtgggtggatcacctgaggccgggagttcaagaccaacctgggccaacatggtaaaactgcgtctctactaaaaatacaaaattagctgggagtggtggcgggcgtctataatcccagctagttgggaggctgaggcaggagaatcgcttgaacctgggagacggaggtcgtagtaagccgagattgtgccactgtactccaccctggcaacagagcgagactccgtctcaaaaaaaaaaaaaaaaaaaaatagaggcctggtggggaggattgcctgagctcagaagttttagatcagcctgggcagtgtagcacaataccatctctacagtaaacttaaaaaattagctggtcatggtggcacacacctgtagtcccagttgctcaggaggctgagtcaggatgatggcttgagcccaggagttcgaggttgcagtgagctatcatcgcgtcactgcactccagcctgggtgatgggagtgtgaccctatctcagaaaaaaaagtcaggatattgacttttttggggaggtgggtgttgtaattgggagggaatgtaagagggatttctggggtgtctggcaagactcaatttcctgacataggtggagattttatggttgttcaccttataataatttattaggttatactttcctttatggcctttatttatcttatatggtaaacaaatacgaaaacaaggacaaacattttcttccatttttttccccataggagactataaatattcaggaagagatagtttgatttttttggttgatgcctccaaggctatgtttgaatctcagagtgaagatgagttgacaccttttgacatgagcatccaggtaagactaccttttaatttaagacaaatttaaaaacagtattggctgggcatggtggcggctcatgcctgtaatctcaggacattgggaggccgagacgggcagatcacttgagcctaggagtttgagaccaacctggtaacatggagaaaccccgtctctacaaaaaatacacaaatcatccaggtgtggtggtgcaaacctgtagtcctagctactcaggaggccgaggcgagaggcttgcttgagcccaggaggtcaaacagaaaaaagaagtaggctcctcctcttgcagagatggaagtataaaggaagaagggaagttcccacagttatagtgtggaaaagagtgagtgatacttgggagttgactactgcctgtggttggggaagatggctacaataaaaaggcaacttcaattttaaaacaggcacaggacttgaaaagacatttctccagctgggcgtggtggctcatgtctataatcccagcactttgggaggctgaggcaggcggatcatgaggtcaggagaccagcttggccaacatggtgaaaccctgtctctactaacaatgcaaaaataattagccaggcatggtggtgcgcttctgtagtcccaggtactcgggaggctgagtcaggagaatctcttaaacccaggaggcggaggttacagtgagccgagattgtgccactgcactccagcttgggcaacagagtgagactctgtctcaaaaaaaaaaaaaaaaaaaaaaaacaattctccaaagatatgcagatgtccaacaagcacaggaaaagatactcagcatgtttagtcattagagaaaggcaaatgaaaaccataatgagctaccactcacacccactatataaacaaactaaaatttaaaaaacaccagcagaaaataagtgttggcaaggctgtggagaaattg

SEQ ID NO: 2984 - DNA, 6000 bp, Homo sapiens
ctctgggcactttgggaggccaaggcaggcggctgggaggtggaggttgtagcaagccgagatcacaccactgtactccagcctgggcaccattgagcactgagtgaaccagacaccgtctgcaatcccggcacctccggaggccgaggctggcggatcactcgcggttaggagctggagaccagcctggccaacacagcgaaaccccgtctccaccaaaaaaatacgaaaaccagtcaggcgtggcggcacgcgcctgcaatcgcaggtgctcggcaggctgaggcaggagaatcaggcagggaggttgcagtgagccgagatggcagcagtacagtccagcttcggctcggcatcagagggagaccgtggaaagagagggagagggagaccgtggggagagggagaccgtggggagagggatagggagagggagagggagagggattactgtttcttttgtgtacttcgtagagaagaattttcacagatttattatatatctcatgtctcataattttagaatttggaactgaacagaaacttttcatgttctaatttgtgtacaaatagttcttggtaggcagggtgtggtggctcacgcctgtaatcccagcactttgggaggctgaggtgagtgaatcacttgaggtcaggagttcgagaccagcctggccaacatggtgaaattctgtctctactcaaaatacaaaaattagccgggcatggtagtgcaggcctgtagttgcagctattcaggaggctgaggcaggagaattgcttgaactggggaggtggacgttgcagtgagccaggatcacgccactgcactccatcctgggtgacagagagagactccatctcaagaaaacaagaaatagttcttgtagttggcacaccagaatatcttgcaccaaaaaaaaagaataagctgggtgtggtggtgtgcacttgtagtcccagctactcaggaggccggggtgagaggattgcttgagcccaggagtttgaggctgcactgagctatgattgtgccagtgaactctagcctgggcaacagagtaagaccctgtctcttggaaaaaaaaaaaaaaagaaaaggctgggcgcggtggctcatgcctgtaatcccagcactttgggaggccgaggtgggcggatcacgaggtcaagagatcaaaaccatcctggccaaaatggtgaaacctcgtctctactaaaaatacaaaaattagctgggtgtggtggcgtgcgcctgtagtctcagctactccagaggctgaggcaggagaatcgcttgcacctgggaggcagaggttgcagtgagccgagatggcactattgcagtccagcctgggcaatagagccagactctgtctcaaaaaaaaaaagtgtatgtaaaataaaataatagaactatgaataaaaacaatcgttaatttaaagtggttctcaaacagaattacttgcaggacattaaaacacagactacagaaccttgccccacaatcaaaatttctgattctctatgtctagaatggggaccaagaatttgcatttctagtaaattgtcaggtgatgctgatgttactgatttggagaccattactttgaagagcagtgctttaaccttttttagaccgtggacctatttttttttttttttgagacggagtctcgctttgctgccctggctcttggctcactgcaagctctgcctcctgggttcacaccattctcctgcctcagcctcctgagtagctgggactacaggcacccaccaccacacccggctaattttttgttcttgttttttagtagagatggggtttcaccatgttagccaggatggtctccatctcctgacctcgtgatctgcccacttcggcctcccaaagtgctgggattacaggcatgagccaccgcacctggccaaccgtggacctctttgaggatatgatgacagctacataccttcccctcaaaaaagatagtactcacaattctacctgtaatttcagagagttaatggaacccttgatgcctaaagacctcagaagaaaatgtagtgttaggtaggaaggaaatgagacattcatagatgagcacaatttgataaccgataataagtattcagtagttgataagcaatagaaaacattttctaaaattctgttttagtttttgtttttaatttttagaacctaaaaggagcccttaccagattcttttaaaagtttgtagactcctcagagtagattaaaatatttatggaaatgactacttgccatgtggattgttgtcagtgactagctatagtacatgttctgcatttaaggagagaatagctgtggacgaaggccagctagagctcaggcaggacatggaggggatcaccatggttggtttattcctcagctttgcaggttccaaaacttaatttttttttttttttttgagacagggtctcgctctgtcatctaggctggagtgcagtggcatgatctctgcccactgcagccttgacctcctgtgctcaggtgatcctcctgcctcagcacccctgagtagctgagtagtggggactacaagcatgtgcatgcccagctaatttttttgttttttgtagagacattgttttgccatgttgcccaggctagtttcaaacttctgtagcaatcctcctgtgttggcctcccaaagtgctgggattataggcatgagccactgtacctggcccgaagacttaattttgttagtgctccagaattaggtaggcccctagaactgatgaactctcttttttttttttttttgagatggagtctcgctctgttgcccaggctggagtgcagtggcgcaatctcagcccactgcaacctccacctcttgggttcaagcgattctcctgcctcaacctcctgagtagctaggattacaggcacgtgctaccacatccaactaatttttgtatttttagtagagttggggtttcaccatgttggtcagaatggtctcgaactcctgacctcgtcatctgctcgccttggcctcccaaagtgctgggattataggcatgagccaccgcgcctgggtgaactgatgagctcttacaagacctgatgtaccagatgctgacattagtttatatagaggggtagacctttcctgttactggaatactgatgtctttaactgggtagttaaacagttttatttcaaggatgcgcttactggtagttattgacttattttcaggtcacatgtacttaagcattgtaattattttatatagtcatcccttgttattgagggaattggttgcaggactccccgtggattccaaaatccgaggatgcccaagtcccttaaataaaatggcatagtatttgcatataacctacacacatcctcccctatactttaagtcatctataggttactcatagtacctaatacaatgcctatgcatcacttcattcacatggcttcaatgtagtacttggcacatggcaaattcaggttttgctttttgaaacgggaatttctttgtttttcctgaatatttgagatttgaggttggttgaatacatagatgcagaaccagcagatatggagggccaactgtgtatataaactctgtttcctgataccaaggtacttgaaagatcacatgacctgtccaaattcagccagttaagtaagtgacatcagtaggactcaactccaggttttctgattccaatgctttgcttcgccccaactcccatagcacaatttcctccctctgatacttcttttccttttttcttgagataaggtctcactctgttgcccaggctggactgtagtggtgcagtctctgctcactgcagccttcacctcctggggtcaagcgatctttcacctctgcttcccaagtaactgggaccctgtgctgccatgcccagctaatttttttgtttttttttgtttggtagagatggagtctcactatgttgcccaggctggtctcgatctcctagggtcaagtgattctcccacctcagcctcccaaagtgctgggattgctacagatgtgagccactgtgcctggcctgaatatacgtattgttaattctctgatttcaatggcagggactgcttatacttctaatgtatacttactgcattctggtttttgttaaaatttgatatttatgcccattactttcactgattcattacccctgaaggtagggatcttgccttattttagtgccatatacaaattcagtgcacatattttgagcaactaataggtactgagcacttatggagcttccatttagtggtaagtaaatattaattgaattttttttttcagtgtatccaaagtgtgtacatcagtaagatcataagcagtgatcgagatctcttggctgtggtgttctatggtaccgagaaagacaaaaattcagtgaattttaaaaatatttacgtcttacaggagctggataatccaggtcagtaatattttaagatcagcttttcccttatatatgagaatatcagtactctgatcaaagaggactgtggagaaggaagcaagttacatcttgtctaggagtatgctttcctccataaggggaccttgctcgatgtggactttgttaaatgggttaaacagctctggggtgaaaaagggtccttctgttagtcttgtggtaaaggcagccactgacattcttctgatttttctttccatttgactccctgcctctgatcaggtgcaaaacgaattctagagcttgaccagtttaaggggcagcagggacaaaaacgtttccaagacatgatgggccacggatctgactactcactcagtgaagtgctgtgggtctgtgccaacctctttagtgatgtccaattcaagatgagtcataagaggatcatgctgttcaccaatgaagacaacccccatggcaatgacagtgccaaagccagccgggccaggaccaaagccggtgatctccgagatacaggtgggcatatttccccgttctcttaaattggcacttaattattgtttttttattttttatttttttaggagttcaggagtcttggctcagcctcagcctcccaagtagctgggactataagcatgtgctgttgtgcccagtgcagttttattgctttctgtgtacctgacttcaggcatgtgctttttaccatttagaataaaataaaaaaataaagtgaagccagaagatgcctgtgtaacattaacactgcagatggccatgccattagctgtctaaaggactctgtcagaacaagattgtcttgatttttttttttttttttttttttgagacggagtctcactctgtcccccaggctagagtgcagtggcacaatcttggctcactgcaacctccgccttccagattcaagcgattcacctgcctcagcctcccaaatagctggaattacaggcatgaaccactgtgcctagctaatttttgtatttttagtagagatgggggtttcaccacgttgaccaggctggtctcgaactctggacctcagatgatccaccacctcgccctcccaaagtgctggggatgacagatgtgagccactgtgcctggccagttgtcttgactttaatattaccacgaatggtgattatttgaaaagttgtctgaagtcattatagcagttggtttccttagtcactttttctaagtcctgaaaatgttaatagtctagttttcagggagcttttaaaagcatgtttcagttttaactgaaagaacttctcacttgctgaaaattgttttttcctccctcacttttgtttacccttgcaacaggcatcttccttgacttgatgcacctgaagaaacctgggggctttgacatatccttgttctacagagatatcatcagcatagcagaggatgaggacctcagggttcactttgaggaatccagcaagctagaagacctgtt

SEQ ID NO: 2985 - DNA, 6000 bp, Homo sapiens
tcaggaggccggggtgagaggattgcttgagcccaggagtttgaggctgcactgagctatgattgtgccagtgaactctagcctgggcaacagagtaagaccctgtctcttggaaaaaaaaaaaaaaagaaaaggctgggcgcggtggctcatgcctgtaatcccagcactttgggaggccgaggtgggcggatcacgaggtcaagagatcaaaaccatcctggccaaaatggtgaaacctcgtctctactaaaaatacaaaaattagctgggtgtggtggcgtgcgcctgtagtctcagctactccagaggctgaggcaggagaatcgcttgcacctgggaggcagaggttgcagtgagccgagatggcactattgcagtccagcctgggcaatagagccagactctgtctcaaaaaaaaaaagtgtatgtaaaataaaataatagaactatgaataaaaacaatcgttaatttaaagtggttctcaaacagaattacttgcaggacattaaaacacagactacagaaccttgccccacaatcaaaatttctgattctctatgtctagaatggggaccaagaatttgcatttctagtaaattgtcaggtgatgctgatgttactgatttggagaccattactttgaagagcagtgctttaaccttttttagaccgtggacctatttttttttttttttgagacggagtctcgctttgctgccctggctcttggctcactgcaagctctgcctcctgggttcacaccattctcctgcctcagcctcctgagtagctgggactacaggcacccaccaccacacccggctaattttttgttcttgttttttagtagagatggggtttcaccatgttagccaggatggtctccatctcctgacctcgtgatctgcccacttcggcctcccaaagtgctgggattacaggcatgagccaccgcacctggccaaccgtggacctctttgaggatatgatgacagctacataccttcccctcaaaaaagatagtactcacaattctacctgtaatttcagagagttaatggaacccttgatgcctaaagacctcagaagaaaatgtagtgttaggtaggaaggaaatgagacattcatagatgagcacaatttgataaccgataataagtattcagtagttgataagcaatagaaaacattttctaaaattctgttttagtttttgtttttaatttttagaacctaaaaggagcccttaccagattcttttaaaagtttgtagactcctcagagtagattaaaatatttatggaaatgactacttgccatgtggattgttgtcagtgactagctatagtacatgttctgcatttaaggagagaatagctgtggacgaaggccagctagagctcaggcaggacatggaggggatcaccatggttggtttattcctcagctttgcaggttccaaaacttaatttttttttttttttttgagacagggtctcgctctgtcatctaggctggagtgcagtggcatgatctctgcccactgcagccttgacctcctgtgctcaggtgatcctcctgcctcagcacccctgagtagctgagtagtggggactacaagcatgtgcatgcccagctaatttttttgttttttgtagagacattgttttgccatgttgcccaggctagtttcaaacttctgtagcaatcctcctgtgttggcctcccaaagtgctgggattataggcatgagccactgtacctggcccgaagacttaattttgttagtgctccagaattaggtaggcccctagaactgatgaactctcttttttttttttttttgagatggagtctcgctctgttgcccaggctggagtgcagtggcgcaatctcagcccactgcaacctccacctcttgggttcaagcgattctcctgcctcaacctcctgagtagctaggattacaggcacgtgctaccacatccaactaatttttgtatttttagtagagttggggtttcaccatgttggtcagaatggtctcgaactcctgacctcgtcatctgctcgccttggcctcccaaagtgctgggattataggcatgagccaccgcgcctgggtgaactgatgagctcttacaagacctgatgtaccagatgctgacattagtttatatagaggggtagacctttcctgttactggaatactgatgtctttaactgggtagttaaacagttttatttcaaggatgcgcttactggtagttattgacttattttcaggtcacatgtacttaagcattgtaattattttatatagtcatcccttgttattgagggaattggttgcaggactccccgtggattccaaaatccgaggatgcccaagtcccttaaataaaatggcatagtatttgcatataacctacacacatcctcccctatactttaagtcatctataggttactcatagtacctaatacaatgcctatgcatcacttcattcacatggcttcaatgtagtacttggcacatggcaaattcaggttttgctttttgaaacgggaatttctttgtttttcctgaatatttgagatttgaggttggttgaatacatagatgcagaaccagcagatatggagggccaactgtgtatataaactctgtttcctgataccaaggtacttgaaagatcacatgacctgtccaaattcagccagttaagtaagtgacatcagtaggactcaactccaggttttctgattccaatgctttgcttcgccccaactcccatagcacaatttcctccctctgatacttcttttccttttttcttgagataaggtctcactctgttgcccaggctggactgtagtggtgcagtctctgctcactgcagccttcacctcctggggtcaagcgatctttcacctctgcttcccaagtaactgggaccctgtgctgccatgcccagctaatttttttgtttttttttgtttggtagagatggagtctcactatgttgcccaggctggtctcgatctcctagggtcaagtgattctcccacctcagcctcccaaagtgctgggattgctacagatgtgagccactgtgcctggcctgaatatacgtattgttaattctctgatttcaatggcagggactgcttatacttctaatgtatacttactgcattctggtttttgttaaaatttgatatttatgcccattactttcactgattcattacccctgaaggtagggatcttgccttattttagtgccatatacaaattcagtgcacatattttgagcaactaataggtactgagcacttatggagcttccatttagtggtaagtaaatattaattgaattttttttttcagtgtatccaaagtgtgtacatcagtaagatcataagcagtgatcgagatctcttggctgtggtgttctatggtaccgagaaagacaaaaattcagtgaattttaaaaatatttacgtcttacaggagctggataatccaggtcagtaatattttaagatcagcttttcccttatatatgagaatatcagtactctgatcaaagaggactgtggagaaggaagcaagttacatcttgtctaggagtatgctttcctccataaggggaccttgctcgatgtggactttgttaaatgggttaaacagctctggggtgaaaaagggtccttctgttagtcttgtggtaaaggcagccactgacattcttctgatttttctttccatttgactccctgcctctgatcaggtgcaaaacgaattctagagcttgaccagtttaaggggcagcagggacaaaaacgtttccaagacatgatgggccacggatctgactactcactcagtgaagtgctgtgggtctgtgccaacctctttagtgatgtccaattcaagatgagtcataagaggatcatgctgttcaccaatgaagacaacccccatggcaatgacagtgccaaagccagccgggccaggaccaaagccggtgatctccgagatacaggtgggcatatttccccgttctcttaaattggcacttaattattgtttttttattttttatttttttaggagttcaggagtcttggctcagcctcagcctcccaagtagctgggactataagcatgtgctgttgtgcccagtgcagttttattgctttctgtgtacctgacttcaggcatgtgctttttaccatttagaataaaataaaaaaataaagtgaagccagaagatgcctgtgtaacattaacactgcagatggccatgccattagctgtctaaaggactctgtcagaacaagattgtcttgatttttttttttttttttttttttgagacggagtctcactctgtcccccaggctagagtgcagtggcacaatcttggctcactgcaacctccgccttccagattcaagcgattcacctgcctcagcctcccaaatagctggaattacaggcatgaaccactgtgcctagctaatttttgtatttttagtagagatgggggtttcaccacgttgaccaggctggtctcgaactctggacctcagatgatccaccacctcgccctcccaaagtgctggggatgacagatgtgagccactgtgcctggccagttgtcttgactttaatattaccacgaatggtgattatttgaaaagttgtctgaagtcattatagcagttggtttccttagtcactttttctaagtcctgaaaatgttaatagtctagttttcagggagcttttaaaagcatgtttcagttttaactgaaagaacttctcacttgctgaaaattgttttttcctccctcacttttgtttacccttgcaacaggcatcttccttgacttgatgcacctgaagaaacctgggggctttgacatatccttgttctacagagatatcatcagcatagcagaggatgaggacctcagggttcactttgaggaatccagcaagctagaagacctgttgcggaaggttcgcgccaaggagaccaggaagcgagcactcagcaggtgtgcactcagcccgggtcagctgcctacactgcccttaaatcagaagcaggctgggcgcggtggctcacacctgtaatcccaacagtttgggaggccaaggcaggcggattgcttgagcctaggagttgagaccagcttgggcaacatggcaagaccctctctctacctaaaaaaaaaaaaaaaaaaatcagaagcaatgcactgctacacattgcttaacaaaccagaagcaatacattgctctgacctgactggctacttaactcgactatgccactgcctcactgtcttcctctaaaatagtttatttcaggatagcagaagctatttgctgctttatctctggcaagagctggcatgatatttctctaaagtaacacagccctccatttcgtgggggtagacagttatggtctaagagtatccttagctgtactcactagtacagtcatgtgttaattaatgatagggataccttcttagaattgcgtcattaggcgattttgtcattgtgcaaacatagagggtacttcacacacccagagagtacagcttgactacacacctgggctgtgtggttagcctgttgctcttaggctacaaacctgtatagcatattaccatactgtttactgtaggcaatggtaagtatttgtgtatctaaatgtatctaaaggtatagaaaaggtacaataaaaatatgatataggccagacacggtggctcacgccttgtaatcccaccactttgggatgccgaggcgggtggatcacaagttcaagagattgagaccatcctggcctacatggtgaaaccttgttctctactaaagatacaaaaattagctggacgtgatggcgcgcgcctgtagtcccagctactcaggaggctgagaatcgcttgaacccaggagtcagag

SEQ ID NO: 2986 - DNA, 6000 bp, Homo sapiens
tttttagtagagatggggtttcaccatgttggccaggcttgtctcgaactcctgaccttaggtgattcacccgcctcggcctcccaaagtgctgagattacaggcgtgagccaccacgtccagcctggaatttagctttttaaaaacaatttcccatgtaattctttgaagcatcagatagcaaaaagcaaacaaaaccaaaataagtccacagctttttctccagtgttggaaattaaagaggatgtgaaccttgccgttgtgtttatttgtgcagtctagaccctatcttcttttgtgctatggctcatgaacaccccagatttgactcgattggttttcattagtaactggggtcatgtcattaacctagtgtcagtaaaagtgaactgacattaataatttgctttttttttttttttctggagacagtgtctcactctgtcacccaggctagagtccagtggcaccatcttggctcactgcagtctcaagctcccaggctcaggtgatttcccacctcaccctctcgagcaactgggactacaggtccacaccaccacgtccagctaatcttttgtaatgttagtagagacagggttttgctatgttgggcaggctggtctcaaactcctgggcttaagcaatctacctgtcttggcctcccagagtgctaggactgtaagcgtgagccacctcacctggccaataattcactttctgtttgtttgttttgaaacagtctcactctgtcgcccaggctggaatgcagtggcaatgtctctgctctctgcaagctccgcctcctgaattcaagcgattcttctgcctcagcctcccaagtagctgggactacaggcgtgcactaccatgcccagctaatttttgtatttttagtagagatggggttttaccatactggccaggttggtctcgaactcctgaccttgtgatccacccgcctgtgcctcccaaagtgctgggattacaggcgtgagccaccatgcccggccataattcactttcttaagtggaatgtttggggcttctaaacctcttattcctttttaaattttcctttctgtgtctctgctgtccccattttcccctcagctgtggggtcctccaacccttacctgttgagatattataagccctttaaaggcttggtgtggtggctcatgcctgtaatcccaacactttgggaggctgaggctggaggatcacttgagcctaggagttggagaccagcgtgggtgacttagagatactttgtctctacaaaaaatcttaaaactagctgggtgtggtggtgtgtgactgtagtcccagctattcaggaagcagaagtgggaagattgcttgagcttgggaggtcaaggctgcagtgagttctgattgcagcactgcactctatcctgggtgacagagcgagaccccgtctcaaataaataaataataaaattaaaataagccctttaaagaaaatggaagagaaactttagggctaaaagagaagaaaggaggaaacctttttaggaggctagtcactgggctttttgttttctagggagctcaaccctgttcagtgctctgctcatcaagtgtctggagaaggaggttgcagcattgtgcagatacacaccccgcaggaacatccctccttattttgtggctttggtgccacaggaagaagagttggatgaccagaaaattcaggtgactcctccaggtatgtggcagagatatttccagggcttctgaaccttgcccatactttggaatcatccatggactcctaatgcagacctactgaatcatagtctctgggaatggggcttaaaaatgtctatttttaagctttcttgggtgaatttagtgcacagccaggtaaggccactaaatatggtgatggggtgcacagcatgcgcagccgtacaaggctgatctgcagctaggatagagaaatgtctgcctaggggactgtttgcagattactgacacaagttcttgggacctcactgccgacacctttctttccaaagccattgtttggcacccttgtaatgtctaatgtttggtttagttcctatacaaaccaaccatggggtttgccaagatagtgaggtatagcggaaagaccatggattttaaagtcagatttgactttatcttgtgcttatgtgtctggaagcttgcttgcttttgttttgggcccatctctgctgcttgttagctggtcaacgtgggcaagtaatttaacctttctgtttaatattccttagctacaaagatgggcgttctggagcacctttccctcggggtggttttacatttgagatgagttactgtagttttaactttgatcctcagcatgctcaggagtgctcagttactaagctattgtatctcagctccaaattcacccttttatgctctgcactactgaggctgaaatgatccaaacctaatttcatctttcacagctggctctcaggctgtgtctatagtgggtgctagagggagaccaaagggcagaggagaggtgagggatttgcttcttcctgtttgctcagtgtggtcagcattgtcagcaaaggctttcacctggtagcagcagttagttacagggcgtagattttttagtccttccagaaccagccagtaactgaactaaaatcagcctgataactcttacctgtttccttttatttatcacgtggtagagggtaaggaaaaaaggggcgagggtgaagctcagagaaggcccccatggagctgggacttagccctccagggaggaggcactgtccggctagctctggatgtatcaaaaaagctggagactggaaccaactgccgccaggtaaagggtctttgctggggcaatacaggtaggaacagtaaatacaggagggccgcaaccacagttttgctttctgcagtttcagttacccatagtcaaccatggtccaaaaattttaagtggaaaattctagaaataacttaaaagcacaatcccacctggggcaggaatcatctgtttgttcagcatctccacactgtaaatgctacccaccagttagtcacttagtagctgtcttggttatcagattgactgtcaaggtaatcagtattgcggtgcttgtgttcaggtcacccttatttaataacggccccaaagcacaagtgtagtggtgctggcagtttggatatactaaagagaaagtcataaagtgcttcctttaaatgaaaaggtgagagttcttgactttaaggaggaaaaaaatatatgctaaggttgctaagatatatggtaagaaggaatcttcgaaccacaaaattgttaagggaaaaaattcattttagtttttttttttttttatgctgaggttgctaagatacatggtaagaaggaatcttctatccacaaaattgttaagaaggaaaaagaaattcatcttagtggccaggcgtggtggctcacgcctgtaatcccagcactttgggatgccaaggtggcggatcacgatgtcaggagattgagaccatcctggctaacacggtgaaaccgtctctactaaaaatacaaaattagccaggtgtggtggcaggctcctgtagtcccagctacttgggaggctgaggcaggagaatggtgtgaacccgggaggtggagttagtgagctgagattgcgccactgcactccagcctgggtgacagagcgagactctgtctcaaaaaaaaaaaaaatagttttttcccccccttctttttttacataaattgagacaaggtctcactatgttgcccaggctggtctcgaactcctgagctcaagtgatcctcctgcttcagcctcccaaagtgctgtgcttaccgacgtgagccaccatgtccggcccaagctagttttcctgttgcacctcaaactgtaaaagttactgccacagtacatgagaagtgcttagttaaaatagaaaaggaggccaggcactgtggctaatgcctgtaatcttagcactttgggaggctgtggcaggtggatcgcctgagcccaggagttttgagaccagcctgagcaacatggtgaaactctgtctctgcaaaaaaataaaaaaaagtagccaagtgtggtggcattcacttgtagtcccagctacttgataggctacttgagccggagaggtagaggctacagtaagctgtgatcacaccactgcattccagcctgggtgatagcaagatcctgtctcaaaaaaaaaaaaaaaaagatgaaggctgggcgcggtacctcacgtctgtaatcccagcactttgggaagccgaggtgggcagatcccctgaggtcaggagtttgagaccagcctggccaacatggcgaaaccccatctttaccgaaagtacaaaaattagccgggcgtggtggcgcctgtaatcccagctattcaggaggctgaggcaggagaaccgcttgaacctgggaggcggaggttgcagcgagccgagattgcccactgtactccagcctgggcgacaagagtgaaactccatctcaaaaaaaaaaaaagatggaaaaaaacattaaatattaaatttatgaacgtatgacatggacaaacatgtttcaattgacggcagtcaggtttggtgctgtccgaggtttcaggtatcctcccgggttcttcaaacatattccccagggataagggatctactgtatacaggaaggggcacccctcctcccttgcagtcttctggaaactgcagagggagtctgttaggcagatgataacaaaaaccagctggtggagttcaagaaatggggcctacggggccccagccccagcaccacaggacataaaaggaagaatttggagctgagaaacaagtgactgcaacacttgaagtcaaatcaaagaaaatttatctcctttcttcaggcttccagctggtctttttaccctttgctgatgataaaaggaagatgccctttactgaaaaaatcatggcaactccagagcaggtgggcaagatgaaggctatcgttgagaagcttcgcttcacatacaggtgagtcaatctcaggctttctggaactgcctcctgagttgaaaatcttattagaaacagcttgggcataggccaagagaatggcactactcttttcagcaaactgacagattactacttgttattaatagttttttgaaagccatatagagaatggaaccttttattatgttggagactctgggattttgtggtttctctgttgtgctgtacttagccagattagttggttgaacaaatttgaaaaaatagcaggattcttattcgcccttctccttgattgtgtttgttattccacaatgagcaaaagtaaataaatctagtgtaaattgttaaaggcttaaaagaatgattaagtaattcaagtcattccctctcacatatataatagaccaactctcagagcctgcataatgggacactaaacgtaatttttttcacatgtcatttttaaaaatttattattattattattattattattattattattattattattattttgagacagggtctcttgtcacccaggtttgattgcagtggtgttactgtagttcactgcagccttgacctccctgggctcaggtgattctcccacctcagactcctgagtagctgggaccatacccttgcaccaccacacctggctaatttttgtattttttgtagggacggagtttcaccatgttgcccaggctggtctggaactcctgagctcaagccatccgcctgcctcagcttctcaaagtgctggattacaggcatgagccagggtgcccaggctggtttgctttctaagttgacttgagacaaagtcttgctctgccatccaggctggagtaccgtggcacgatcatggctcactgcagcctcgatctcctggactcaagcagtcttcctgcctatgcctcctgagtagctgg

SEQ ID NO: 2987 - DNA, 6000 bp, Homo sapiens
aaaaaattagccaggcctggtggcaggtgcctgtaatcccagctacttgggaggctgaggcaggagaattgctggaacctgagagggggagtttgcagtgagccgagatcgcaccattgcactccagcctaggggacaaaagggaaactctgtcttaaaaaaaaaaaaaaaaagtattaaaaataaacttgctctgagaatgcagttttcgcctatatgactggcaaaactcaaagatgtatgaactataggcaaggttgtggggaaagagacaatttctacactgctggggaaggtgtaaattatcacagctctctagagggcctggcagtacctatcgaagtaagaaacacacaccctcttcgacccagcaagtctacttctgcaagtgtatcctacagacactcacaggtgtggaaagcaatgtgttgtgcagttacacggtgtccacagttatttactgcagcatcattggtaacagcaagactctaggcacaaactaaatgttcacccacagcagatgagatgaatgacatatccccaaggtggaaccctatataggtacaaaagctagtaatgctcttcatgtgttgatacacaatattcatcaagataaattaagcctgaaaaacaagattcaggacagggctctccatgctatatggaaagggggatgcaacactctatgcgtgttggcttgcacctgcacaaattatgtctggaaggatacccaagagactgatgacatcgatggcccttggaagggcaagtaggtgacttagagatatagagaggcagacatttcactttttacacctctaaattaggaagtcaatttcagaaacttctaatggtctggcgtggaaaaagaatccaggaccagaactcagggaagcagtcttctgctccaggctctgtgactggctccgaggggtcccgggctggctgacttgctcatcctgcaaacacatgagcacccacaacagaccacatccttcgctaggtgccaggcaggcttggggtacatgcagcccaccctggagggtgcctcaggcagtgcggtgagagacatgtagaggtgggaacacctctgagaaaatatcaaagcgtgtgtgagaggaacgggtcagaagtcagagtggctggaagaggtgaaaacacaagttgggtcagatcacagagggtttgcaagccatggcaaggagcttttattttctccaaagtgggataggaaactattaccgggctttaagaaaagaattttaggcctggcgtggtagctcatgcctgtaatcccagcacagtggtaggctgaggcaggcggatcacttgaggtcgagttcgagaccgtcctgaccaacatggtgaaaccccgtctctactgaaaatacaaaacttagctgggcacggtggctcatgcctttaatcccagctactcaggaggctgaggcaggggaatcacttgaacccaggagacggaggttgcagtgagccaagatgtcgccactgcactccagcctggtgacagaacgagactccatctcaaaaagaaaaaaaaggctgagcacagtggctcatgcctgtaatcccagcacttccggaggcccaggcgggcagatcacgaggtcaggagattgagaccatcctggctaacacagtgaaaccccatctctactaaaaaaaaaaaaaaaaaaaaaaaaattagctgggcgtggtggcgggcgcctgtagtcccagatactcaggaggctgaggcaggagaattgcttgaacccaagaggcggaggttgcagtaagccgagatcacgccactgcactccagcctggccaacagtgagactctgtctcaaaaaaaaaaaagaaaaagaaaaaagaaaagaaaagagctttataatctaacttgtgtttttaaaaggtgacgttactgtgtagaaagtgtatccgaaaggaagcagataatatcccctgacattacaaatgcacatattagccaacgggaagtagaagccggtgagacagcgtggctgagacccagacagcagcatgtggatggagatggagagtctgtagatggattcaggatatcttctgaaggtggagaagacgttagctggtgatggcatgaatgtaggaggttctcagcttgcacagctgggtgaaatggagaaataaaatgggtgatgagaaagacaaaaagaacagggtatgcagatgcagagggggtatgccaagtttgagatgagacgtgcatgtgaagacgccaaataggcaggtgaatatacaagcccagagctcggaggagaggctgcgctcaagacaaaacgtgggtgccgcagagagcagatacgctgcacagctattggaatgctgaccgccctgagggcgaaagcacaaagcggtcccagagcaggtcttggggaaatcagcctcagaagacagcagagggggagcccccgacagagaaaagatacaccagccagagaggcaggaggaaaaaaccaagagcgtcttggactccaagcaagggaagtttccagaaggacgaatgttactgaaaagctgactggcgatagaaaagtgaaaagagattcagcaatgtggaagtcgtcaacgactgatgaaagcagcttgaatggagtggtaaggacagaagccggaatgggagggattgagaggcggaaaaaaatggcataacaagtgagaaagctctcaaagtttggcttggaaggagaaacacagcaatggagaggcaacggaggagacgtggcgacaagtgagacaagggaacattatctgtatgtggatgcgcatgatccagtagtggacaggggaaaagtaaggaaatgaagtcaggtcaacggaagtggggaaggcctcaagaaggagcagggggtgcagtatgcacgtggaaaggacatatttgaaaggaaggacatgacaggaaggaggagaggggtgcagaggcaagcgccttgctagatatgaagatgcaacattgatttgtaaagtctccaggacagttcctgcaaaatggaggcattgaggatgcttggggccaggcgcggtggttcacacctgtaatcccagtactttgggaggcctaggcaggtggatcacctgaggtcaggagtttgagaccagcctggccaacatggtaaaaccccatctctactaaaaatacaaaaatcagccaggtgtggtggcgggtgcctgtaatcccagctactcgggaggctgaggcaggagaatcgcttgaacccgaaaggcagaggttgcagtgagccaagatcatgccactgcactccagcctgggagacagagtgagacttggtctcaaaaagaaaggatccttgggtagtgtgagaaaactacccaagggatgtcaaaatgctttgtgaggctgggtgaggtggctcacacctataatcctagcactttgggaggccgaggcaggcagattgcctgagctcaggagttcgagaccagcctgggcaacatggcaaaaccccgtctctgttaaaaatacaaaaatgagccaggtgtggcagcgggtgcctgtaatcccagttactagggaggctgaggcaggagaatcccttcaactcaggagagagaggttgcagtgagtacagatcacgcctttgcactccagcctgggtgagagagcgagactccgtcaataaataaataaataaataaataaaaacgctttgagagaaaaagagggtgtggcctgtaactcattctgtgaagctgtaccctcaccttgatacccaaaccagtcaaagacacaagaagaaaggggtttggggccaggcttactcattaacatggtctcaaagatcctaaataagtcttagcaaacagaaaccagcgacaaacaaaaaagaaaacatcgaattcaatacaataaatatttgagagcccacaaagtgttaggtgctgttcagggcatgggagcactgcggtaaataaaacggatgagaatcctggctgtgatgaaacttaaaatggggaggaggtgaaagaaaaccagaaaacgaaggcagatgtcatgtgtttcacaggtgcagagtacaagtcgagcacttgagaaagaatttctcagggaaacattaaatcaccctccatctctactgaacatcctgaacaacaacagcgccgcagcagcaaggacttgccttccttcttagggtcatccatgttcacgtcccctgcccggcaggctgaaggctcatcgcggccgccgcctccttccatggagagagctgtcagaagtcactgcagggtggaacggggccagaaagtgagtacgtgtcagggcccagggctccggcttccttcagccctcggctcacagaggcagagagagctgaaggccgcggccaggtctgggagaggcggcgcgggggccgctctgaaatgatcgcatcccaggggaccccagggcccgagtgccgccaggccgggagtcagcccgaacgccatcagacgagataacggaattctcggcttctgggccagagtgttgggggctctgtttgcctggggggcagccctagacctcccggcatccccgaccacggcgcgaggggcctcagtgacccctgctcgagcccaggcccggctcctggcggggcgcggcccctccccgtcccgaaaacggcgggcaccgcgccgcaccgggcccaccgggcaagcctcgcccccgaccctgaccccaccttacccaaagcggcagacgatgcaggacgcgcctccggcacggatttaaacgcggcgccgggagacgcgggttgccgattggtcggtttgaaaagggctccgagaggcggcgggctgggtgcgtcctgggtattgtagtcaggacgctggtaagaagcgtccagtgcgcatgcgcactgcttcagcgcagcgaatggctccgcacagcgccagggatcacccacccggaagtctgcccggcctggccgccaagtgtcactaggtatccgcgtcaagccggaaccatgtatagcagctccttgtgtgtagggagaaagttaaaactgccatctaagggtgtcgatgggaagactaaaagtaggctcacccacctgctgtgaagcagcgcgcgcgagctgttactaacagtagtgaaaagccgggatccctgcccccgaggcacgcactggggcgccggctgacccagagacctgagggagactcattgccggagctgcacagcctgtggggctggaggggaaccgtcgcccttggcgggcttccccaaccgccaaggcctgaggaccgccgagggcgtggcgggagcctgtcctcggttttacaggccggctggggagctgcgttggaggagagagccaggggctggggcccggtgatggagcctgccttggggagtgcatgtgttggagagaggtgggaagcagataggataaccctgacctgagccatggagacgcaaggacaggactggtagacgggtcagtgggcagcaacttaagactgacctcgcttgagcctttgcctgcgaacgaggtataatacccacctcgggggcttgaggatcaaatgaggggctccacccacggcaaagtgtcactaagcgggatggaggaggatgcaggaagaggagtctgggaggacccgctctgaaaaggatggaactcgagagcaccattttcagggacgaagataagctgtttatttggggcaggctgtggggagagctgtgcagcaaacagccacccggggcccagggcagaggccttccaggctggctcgggcacttctgggtcccatgtccctggttttgcatcatccataccaatcactccatgttgctatgttccttcaccagaagactgggggctcaaaaagggcagggcagccctcactcaccagtctccccagcctcacccagctcagcacagggcaccaggcaggggctgagagtgctggggtaggtgggtgtggtcaaacagcttggaaagagtttgg

SEQ ID NO: 2988 - DNA, 6000 bp, Homo sapiens
aaagtgccacagtctgggcggcttgcacagtaggcatgcactgtctcacagttctggaggctggaatgtccaggaacaaggcctggctgggttcagtttctgctgaggcctctcttcctggcttgtggacagccactttcttgctgtgtcctcacatgacctttcctttgagtgctaattctttcacgtctcttctttcttctttctttttaaatttttttatatttttagaggcaaggtctcactcggtcatccaggttggaatgcagtggtgtgatcacagttcactgtaaactcaaactcctgggctcaaggaatcttcctgcctcatccttccatcgtgcagggattacaggggtgagccaccacacctatctcttcttataagggcactaatcccattcacaagggccccaccctcatgacttaatcacctccaagaggccctgttcttaataccatcaccttgggcatttgggcttcaacatatacatttagcctggacacagacattcagtccacagcagggtctttacctcaaaccgtacctgggtcttctctcttcaaacctgggttttccccactgccacctgttgtgccccatctcgggtgtggcttcctgcactggaggtctgtgccctcccatcctcacctctccccaaactgaggccaggcctcctgcccctgggccttggcccttgctgttccctcagtgccgcagtctagcctgcctgtgttctgccttgggaccaagggaccaccaggccccacatccctctagaaggttctgtaacaggacctctgtgtctgtttccacaggagccttctgatggagcgtgatgccttgaagcccaactcgcccctgaccgagcggctcatccgcaaggcagctaccgtccacctcatgcagtgagccagcctggccgcctccaccctgcagaacctcagtggtggcgtcactgcgtccagtcagctgctccaccgggttagggtcaggagacggccagagcctgtttgttagggctgttagagggtgatcttcagttttacaggaagtgggtcacgggttaattttaaatgtgattccgaatctcctttcagtcctcgagaagggccaatgagcatttttcagcagtcacagccagtgtgagtgctgctctttccacctgccttgcaaattctgtttcccaggggaatgtgtctactgcctggtggttcaaaggttggaaggcagggcagaggtgggggctgattctgctgggacaggtcttccagaggcagcctccccccactgcctgtccccgtccccaccaggctgcccttgggatggaccttttcattcttttctttatattctagacagtctctgttgtctcattgtgttgctgtcccatttttcaggtgagggtaccggggtaggggagtggcctgcccagggtcacactatgagaggcccccacctgctgcctttggacgcagccccctgctgctgcatccaccacccttcttacagatcagcgcgcacatggggtccttctgctgtctctggggcgagtcttggagccccctggggggctctgttggtgctgatttggacccgtttctctttttaaactgcacatcataacagggcttcatgtcgagcatgattttaatcataaatgcacttctgaggtgcaaggattgagctcagagctgctctgttgtggcaaaacccaaagtgctgtgatgtgtggctgtgacaagcctggagcgggtcctgtgagcgccgcctctgtctcctgcttccccactgaacgcctgctgaatgtgccgctgactcagctgtgctgctttcagccctcctgtgaggggcggtcccagtgcacagatgtttttcaagttcctcagtttgtactgaaattagggattcatcagggcaggaagcaggcaggcctctcagaagggagaggaggcctccaaatctattgagtccccacagtttgctcaagcccaggcaaatttctgtgattaaaatgaattcatcagttcctccaagtctttgagcatctgtggtgcaggcctggggctgggtcctggggagatggcttctccttgaacttaaggtaggtggggcaggccaggcgcagtggctcacgcctgtaatcccaccactttgggaggctgaggtgggtggatcccctgatgtcaggagttcgagatcagcctggccaacatggtgaaaccctgtgtctactgaaaatacaaaaattagctgagcatggtggcacacgtctgtaatcccagctactcgggaggctgaggcaggagaatcacttgaacctgggaggcagtgattgcagtgagccaagatcgtgccattgcactgcagtctgggcaacagagcgagactcccatctcaagggaaaaaaaaaaaaaagtaggtggggcatctagtcaagaaaatgggaggtcgggcgcagtggctcacgtctgtaatcccagcactttgggaggctgaggcaggtagatcacgaggtcaggagatcaagaccatcctggctaacacggtgaaaccccatctctattaaaaatacaaaaaattagccgggcatggtggtgggcgcctgtagtcccagctactcgggaggctgaggcaggagaatggcgtgaacccgggaggcagagcttgcagtgagcggagatcgcgccactgcactccagcctgggcgacaaagcaagactccgtctcaaaaaaaaaaaaaaagaaagaaagaaaaggggtaattatagtagtatttccagagaggcgccttctctacccaagaactagggacacatcctaaggggagcctccttcccctctcctggttccaagcaagaagacatgacttggctgtgcaattgggaaccctggtccctcctccaggaagccttctacccgccaacccccactgcaggctggtgagggtgctgcctctgtgcccctcagcccttggcacttgcccttgctcttgcacccctgccatgacctctccaggtcagggacagcatctgtccccagcatcacctggcacatggcctgcactgagtagctgtcagtgaaagttggtgaatgaaggcataaataaatgaagtcaaactctgtattaggccttcttgcattgctatgaagaaatacctgacgctaggtaatttataaagaggtttaattggctcacagttctgcaggcttttcaggaagtatggtgctggcatctgcttctggtgcaacctcaggaagcttaagatcatgacataaggtgatggggagccagtatatcacatagtgagagcaggagtaagagagaaggggaggtcttagactcttaaataaccagatcttgtgtgaactaagcaagaactcatcaccaaggggatggtgctgaaccattcataagggatctgccctcacgacccaattacttcccaccaggccccacttccaacattgggatcacatttcaacatgagattttgaggggacacacatccaaactacagcaaatcctattgggggcagaaatgaatctgccatacataggccacacctactatgtgctgacatgatacagggagaggagtatcaggaatgactgttggggatccctctgccattctcccatgagcagacatccccaggatgagctgaggggaatgcaatgagcaggccaaactctttccaagctgtttgaccacacccacctaccccagcactctcagcccctgcctggtgccctgtgctgagctgggtgaggctggggagactggtgagtgagggctgccctgccctttttgagcccccagtcttctggtgaaggaacatagcaacatggagtgattggtatggatgatgcaaaaccagggacatgggacccagaagtgcccgagccagcctggaaggcctctgccctgggccccgggtggctgtttgctgcacagctctccccacagcctgccccaaataaacagcttatcttcgtccctgaaaatggtgctctcgagttccatccttttcagagcgggtcctcccagactcctcttcctgcatcctcctccatcccgcttagtgacactttgccgtgggtggagcccctcatttgatcctcaagcccccgaggtgggtattatacctcgttcgcaggcaaaggctcaagcgaggtcagtcttaagttgctgcccactgacccgtctaccagtcctgtccttgcgtctccatggctcaggtcagggttatcctatctgcttcccacctctctccaacacatgcactccccaaggcaggctccatcaccgggccccagcccctggctctctcctccaacgcagctccccagccggcctgtaaaaccgaggacaggctcccgccacgccctcggcggtcctcaggccttggcggttggggaagcccgccaagggcgacggttcccctccagccccacaggctgtgcagctccggcaatgagtctccctcaggtctctgggtcagccggcgccccagtgcgtgcctcgggggcagggatcccggcttttcactactgttagtaacagctcgcgcgcgctgcttcacagcaggtgggtgagcctacttttagtcttcccatcgacacccttagatggcagttttaactttctccctacacacaaggagctgctatacatggttccggcttgacgcggatacctagtgacacttggcggccaggccgggcagacttccgggtgggtgatccctggcgctgtgcggagccattcgctgcgctgaagcagtgcgcatgcgcactggacgcttcttaccagcgtcctgactacaatacccaggacgcacccagcccgccgcctctcggagcccttttcaaaccgaccaatcggcaacccgcgtctcccggcgccgcgtttaaatccgtgccggaggcgcgtcctgcatcgtctgccgctttgggtaaggtggggtcagggtcgggggcgaggcttgcccggtgggcccggtgcggcgcggtgcccgccgttttcgggacggggaggggccgcgccccgccaggagccgggcctgggctcgagcaggggtcactgaggcccctcgcgccgtggtcggggatgccgggaggtctagggctgccccccaggcaaacagagcccccaacactctggcccagaagccgagaattccgttatctcgtctgatggcgttcgggctgactcccggcctggcggcactcgggccctggggtcccctgggatgcgatcatttcagagcggcccccgcgccgcctctcccagacctggccgcggccttcagctctctctgcctctgtgagccgagggctgaaggaagccggagccctgggccctgacacgtactcactttctggccccgttccaccctgcagtgacttctgacagctctctccatggaaggaggcggcggccgcgatgagccttcagcctgccgggcaggggacgtgaacatggatgaccctaagaaggaaggcaagtccttgctgctgcggcgctgttgttgttcaggatgttcagtagagatggagggtgatttaatgtttccctgagaaattctttctcaagtgctcgacttgtactctgcacctgtgaaacacatgacatctgccttcgttttctggttttctttcacctcctccccattttaagtttcatcacagccaggattctcatccgttttatttaccgcagtgctcccatgccctgaacagcacctaacactttgtgggctctcaaatatttattgtattgaattcgatgttttcttttttgtttgtcgctggtttctgtttgctaagacttatttaggatctttgagaccatgttaatgagtaagcctggccccaaacccctttcttcttgtgtctttgactggtttgggtatcaaggtgagggtacagcttcacagaatgagttacaggccacaccctctttttctctcaaagcgtttttatttatttattt

SEQ ID NO: 2989 - DNA, 6000 bp, Homo sapiens
gtggagggagtgtacttggacccagctcctgcaggcattaggggccaactgaggagctagaaccaccagatcctatatggagggggtcactggtctgcctgtgcccttgtcctggcctgttggagtgaatgagtctgggggcttgccaagagaagccccagtttggggccagggaggcagagagtgagcagcctccccaggtgttcttgtgtgcccccaggcccggacatatatccagtccctgccccccatgccccagaaggacctgagcagcatcttccgtggagccaaccccctgggtgaggactgccctgggctagactgggctccatatctggccctggatgtacagctgacccccctccccaccactggcttccctgcagccatagacctccttggaaggatgctggtgctggacagtgaccagagggtcagtgcagctgaggcactggcccacgcctacttcagccagtaccacgaccccgaggatgagccagaggccgagccatatgatgagagcgttgaggccaaggagcgcacgctggaggagtggaagggtgagcatggcagtggctgggggtgggtccaggggcctgcgggctccatttccccagaggcaggaaatgccccagttcctctccagactggtcaggtgtggaagggcgttcaggtgtccagcacaggctgggagcggggcggaggagtgacacagggcaggttctggctcccagactgtgctgaggctgctgtcacagggtggtgggcctgggctgggtggcaggtgccagacaagcaggtgaggggccgggctgtgggaggcacaagctcaccctttcccttcacctcctagagctcacttaccaggaagtcctcagcttcaagcccccagagccaccgaagccacctggcagcctggagattgagcagtgaggtgctgcccagcagcccctgagagcctgtggaggggcttgggcctgcacccttccacagctggcctggtttcctcgagaggcacctcccacactcctatggtcacagacttctggcctaggacccctcgccttcaggagaatctacacgcatgtatgcatgcacaaacatgtgtgtacatgtgcttgccatgtgtaggagtctgggcacaagtgtccctgggcctaccttggtcctcctgtcctcttctggctactgcactctccactgggacctgactgtggggtcctagatgccaaaggggttcccctgcggagttcccctgtctgtcccaggccgacccaagggagtgtcagccttgggctctcttctgtcccagggctttctggaggacgcgctggggccgggaccccgggagactcaaagggagaggtctcagtggttagagctgctcagcctggaggtagggggctgtcttggtcactgctgagacccacaggtctaagaggagaggcagagccagtgtgccaccaggctgggcagggacaaccaccaggtgtcaaatgagaaaagctgcctggagtcttgtgttcacccgtgggtgtgtgtgggcacgtgtggatgagcgtgcactccccgtgttcatatgtcagggcacatgtgatgtggtgcgtgtgaatctgtgggcgcccaaggccagcagccatatctggcaagaagctggagccggggtgggtgtgctgttgccttccctctcctcggttcctgatgccttgaggggtgtttcagactggcggctccagtgggccaaagggcaaccacatgagcatgggcaggggctttctccttggatgtgggacccacagcagcttcctgaggctgggggtgggtgggtgggtggtttggccttgaggacgctagggcaggcagcacacctggatgtggacttggactcggacacttctgccctgcaccctggcccgctctctacctctgcccaccgttgtggccctgcagccggagatctgaggtgctctggtctgtgggtcagtcctctttccttgtcccaggatggagctgatccagtaacctcggagacgggaccctgcccagagctgagttgggggtgtggctctgccctggaaagggggtgacctcttgcctcgaggggcccagggaagcctgggtgtcaagtgcctgcaccaggggtgcacaataaagggggttctctctcacttggcttgtatccaaaggctactccaggcccgggtgcccccaccatccctgctgctgggcgtggggggagtgtctgggtcatcctgcatcactcacctccagctggccagatccctcaggcccccagtcagaccagcggccatcttctggcaccctccctgctccctggagggtctgagagcccagggggaccaggggaagacatggctgatgggcagactttgagggcacagggtgtgacagccacccagatggtgaccccagctgccctgtggggatgtactgggcaggcttggctttgggccaagatccagacaccacccccgcctacccctcagtgttcagggaagctggctggggagaagttgggtgtctcaaggagcaagggtctgcccatccctgggtgggggctgggcagggtagggaaaatagctttcctttccctcctggtgaaggaaaaagaggccactttaacccagggaatgtgcacgctggtcccgttcccactacgcgctgcagcttatgtgtgggggagggtccaggccatttggggtcaggcagtgtctctaaggaccagggacagtctgtgcccttgcttgggtcttgggtaggggtggaaaccgtctgggagttgggggcctcctggggcctggtcagtgtagtggtcaatcccgggggaagtccagtgttggcggttgggggtgggaggagaatggtgacacagccccacctcagaagcctggtccgtgcagggcctgctggacccctgagccccaccacggggagtaagggggacagcgtggaagctgggcttcctggaagaggtggatggagtgccacaggcagcccagggcacaaagggtatgggccacaggcagctgtggtttgggtggccctgggctgccccgctcactggtcacgagctggtgaatgccgtggagcacggcccaagcccaggtgtaaagctactaccacccttgagcggctgagctgctgattcatggcaggagggcggggcagaaggccctagggatcctgttacccaccagcccagtgggctcctggggtgccccaacatcccttctgagatccaggttcctgggctggtgaaggggtgtcagggtggggctttgccctcaggagcatctggtccaggatggggccagacctatgggaggacaatgcccacacagaggggtcaggcggagggccccagcaggtccccatccctgctggagagagtgcagccactctcagcctgggttttgcaggacaggacaggcaggggtgggatgggcagagacaccagtacttgcaatgcttggagcaggcaccccacagatggggggagcagggggaggagctgggggtccaaaagggcccacggggacctatgggactgagaggcccggggtcagtggccacaggagtggggttggggatgcagcctgaggagtttgggggacagacccctccgtgtagaaagagggatacaggcaggacaggtgcagatggaccccttgttgggggacggatggatcaggctcagtggtagggcatccttgggggtggcctgcgaagttgaccccgggaacacagggctcagcccgacttgcggctgccatagaagtcagcgctcaggctgtcaaggatgggccctgcgccctggagccgtggggagttaggactggagcgggcggggggggggggggggggctcctgctgagacccccccagggcggggaagttcagccaaaggggagaggctggcagaggtatctccgcgccgcgtccggccctttatggggacgaagctgcggggcggcgctcccctccccctgcgcttccccccaggctccggccctccccaggctccggccctcccccggcggcggccgcctcgggtttccggaggggccggagggcgggcgagggcgtcacgtgcgcgccgcccgcgggccggttggtccccgggcgggggaggggccgtgcgcagcctgggtcggggtcgggccggggtcggcacctgggacatccctgagggaagggccgggagcgggagcgccccagcggccggcgggcgggcgggcgagcggacgagcggcgcggagccggcccgaggcgcgcgccgagggagccccgtccccggtcgtgggggcaccgcccgcaggctctgcggggtgggcagctcccgggcctgccatgagctctccgccgcccgcccgcagtggcttttaccgccaggaggtgaccaagacggcctgggaggtgcgcgccgtgtaccgggacctgcagcccgtgggctcgggcgcctacggcgcggtgtggtgagcgcgggccgggcggggcggccggcggggcgggcggggcctgcgcggggtgcccggccttcccgctaagcggtccgccccgcagctcggccgtggacggccgcaccggcgctaaggtggccatcaagaagctgtatcggcctttccagtccgagctgttcgccaagcgcgcctaccgcgagctgcgcctgctcaagcacatgcgccacgagaacgtgagtcgcgcggccccgctccgggaaggcgccgcggcctcggcttggttcagctgggctgggttcccccacccggcaacccctcctccaggcagcctgctgtggggccgggcgggggtcgggccgtgggtccccaggggagaaggagagcaaggcctgtctctccttgggagacgactcccccaagggccgttccccatcctccgccagccccgggaaggactcagccccttgactcggcgcctcagccaggccctggtcagggaacacgacttggccaggcccaggggatcctccaggtctcacgccaagccttgcccccagccaggaagcccgcggtgagagcatgctcccggcgggaggattttcctggaaggggcaccttccctcttccccatcccctttccagcccctctgtggagcccactctgctgctgtccatctcccgagtcttccgacccggtggtggagggggaggaggggggcgccagaacgcagggagtgtgttgaaccctcaggagcccctgggggtgaagggtttagggagctgctgtttgaggagcactgggcgtggtggccgcctcacagacaccctcctgtgcgttgtgggggcccatcctttccagtccttccagtgagatgccacgtacagctgccctgggcctctcccatggcggtggctggctgctaagaacccgatctctctgccaggggtgctctggtttctggatacagtcccacttgtccactgccccccacgtcactcctgccctccccctggtctgggcccagcctgagggctggtggtctgggcacccggaccctacctacagggtgagatgctctggaccctcctgggtcatctgagccaccggtgccttgggagaacgagtccctgcgtccaccagcaaagtgccccgtccaccagcaaagtgccccgtcccccggttcctggccaccgctactccctcagccccttggatgggtctttttctctgaggcttcccatgcccaccctgacccccagctcactaccctgggccctgtgaaatccatttgcagtggacaccagccctgcccgcacctcgacaccccgtcacacccagccctgcccccacttcgccggcaccgcacccccccaccacccgcccatcacaccaaggccttgccccaggactgcagccttccccacggccccctgctcccacccacccactcacccacccgtgccttgccccatccagccaagcgctctggggctttttttctttttttttcttttgaga

SEQ ID NO: 2990 - DNA, 6000 bp, Homo sapiens
tgggatagagcctagggcaggtgcccaatccctgcaggggaaacaggagaagggggaagacattcctgacaccagggacagtgagtgcaaagccatgaccccagcaagcagtgcctggccagggcagtgggggtgggctgggggcccagcaagcagtgcctggccagggcagtgggggtgggctgggggaccccagcaagcagtgcctggccagggcagtgggggtgggctgggtggagggagtgtacttggacccagctcctgcaggcattaggggccaactgaggagctagaaccaccagatcctatatggagggggtcactggtctgcctgtgcccttgtcctggcctgttggagtgaatgagtctgggggcttgccaagagaagccccagtttggggccagggaggcagagagtgagcagcctccccaggtgttcttgtgtgcccccaggcccggacatatatccagtccctgccccccatgccccagaaggacctgagcagcatcttccgtggagccaaccccctgggtgaggactgccctgggctagactgggctccatatctggccctggatgtacagctgacccccctccccaccactggcttccctgcagccatagacctccttggaaggatgctggtgctggacagtgaccagagggtcagtgcagctgaggcactggcccacgcctacttcagccagtaccacgaccccgaggatgagccagaggccgagccatatgatgagagcgttgaggccaaggagcgcacgctggaggagtggaagggtgagcatggcagtggctgggggtgggtccaggggcctgcgggctccatttccccagaggcaggaaatgccccagttcctctccagactggtcaggtgtggaagggcgttcaggtgtccagcacaggctgggagcggggcggaggagtgacacagggcaggttctggctcccagactgtgctgaggctgctgtcacagggtggtgggcctgggctgggtggcaggtgccagacaagcaggtgaggggccgggctgtgggaggcacaagctcaccctttcccttcacctcctagagctcacttaccaggaagtcctcagcttcaagcccccagagccaccgaagccacctggcagcctggagattgagcagtgaggtgctgcccagcagcccctgagagcctgtggaggggcttgggcctgcacccttccacagctggcctggtttcctcgagaggcacctcccacactcctatggtcacagacttctggcctaggacccctcgccttcaggagaatctacacgcatgtatgcatgcacaaacatgtgtgtacatgtgcttgccatgtgtaggagtctgggcacaagtgtccctgggcctaccttggtcctcctgtcctcttctggctactgcactctccactgggacctgactgtggggtcctagatgccaaaggggttcccctgcggagttcccctgtctgtcccaggccgacccaagggagtgtcagccttgggctctcttctgtcccagggctttctggaggacgcgctggggccgggaccccgggagactcaaagggagaggtctcagtggttagagctgctcagcctggaggtagggggctgtcttggtcactgctgagacccacaggtctaagaggagaggcagagccagtgtgccaccaggctgggcagggacaaccaccaggtgtcaaatgagaaaagctgcctggagtcttgtgttcacccgtgggtgtgtgtgggcacgtgtggatgagcgtgcactccccgtgttcatatgtcagggcacatgtgatgtggtgcgtgtgaatctgtgggcgcccaaggccagcagccatatctggcaagaagctggagccggggtgggtgtgctgttgccttccctctcctcggttcctgatgccttgaggggtgtttcagactggcggctccagtgggccaaagggcaaccacatgagcatgggcaggggctttctccttggatgtgggacccacagcagcttcctgaggctgggggtgggtgggtgggtggtttggccttgaggacgctagggcaggcagcacacctggatgtggacttggactcggacacttctgccctgcaccctggcccgctctctacctctgcccaccgttgtggccctgcagccggagatctgaggtgctctggtctgtgggtcagtcctctttccttgtcccaggatggagctgatccagtaacctcggagacgggaccctgcccagagctgagttgggggtgtggctctgccctggaaagggggtgacctcttgcctcgaggggcccagggaagcctgggtgtcaagtgcctgcaccaggggtgcacaataaagggggttctctctcacttggcttgtatccaaaggctactccaggcccgggtgcccccaccatccctgctgctgggcgtggggggagtgtctgggtcatcctgcatcactcacctccagctggccagatccctcaggcccccagtcagaccagcggccatcttctggcaccctccctgctccctggagggtctgagagcccagggggaccaggggaagacatggctgatgggcagactttgagggcacagggtgtgacagccacccagatggtgaccccagctgccctgtggggatgtactgggcaggcttggctttgggccaagatccagacaccacccccgcctacccctcagtgttcagggaagctggctggggagaagttgggtgtctcaaggagcaagggtctgcccatccctgggtgggggctgggcagggtagggaaaatagctttcctttccctcctggtgaaggaaaaagaggccactttaacccagggaatgtgcacgctggtcccgttcccactacgcgctgcagcttatgtgtgggggagggtccaggccatttggggtcaggcagtgtctctaaggaccagggacagtctgtgcccttgcttgggtcttgggtaggggtggaaaccgtctgggagttgggggcctcctggggcctggtcagtgtagtggtcaatcccgggggaagtccagtgttggcggttgggggtgggaggagaatggtgacacagccccacctcagaagcctggtccgtgcagggcctgctggacccctgagccccaccacggggagtaagggggacagcgtggaagctgggcttcctggaagaggtggatggagtgccacaggcagcccagggcacaaagggtatgggccacaggcagctgtggtttgggtggccctgggctgccccgctcactggtcacgagctggtgaatgccgtggagcacggcccaagcccaggtgtaaagctactaccacccttgagcggctgagctgctgattcatggcaggagggcggggcagaaggccctagggatcctgttacccaccagcccagtgggctcctggggtgccccaacatcccttctgagatccaggttcctgggctggtgaaggggtgtcagggtggggctttgccctcaggagcatctggtccaggatggggccagacctatgggaggacaatgcccacacagaggggtcaggcggagggccccagcaggtccccatccctgctggagagagtgcagccactctcagcctgggttttgcaggacaggacaggcaggggtgggatgggcagagacaccagtacttgcaatgcttggagcaggcaccccacagatggggggagcagggggaggagctgggggtccaaaagggcccacggggacctatgggactgagaggcccggggtcagtggccacaggagtggggttggggatgcagcctgaggagtttgggggacagacccctccgtgtagaaagagggatacaggcaggacaggtgcagatggaccccttgttgggggacggatggatcaggctcagtggtagggcatccttgggggtggcctgcgaagttgaccccgggaacacagggctcagcccgacttgcggctgccatagaagtcagcgctcaggctgtcaaggatgggccctgcgccctggagccgtggggagttaggactggagcgggcggggggggggggggggggctcctgctgagacccccccagggcggggaagttcagccaaaggggagaggctggcagaggtatctccgcgccgcgtccggccctttatggggacgaagctgcggggcggcgctcccctccccctgcgcttccccccaggctccggccctccccaggctccggccctcccccggcggcggccgcctcgggtttccggaggggccggagggcgggcgagggcgtcacgtgcgcgccgcccgcgggccggttggtccccgggcgggggaggggccgtgcgcagcctgggtcggggtcgggccggggtcggcacctgggacatccctgagggaagggccgggagcgggagcgccccagcggccggcgggcgggcgggcgagcggacgagcggcgcggagccggcccgaggcgcgcgccgagggagccccgtccccggtcgtgggggcaccgcccgcaggctctgcggggtgggcagctcccgggcctgccatgagctctccgccgcccgcccgcagtggcttttaccgccaggaggtgaccaagacggcctgggaggtgcgcgccgtgtaccgggacctgcagcccgtgggctcgggcgcctacggcgcggtgtggtgagcgcgggccgggcggggcggccggcggggcgggcggggcctgcgcggggtgcccggccttcccgctaagcggtccgccccgcagctcggccgtggacggccgcaccggcgctaaggtggccatcaagaagctgtatcggcctttccagtccgagctgttcgccaagcgcgcctaccgcgagctgcgcctgctcaagcacatgcgccacgagaacgtgagtcgcgcggccccgctccgggaaggcgccgcggcctcggcttggttcagctgggctgggttcccccacccggcaacccctcctccaggcagcctgctgtggggccgggcgggggtcgggccgtgggtccccaggggagaaggagagcaaggcctgtctctccttgggagacgactcccccaagggccgttccccatcctccgccagccccgggaaggactcagccccttgactcggcgcctcagccaggccctggtcagggaacacgacttggccaggcccaggggatcctccaggtctcacgccaagccttgcccccagccaggaagcccgcggtgagagcatgctcccggcgggaggattttcctggaaggggcaccttccctcttccccatcccctttccagcccctctgtggagcccactctgctgctgtccatctcccgagtcttccgacccggtggtggagggggaggaggggggcgccagaacgcagggagtgtgttgaaccctcaggagcccctgggggtgaagggtttagggagctgctgtttgaggagcactgggcgtggtggccgcctcacagacaccctcctgtgcgttgtgggggcccatcctttccagtccttccagtgagatgccacgtacagctgccctgggcctctcccatggcggtggctggctgctaagaacccgatctctctgccaggggtgctctggtttctggatacagtcccacttgtccactgccccccacgtcactcctgccctccccctggtctgggcccagcctgagggctggtggtctgggcacccggaccctacctacagggtgagatgctctggaccctcctgggtcatctgagccaccggtgccttgggagaacgagtccctgcgtccaccagcaaagtgccccgtccaccagcaaagtgccccgtcccccggttcctggccaccgctactccctcagccccttggatgggtctttttctctgaggcttcccatgcccaccctgacccccagctcactaccctgggccctgtgaaatc

SEQ ID NO: 2991 - DNA, 6000 bp, Homo sapiens
gctccagccactctgtatctgggggctcctgagccaggctccgggcaagtggaagactcctgtacagggtcaccatggtttttaatcattgcatcagtaaaccattgctgtggaacaacccatgcccacagttagaggcttaagagaataaacatttattatttgccatgatcccgtgggtatgttgagcagttttctggtcagggctggctgagctgatctctgcagtaagcaggtgctttggctggggctggatagtctaggatgacctcacttatgtattgtaggtggtttgatgttggctggggtggcaaggtaacttggctgtctgtctctgatcacccaggaggatcacaagctggggcttattcacatggtggctattagtgcacaagcctctgcttgggtcacctttgttaatgtcctgttggccaaagcaaatcacaagatcaaccccagattcaaggagtggagccacagacccacctgttgctggaaggagtcccatggaaacaaagtgtggataggcaggggaaaaatttataagcatttttgcaacctgcttacttgcaggcgcccattccctctttttctgtatgtcacaccctgttgttcatttggggcatcactcccactcccaaactcacacttagataatctgaggcacagcgattggttcaaggatgggcatgtgacccaattctggccagtgagacttgctcctggtacttttgctgagaactgttgggaatgaggtccgtcctttctgctgaggcagctgtgctaatagaatgcaggcctggagcttctggagccatgtttgcctctcatggggggagcctgcatgagcgttaagtcgacagtgagggaagaagatataaggcattaagaaagagtgattatggccaggcgcggtggctcacgcctgtaatcccagcactttggaaggctgaggctgggagttcacgaggtcaggagttcaagaccagcctaaccaatatggtgaaaccccgtctctactaaaaatacacaagaattagttgggcatggtggcacacgcctgttgtcccagtagggaggctgaagcaggataatcgcttgaacccaggagacagaggttgcagtgagctgagattacaccactgcactccagcatgggcgacacagttagactccgtctcaaaaaaaaaaaaaaaaaaagaagaaagagtaattgagagggaagaagagagaccacctggatcaagccatacctgaatacctacctcaggtcttttcagttacatgagctaacacactgcctttcttgcttaggccattttgagttagctttctaattcagcactttgaaccaaaaagtcctaatacagttccctcccttaaaagttcttcctgtctgatctcaaagctcttcccatctgcagaccttgacttggactgggcattcctctgtctagtgtacttgtcacctctgcttgggcatatagtaggtgctcagcaaacacttgtttgaaggatcaataggaggggttgggactcctcctaagaagaggctttggtgacagacaggtagctggcctcagtgagaagctcccagaggtgatggtggtctgacaggcaggtggacggggtaatgggcacagtctgtaagtgtaaacaagacctagctgtcccagggctgggagggagagaataaggcagggtccatgtctgggaggagtcaagataggggcctggtcacaaggacacagcagggcctgcttcctagaactggggtccacagtaagtgtgaggtccacagcacttttacctcacccggactgtgccaccaaggttcagtccctgtcaccttcttctactgtacactttccactttgatcccttcttcacccagcagctagaatgacctttggaaaatgtaaattacacccctgcctaaagcctctaaggacttcccccctgtgcttatagcaacataatattaatgacagctgacactcacacagggcttagtagttgccaggcacccttctaggcattaaacctagaataactcctttaattatccctacaaggcaaatactaatattatccccattttgcagatgagaaaattgaggcacagagaggtcaacaacttacccaagttaacatggattaaaatctgaactttttactaaggcatggaactctccacttctggggtctttgggtctttgcatggctgcctctctctatcagttgggtctctgcccatatatcacttcctcagagggagcctcccagatcatacaatttacagtgtcccctcctctgtccattttatcacccttttttattgtttttacatcagttactgttttatgcaattatcttactcatttttttacaaactctctttttttttatcctggctccatgctcacccccaggctgccagctcctggagaacagaggccatatctgtcttactcacctctgtattctagcacctggtacaagtggagagtggctcaataaacatttgttaaaatgaatggaggaagggagagatggaggcagggaggaaggaagaaaaaaaataaggaaggaaggaaggaaagaaggaacgaaggaagggaggaagaaaggaaggaaggaaagggagggagggagctcctttaatatcccctctcccataactagaatgaggaagatggggcctagaggaagagagagtgctgggcagagaggaacaggatgaagagaacctggaaaggagctcaggggccacaggacatccccaggttaatccagggcaggccccacactcagttgggagaatgcttctctaattagggttgtcagatttggcaaataaaaatacaggatgcccagttaaatatttgaatttctggttaaacaacaaataattggttaataggttgtgtgcaatatttggggcaggtttacactaaaatgttgtgtgcggttcatctgaaattcagatttactgggcaacttgtattttatctggccatcctattctggcttctcgctgtgtgctatgtgccacagaagattccactaaacactagcctgcttttattttacatggaacattttgtttttagtcctgaataaggaagtacaatctctttattgatctaacagaaggagaaagtccatacaaacagcagcttgttaagaggagaatggctcccagggttagataaacacccaagacaaacgccttttcctgagctcaaagtgcgcttgttcttgaactttccttcctgggcctagaggtgggcttgatgggatctatcaccctggtgctgctgaagatggcaggaagagaaatgctcagcctgggaggaaaagatttatgggaatgtgggcttagtcggtgattcatccattcattcagcctcacccaccagctattggcagacactcagagatgaatggcaccgcatcctgtcctggaggctctccatagatagggaaatgtattttggccccaggactaacaagtactgcctccttccaaatctgtctccatggttgaatgcaaaaagtacattcctgtccctgtcttttctctctctccctttctccttacccattctttctcttttttctcatctcctctctcttcctctctcaccttcccagccatttgtcaccttaaacctaattaccttgtccaactagtagtgtgaaaaaaacaattactggttcactcaggccacggacctggtcttaaatgcttttcctttgtctctccaagaccccacttcctccacatccagaactatccgacattttccagctcagcctggcattcatttgcgttcatttgcatgccgttctatgattggctgatacaaagtggggggcgggggtggacaccgtaaacctccattcctcatgcatttaatataacatgtatgaaaaaaagtatctatatttatatctcgtttaagaaaaaaattgttcaatgatacttgttaaagcacaataaggaagacttaatcaggacaattcaagtaggtatagagaccactggaactgtgtcttgcaattggtgaaaactgggctcaactctgaatacaacatgggcaaatggaaatttatagccaggaagcagggtggggagcagtgcatgaaaaattactaagaggaaacatcagaggtaacagtagattcttgctgaagaggccagggtgatcagacatcaactgggggatggtggaggatgaggaacacatcagatatcaagagtgatcacatatcaaaggtggggattcttggtaacttgatttagcagggttttttgctaaaactggatttttacaggaagtacacagattggcctaggagaaggttcaggagcctgactaaagtttgctcaagcaaagaatcttcgtcaatctgcataggaaatatctagaaggctatatgccaaagttaatggtgcttctctccgaagaaaaagaaaaaccgtgcattaaaattttaatatgaataaaagcaacagctcccatttaaagcccagaggtcctgtttggaatctgactcgaaactctatccactttttcgggcgtaggcttctcttgtgtaaactgacaatgataacatctacctcccagtgttgtgatacgggagacataaagtaatggatataaaaacttctgttcagagcaaggacggatagtcactgcgattagggtgggcgacccggaggggggtcatgagcctggaccttgacagatctggtgaggtctggatttggtttgattcctggctatcttttcttaatattcaactggctctacgctttttaaccattcactttcttcaaggtaagtgcggcagaagcctggcgcatgcgcagtacaagcccttaagcggcgccccgcccacatactactacaacttccggcaggctccgcgcccgcctctggcgcgtcgcgggctgctgacgtaatgcggtagcgcggggaatttcgagtggtgttggagcgccggaggctagtgggtggctgacccccagcatcctcgggagcgaccatggactccctggccgagtctcggtggcctccgggcctggcagtcatgaaggtgagtgcttcggggagtttgggagctcccgggtgtctgcggggggaggtccctccctttgaggaggatgtcctcgccttaaggagaaaggatgaggcgcgagcgtcgcactgggcccgggtatccggctctgccctgccactagccgaccgcgtggctctgggtctcagtttactcctctgataagtgacaaggacaagcctggtgagctgaggttggcagtcttatggcaccagctattctgcgatccaatcccaacaataacatggagaaaaacagttattccaaacaatgacatcgacagctgttctttactgaaagcttactttgtgtcaagcactaaacagtgacaccggacatgattttgggtggacactttatcagataacatgtatgtaatcacgtagccaagcaggtagtctcctttacaggctctttcatttcttctgattattctcaataaacgtagtgctcgtttgttctgacatactgccccaactcctctctaacacaccttcactcttctctaacaattgctcatgtctcttaaacagagatcaggactcaggctcagcgctgatcttgcattgcgtctgattatttcacttaaataacatttatttttgtggccactttctgttttggcaaggcataccagtttccatttacagtagtggtgggccctggatttgctcaagagcagatgcactttgctgtgctggataaagatcagttgcttggtgtttcttcttgctctgtgattatttccgtttctcacagtggctaagatagccttcttctccctcagttttgtagacttggggattataatacctgtcccactgactcataaatttgactttagaattaagtgaaggctaaagtaagtagaag

SEQ ID NO: 2992 - DNA, 6000 bp, Homo sapiens
ccctcattccccaatcaggggcctcttagctgcctctctggctatttgtataagagttaatcttccaaattccaagcccctaaaatgatctccccaacgttagctggagtaatggtcctatatgcccagggcatgaccctggatatctacccttctcaaatcaggcccctcaccaactctccttctttctttctctgctccaggcctgggtcccaacatgtcctcaacccccgcacatgaggtgggcaggagaacctcagttctgttctccaaaaagaacccgaagacagctggaccgcccaagaggccgggccggccccccaaaaaccgggagagccagatgacccccagccacggaggcagtcctgtggggcccccccagctccccatcatgagttccctgcgtcagcgcaagcggggtaggagcccccggcccagttcgagctcagacagcgacagtgataagtccacagaagaccccccaatgggtgagccttaccatcacccagccccccaagagagtgagcaaagctgccattcttcccagcatactcccagttacccctttatttgcccataaaagagcgagctagaagggtccttaggaatcctttaactccactcactcatcttacagttgggaaaactgaggcccagagacactacgacccagctaaagtcccatccagggccccctgcctccattgtatcactttaccttttctcttctcaccttccttggggatctcctgccctttaagccatttgtgtcctaaagccagtaactgccgagggaagcaaggggtggagcagggctgtggccaactgtggtagacactgcccagagctagctctgctggccaaggttggaggaattttccagcacagaaggggaacccaagctccaagtccctcttacctccatgtcatctctgatctacatcttcctgaccggttccttccctcctccccttcccttcaaccaagacttaccagccaatggcttcagcggtggaaaccaaccagtgaagaagagtttcttggtataccgtaatgactgcagccttccccggagcagctcagactctgagtccagcagcagtagcagtagcagcgctgcttcagaccggaccaggtaccagccctccagatcgaggccaacctcaggggatgcccttccagggctcttgggcctgtgtaggtttccctgttggaagtggggtggcagccatctcagtctagattaagatggctcaaactcaaggttctctgctaaataaataaatcagtgttaccattaatagaacagagagaaccatcctggattaaggtgatgattagagtatgcactcctgccgccactgctcaggctaacccacctctgttaggtcatcagcctagcccctgtgggtgtttgaatttgaaattcctcatatagcctctgctttccaaaagtctcagaccctgcgggctttaagagctgagggcacataccatgctgttccccattcttcccctcctttgagctgagctcccattgtcttgtccacagcacaacgccctcaaaacaaggccggggcaaaccctccttctctcggggcactttcccagaggacagcagtgaggatacctcaggcactgagaatgaggcctactccgtgggcactggccgcggcgtgggccacagcagtaagttcccttgcccaaggccagggatgctggggacccagtgtcagggtctcgccagccccccagctgctgatccaccccctctcccccattcctgtgaagtggtaaggaagagtctgggccggggagctggctggctgtcagaggatgaggactccccgctggatgctctggacctcgtgtgggccaaatgccgaggctatccatcatacccagctctggtatgcttgcttctgttacacttcttgctttccaatcccagaatacagattcacagttagcagacttttcctactccctgctgagctgtggggcacagagtttcttggtaaggtagactggtgggcagatacagcttgagtaccacttagaggctcccactcagtttctccatctctcccttttgcttctctttgctccttgggctctgaaataatttagcatggaaagaagctgagggtcagcattgcagttctagtagcatgataccctctctgtccccacttcagacatactctctaagttcttgaggaggaaaagccttgggaggacatggactgaaccaaactgggctcttattatatcctcagatcattgatccaaagatgccccgagaaggtatgttccaccatggggttcccatccctgtgcccccactggaggtgctgaaacttggggagcagatgacccaggaagcccgagagcatctctacctcgtcctcttctttgacaacaaacgaacctggtaaggaggggagcatttggtgtgactcacagccacagatgcagccctgtgtggtatgggggcagactgccaggaaactccagcaacaggcagactgggctatcacaagtcagtgggggagggacttagaacagttttttgagcgaaagggttgtgtcgaccatgtgtctgagaggctgagtgggcactagtggacacagctatagctagaaaccaaaggaccatcagagacttatgacaaatatagaggtggctcccacccagactcagatggcttctagacttagttttcccacctctgcctccacagtgacaaaatgaggataaagcaggcataaacattcaggctctgaatccctgttctgtcacatttacacatgtagtctttttgttaattgtctgcagaggatattcaatgtcagtaaagtctgcctagagcctatggcacagggtagctatttctggtgaggtcagggtgcctcctttttgtacccataaataccctgtgattaccctcccgccgccaccacacagtataactgttgactgggctctttcatctctagaccatgaacagtcctttgagggcagggaccatcacagagtctggccagagtgggtgcttgggtggtgtgtttgagtgaatagaggaggaaggctggtccttgttctccctgagatgatttatttgatcttcaccttatcctataggcagtggctgcccaggaccaagctggttcctctgggtgtgaaccaggacctagacaaggagaagatgctggagggccgcaagtccaacatccgcaagtcagtacagatcgcctaccacagggctctgcagcaccgcagcaaggtgcaaggcgagcagagcagtgagaccagcgatagtgattgatactgctcaacacagcccaacctatagtgccctgtgacttctctcctcccctttgctcactgtcctggagtggcaccggcctctgcactgactcatttctggtcttggggccagtctcaggggaagctgggtgggggaggtccctcctgccctaagtgcagctggactgtacagaacactccaagggccaatggcagttcagcgcaaggagagggagggcccacaggtcagaaaaagctccagagacctcacagcattgtagggcggggtggtgggccaaagttaggacactgcgtaaaacaggccatcccaccacctctacctgctcatgccaggagaatccataactgcctagaggcctggggcccctaccggtcgtgaggtgagtgggcatctgtccagcctggaagaggggcactaggtgactccctcccctgctgttgtaaatactgtaattatcggagaatttaaattattctcatttgtaactgcgtttccgggtcgcgccagagtcatttggtactaaaaaaaaaaaaaaaaaagactgggggctgtccccatttcccttctctttcccatagattcccccacctttcaaactggtttgtatttatttcaaaggaagaaaatatattgattcttagaaaataaactgtcaatttagaattctttgttcttgccccctgccagggcaaaggggatacaaagggaggttctgtgccccagggatgatacataattgggcccaagtggttgctgactgctgtgcatgctacatttcataagacacagcaaagagagcccctgttgcccatgcatggagtgagtggcaggccctgtgttgagcacctttagacattcagctttgcgtaatccttgcaataactatagggtagtttaataatagactggttatctccacaaagatgctgaagtttcaaaaaattatcttgcctaagttcctacaactaggaaggtgcagagctagaattggaacccaggtctgtttgcaaacctggctcttcaaccagtatgctgaactgccaggggaagagtcaactatcgattcctacttggcccttagaggcctcaagtcctttgccagtggcatggcccaagtgtttcagcatcaatacagctgagaccttccccactgcttaaccggagacagagctgggatggagacggttgctctttgctcacccccaacctcagcaccttctttccagactccaccgacatttattgaaggaatgccttccaagtgctaggcgcctgtgggatggcatgcctacagataggaacagtcacaggaagaaggggcggcccaggccttgcagccactgaggactggcactgagacaatgatggcactggtctgatgttgattccatgctgacggtacactccgctaggtctctggctgggacacaagggtcaatccgctgcagatgttgctcttcaagaatttgcagtctgggcggggtgcggtggctcacgcctgtaatcccaacactttaagaggccgaggcggctggatcacgaggtcaagagatcgagaccatgctagccaacatggtgaaaccccatctctactaaaaatacaaaaattagctgggcgtggtggcgcgcacctgtagtcccagctactcgggaggctgaggcaggagaatcgcttgaacccgggaggcggagcttgcagtgagccgagatcgcgccatcacactccagcctaggcgacagagtgagactccgtctcaaagaaaaaaaacttgcagcctgatagttaagatacagcaaccccaaatccctatgctaaaaggtgagaatggcccagataaaggtcatgtctcctagctccctgctttttcatgccatcctccagaagggaagaaattaaataatccatcctcctactccaggcgactagaaggcaggctgcctcagggccacacactgggacttggactcaacctgatgggcttctgggcccagccccagacaaacccccggcaaacgtcccattccgaggaaagcatgagcagatggagtatggaagaaatgcccaagacggcaggcagcagctgtggcggccggcgggacgacaatccgaggagaggcctctgatgtcctgaggtctcagaggacgcctaaaggccttgaatgggacaagcttagcgggcgggcgcagaagagaataatactctggagacacttcccgagggctctggggccggagctgtgttcgctccggttcttggtgaagacagggttcgtgggaggcggcccaaggagggcgaacgcctaagactgcaaaggctcgggggagaacggctctcggagaacgggctggggaaggacgtggctctgaagacggacagccctgaggaaccgcggggcgcccagatggaactcgttagcgccccgagtgcagacaatcccggagggggaaaggcgagcagctggcagagagcccagtgccggccaaccgcgcgagcgcctcagaacggcccgcccaccctgatttctcattggcgcctcctacctcctcctcggattggctacctctaggtgaaatgagcggtggttgagccctacttccggtggtgctgtggtctgcccctggagaacccagaagaacacagctgtgcgcgcccacaggctctggggg

SEQ ID NO: 2993 - DNA, 6000 bp, Homo sapiens
tgctaaataaataaatcagtgttaccattaatagaacagagagaaccatcctggattaaggtgatgattagagtatgcactcctgccgccactgctcaggctaacccacctctgttaggtcatcagcctagcccctgtgggtgtttgaatttgaaattcctcatatagcctctgctttccaaaagtctcagaccctgcgggctttaagagctgagggcacataccatgctgttccccattcttcccctcctttgagctgagctcccattgtcttgtccacagcacaacgccctcaaaacaaggccggggcaaaccctccttctctcggggcactttcccagaggacagcagtgaggatacctcaggcactgagaatgaggcctactccgtgggcactggccgcggcgtgggccacagcagtaagttcccttgcccaaggccagggatgctggggacccagtgtcagggtctcgccagccccccagctgctgatccaccccctctcccccattcctgtgaagtggtaaggaagagtctgggccggggagctggctggctgtcagaggatgaggactccccgctggatgctctggacctcgtgtgggccaaatgccgaggctatccatcatacccagctctggtatgcttgcttctgttacacttcttgctttccaatcccagaatacagattcacagttagcagacttttcctactccctgctgagctgtggggcacagagtttcttggtaaggtagactggtgggcagatacagcttgagtaccacttagaggctcccactcagtttctccatctctcccttttgcttctctttgctccttgggctctgaaataatttagcatggaaagaagctgagggtcagcattgcagttctagtagcatgataccctctctgtccccacttcagacatactctctaagttcttgaggaggaaaagccttgggaggacatggactgaaccaaactgggctcttattatatcctcagatcattgatccaaagatgccccgagaaggtatgttccaccatggggttcccatccctgtgcccccactggaggtgctgaaacttggggagcagatgacccaggaagcccgagagcatctctacctcgtcctcttctttgacaacaaacgaacctggtaaggaggggagcatttggtgtgactcacagccacagatgcagccctgtgtggtatgggggcagactgccaggaaactccagcaacaggcagactgggctatcacaagtcagtgggggagggacttagaacagttttttgagcgaaagggttgtgtcgaccatgtgtctgagaggctgagtgggcactagtggacacagctatagctagaaaccaaaggaccatcagagacttatgacaaatatagaggtggctcccacccagactcagatggcttctagacttagttttcccacctctgcctccacagtgacaaaatgaggataaagcaggcataaacattcaggctctgaatccctgttctgtcacatttacacatgtagtctttttgttaattgtctgcagaggatattcaatgtcagtaaagtctgcctagagcctatggcacagggtagctatttctggtgaggtcagggtgcctcctttttgtacccataaataccctgtgattaccctcccgccgccaccacacagtataactgttgactgggctctttcatctctagaccatgaacagtcctttgagggcagggaccatcacagagtctggccagagtgggtgcttgggtggtgtgtttgagtgaatagaggaggaaggctggtccttgttctccctgagatgatttatttgatcttcaccttatcctataggcagtggctgcccaggaccaagctggttcctctgggtgtgaaccaggacctagacaaggagaagatgctggagggccgcaagtccaacatccgcaagtcagtacagatcgcctaccacagggctctgcagcaccgcagcaaggtgcaaggcgagcagagcagtgagaccagcgatagtgattgatactgctcaacacagcccaacctatagtgccctgtgacttctctcctcccctttgctcactgtcctggagtggcaccggcctctgcactgactcatttctggtcttggggccagtctcaggggaagctgggtgggggaggtccctcctgccctaagtgcagctggactgtacagaacactccaagggccaatggcagttcagcgcaaggagagggagggcccacaggtcagaaaaagctccagagacctcacagcattgtagggcggggtggtgggccaaagttaggacactgcgtaaaacaggccatcccaccacctctacctgctcatgccaggagaatccataactgcctagaggcctggggcccctaccggtcgtgaggtgagtgggcatctgtccagcctggaagaggggcactaggtgactccctcccctgctgttgtaaatactgtaattatcggagaatttaaattattctcatttgtaactgcgtttccgggtcgcgccagagtcatttggtactaaaaaaaaaaaaaaaaaagactgggggctgtccccatttcccttctctttcccatagattcccccacctttcaaactggtttgtatttatttcaaaggaagaaaatatattgattcttagaaaataaactgtcaatttagaattctttgttcttgccccctgccagggcaaaggggatacaaagggaggttctgtgccccagggatgatacataattgggcccaagtggttgctgactgctgtgcatgctacatttcataagacacagcaaagagagcccctgttgcccatgcatggagtgagtggcaggccctgtgttgagcacctttagacattcagctttgcgtaatccttgcaataactatagggtagtttaataatagactggttatctccacaaagatgctgaagtttcaaaaaattatcttgcctaagttcctacaactaggaaggtgcagagctagaattggaacccaggtctgtttgcaaacctggctcttcaaccagtatgctgaactgccaggggaagagtcaactatcgattcctacttggcccttagaggcctcaagtcctttgccagtggcatggcccaagtgtttcagcatcaatacagctgagaccttccccactgcttaaccggagacagagctgggatggagacggttgctctttgctcacccccaacctcagcaccttctttccagactccaccgacatttattgaaggaatgccttccaagtgctaggcgcctgtgggatggcatgcctacagataggaacagtcacaggaagaaggggcggcccaggccttgcagccactgaggactggcactgagacaatgatggcactggtctgatgttgattccatgctgacggtacactccgctaggtctctggctgggacacaagggtcaatccgctgcagatgttgctcttcaagaatttgcagtctgggcggggtgcggtggctcacgcctgtaatcccaacactttaagaggccgaggcggctggatcacgaggtcaagagatcgagaccatgctagccaacatggtgaaaccccatctctactaaaaatacaaaaattagctgggcgtggtggcgcgcacctgtagtcccagctactcgggaggctgaggcaggagaatcgcttgaacccgggaggcggagcttgcagtgagccgagatcgcgccatcacactccagcctaggcgacagagtgagactccgtctcaaagaaaaaaaacttgcagcctgatagttaagatacagcaaccccaaatccctatgctaaaaggtgagaatggcccagataaaggtcatgtctcctagctccctgctttttcatgccatcctccagaagggaagaaattaaataatccatcctcctactccaggcgactagaaggcaggctgcctcagggccacacactgggacttggactcaacctgatgggcttctgggcccagccccagacaaacccccggcaaacgtcccattccgaggaaagcatgagcagatggagtatggaagaaatgcccaagacggcaggcagcagctgtggcggccggcgggacgacaatccgaggagaggcctctgatgtcctgaggtctcagaggacgcctaaaggccttgaatgggacaagcttagcgggcgggcgcagaagagaataatactctggagacacttcccgagggctctggggccggagctgtgttcgctccggttcttggtgaagacagggttcgtgggaggcggcccaaggagggcgaacgcctaagactgcaaaggctcgggggagaacggctctcggagaacgggctggggaaggacgtggctctgaagacggacagccctgaggaaccgcggggcgcccagatggaactcgttagcgccccgagtgcagacaatcccggagggggaaaggcgagcagctggcagagagcccagtgccggccaaccgcgcgagcgcctcagaacggcccgcccaccctgatttctcattggcgcctcctacctcctcctcggattggctacctctaggtgaaatgagcggtggttgagccctacttccggtggtgctgtggtctgcccctggagaacccagaagaacacagctgtgcgcgcccacaggctctgggggcgggagaagataagtcgcaaggagggggcgggacctacacctcaggaaagccggagaattggggcacgaagcggggctttgatgacccgcaaagggcgaggcatgcaggaggtggaggaattaagtgaaacagggaaggttgttaaacagcaccgtgtgggcgaggccttaagggtcgtggtccttgtctgggcggggtctttgggcgtcgacgaggcctggttctgggtaggcggggctactacggggcggtgcctgctgtggaaatgcctgcccgcgcgcttctgcccaggcgcatggggcatcgtactctagcctccactcctgccctgtgggcctccatcccgtgccctcgctctgagctgcgcctggacctggttctgccttctggacaatctttccggtgagtgactgagcctgagaagcctgtcccctcggactggctcctgccgcctcaacactgcctggcatggggtacaaaggaatttgggggatgatggaagaaacccggggtacaaaagaggaaacaagcacgggtagccaacctgttacctttaatatgtctgtacagtgataattgtaaggatccagcggtataaccgatgcagaagataatagcacttgtttttctttttttgagacagggtctcgctctgttgcccaggtaggaatgcagagaggcccattccagcctcgaccccccgggcgcagcctcccgagtagctgggactacaggtgtgcgccatgcccggttaaatttttgtattttttgtagaggtgaggtttcgccatgttgctcagactggaagatagcactgttacttgtattagtttcgtacatggagctattgtaggataggagggaccccaaagggtgcaagaaaggaaattgagtgccagggttgtcatgtgccttgggctcaggtggagggagcaaagtcctgcacactggagtggtgtactagcggatcaagtatggacactgactcagactgaggagcagctccactgcactgtgtaccgaggagacaagagccaggctagcaggcccacaccagacgagctggaggccgtgcgcaagtacttccagctagatgttaccctggctcaactgtatcaccactggggttccgtggactcccacttccaagaggtggctcagaaattccaaggtgagtacaggacctgggctggggttagggttcttggacataagtcacttctctatgactcagttttgccacctgtaaaatggggattatatctactt

SEQ ID NO: 2994 - DNA, 6000 bp, Homo sapiens
acctcgtgatctgcccgccttggccacccaaagtgctgggattacaggcgtgagccaccgtgcctggcctcctttccctctttctaataaagccttaatcagaatgagacaaagaccactaccttcctgaatgaaatgtaaaacacaaccagaatgaaagtttcagtttgttcattactgaccaagagaacccaaatcccttctaataaacttaattcagaagtctcttctcttttggagaacagtatttccaaagtataacatttactttcagtaatttcctatattattcctcttcagtttcaaattttctaccaatttctctatattctaattctagaaccccattactaatcaaccattggagcttcacaacttccttttttttttgagataagagtcttgctctgttgccccggctgaagggcagtggcgtgatctcagctcactgcaacctccacctccggggttcaagcaattcccctgcctcagcctcccgagtagctgagattacagacacgtgacaccacgcccagctaatttttgtatttttagtagagatggggtttcactatgttggccaggctgatcttgaactcctgacctcaggtgatctgcccgccttggcctcccaaagtgctgggattacaggtgtgagccactgtgcccggcccacagtttccgtttctaaatcaagcctattccttacatggttttggactcacaatttttatcattataatcactgttcagcaagcattttcatctatttcggttgaattgaccaagaatcagacttaacttccaataacctagtaagaaataactcttcaatccacaagtcagtagaagctaagctatgagaatgcaaaggcattaagaatgacataatgaggccaggcatggtggctcacgtccgatatcccagcactttgggaggctgaggtgggtggattaccggaggtcaggagtttgagaccagcctgactaacacggtgaaaccccttctctactaaaaatacaaaaattagccaggcatgatggcatgtacatgtaatcccagctacttgggcggctgagccaggagaatcgcttgaacccgggaggcggaggttgcagtgagccaagattgtgccactgcactccagactgggcaacaagagccaaactccatctcaaaaaaaaaaaaaaaaatgatataatgggccaggcgtggtggctcaagcctgtaatccttgcactttgggaggccgagatggatggatcacttgaggtcaggagttccagacagcccctggccagcatggtgaaaccccgtctctactaaagatacaaaaaaatcagccgggcatggtggctggcgcctgtaatcccagctactcgggagactgaggctggaaaatcgcttgaacctgggaggtggaggttgcagtgagccgagattgtgccactgcactccagcctgggtgacagagtgagactccgtctcaaacaacaacaacaacaacaacaagaatgatataatggactttggatactcaagagaaagggtggaaggggggttagggattgaaaaaatacacattgggtacaccatacacttttcgggtgacaggtgcaccaaaatttcagaaatcaccactagagaacttatttatgtaaccgaacaccacctgttcccaaaaaacctagtaaaataaaaacaaaccaacacaaatcaagattaatagagtagataagagcaataaatgaactatcaacctccccgccccccactccctttttgagacatggtctctcttgctctgtcgcctaggctggagtgcagtggtgctgttattgactcattgcaccctcgacctcctgagctcaagtgatccttccacttcagcctcctcagtagctgggaccacaggcacaaaccaccatgcccagctaattaaaaaaattttttgtagagatggagtctcgctatgttacccaggctggtcttgaactcctagctttaggtgaccctctcaccttagcccctcaaagtgcttggattacaggtgtgagcgatagcacccagccatcaactccttatatctggaactcttgggatctttgtcaactatttctcatatgggcagagtctgcactgtttctttgcctctggtttgcttgctttgatgtatttttcctttcacatcactaacatagcatgtgtctagatcataatattttttttccaagagaggaagaaagaccataaagttttttaagggtacagactatgttatgtctttgtgtctcaacacctaaatgatgtatagcagaaaaagtctgtaacactaattcctcttatggatgtggagactgaggtccagaggctgtggtcatactcaaagttatacgcagaattcgaggcaaaaactcagtcccaaatctgatatttctcccttaattctgtgcactccattcattacactttgaagattctcagcacttgaaaagcaggaactttatatctctcacatgcctcacacattgctacaggaaataaagcaacaaatgactagatacttactggaggcatcttctgtcaggctctctttatcctcagattttgacagtcttcttttggaaaccattttgaccaatgtcttgtgcacttaaattacttcctagagcaaaatcgggaaacagaagttaccctctagaagataaattctgagaagttaaagctattgttcaaagaaaactgctctatccaaaatcagaggggctcacatctccatattaatgctacctaaacctaggtgctaagcaaatttcaactcttacatctagccaatactaccttcctttcaagtcttagttacctctttaggcagactacttcgctgttgctgaaggataaaacccatcactctccatctgagattcaagaccctccattatctatccccaacgtacctgtcctttaattcatgatttcaatactatatgttagggactgtgctaggtgctggggttacaactgtgaactagacagacatgatccctgtcctcagggaatttacagtatggtaacaaatagccttaatgtactgaactacagttatgtaagtgctataaaagtacaggttctatgagggcttactaggaaatttagtctagttgctagtaagggtggtaaagagaagcaaggaccatttcttagggacaatctccttgaatttttttttttttttttttagtagagacagggtttcaccatgtcggctaggctggtctcaaactcctgacctcaagtgatccacccacctcggcctcccaaagtgctgggattacaggtgtgagccgcccggcctaaagaagtgattttttttttttttttttttgagacggagtctcactctgtcacccaggctggagtgcagtggtgcagcctcggctcactgcaagctccacctcccgggttcacaccattctcctgcctcagcttcccaagtagctgggactacaggcgcccgccaccacgcccggctaattttttgtatttttagtagagacggggtttcaccgtgttacccaggatagtcttgatctcataacctcataatccgcccgcctcggactcccaaagtgctgggattacaggcgtgagccaaccgcgcccggcctgaagaagtgatttttaggcagggacttgagggctgaaacagcagttagccagtagaaggggtaggagaagaggagtccaggcaaatagatactcatactgaaacaaggagatgtggagttagaaatcagacagcagaggtgggggaagtgcctgaatcacatgaccttttaatcttgtaaatcagaaccttcgtggtctcagtgcctttgcacaaaggtgttcttttcatctgaagtgctcttatttgcctggaaattcctactcagatctaaacattcaatcgaatgtcatcttccttgaaaagtgttcctcctatccctaagggagtttgctactgcagcttccctgctccacagggtatacctaggggcccttacctcacactagactggggctctttgagagcaggaacccagtctcacttactcaatgtccctaatgcccagcatagttaccggcataaggaaaatttctgagaatattcagagtgaaaaaagctcgcagtgcaggggaaatgctaaaagctaacaagaactgtttcaagtgctttatatttaataattcatttatttcccacaaaactttttgaggtgggtaccattattctcatcatcacgggcagaactgggattctaactcggagtctggcttcagcacctgcgctcttcaccacctatacttactcttgatgattataatgacttctaataatggttaacatttacgaggtaccgggccctgtgctaaactttttatttatcgccgcttcggttaatacggataaccattatcagccatcttgcagatggaaaaactaagtcttgtcagcacgtccggcttccaggcacccgcctttaacacgtgcgataccatctggcttccagaaaagcccaacagaagtgagatgaggccgactgcctggattagttcatcgggaagcgggtgagggtaaaagcctttctcgtttccgcattttaatgacgcagaaaggtacctgtggggattatcccatctcagggcagatgaggaagccaaggttcggggcgcggagccccagaggagaacgccgaccgcggcccggacttagagattaggccgcaggggagcggggcctcgagagactacgaccattgctccacttactcaccgagaagccgtcgccgcccgtagttttcgactttcccgccaggcccgacgccgctctgacgccaccgaggcgcgccatgacgtgacgccaacttccgcgccggaagtggaaggccgggcagcccagctgaaggcaataagctgggctcaccgctgcagcagagttctgtgctagccgggcataggggcgagagaaggcccagaggcgacgtcagagagaagcaactgcgccccggtgaagagaagctcgcccatcaccggctgggagccagctttcagtgaagatggcagggccagaactgttgcttgactccaacatctgcctctgggtggtcctacccatcgttatcactcttcgtagacatgatccgccactacgtgtccatcctgctggagagcgacaagaagctcacccaggaacaagtatctgacaggtcagcgccctcccttccccagcctacctcacaccgccgtgaccttggacaagaaagtgcaggcgttgtgtcagtttgcctaggttcacgtctcgcccccactggcaaggtgaccttacccgttacctctgtgtttcacttttgtcctctgtgaaatggggataataacagtacctccctcatagacaggtgggaatcaaattagatgatgtctgtaaatcccttagcacaggatctaggacgtattgagtgttaaaaacaaaaaacaaaaacggtgctgttaatcctttaggttagtcgccaaccctcggtgggtttacctatgaactatcccatcccaccctttcgttgggaagagtgcctggtgctttatagcttttagtatttgtaacatccagtcaagtgagtgtgataatctgcattctaccaaattactgttccaatggttagctgagatgctaagcaccaaagcgctttgcaatctgtaacactgctgttagacatgtaaggaattgtaattatcatttcccttcctagggtggaggcaacttcctcacatacttcattgcagtatttatttatttatttaatttaacttaatttaatttttgagacggagtttcgctcttgttgcactagattaagtatctattatttttccgtttgcatattttatcacttgaacagaaactctgagcgcagggtcatgaccttgccttactctataccccatagcatgcagcagagtgc

SEQ ID NO: 2995 - DNA, 6000 bp, Homo sapiens
aaaaatacagtaaagaagataaaatcctttgtttactggtaagataatgccattgcagtcttctaaaggcacacagtagaccacatgtcgcagagagaaagtaagtagagcaacaccctgcccatttctaacctatccagaacttaaatgtgtttagtacctgtgggctcaatcaataaatgttacagctaagatattcaatccaagctccaaagttcattcattttactaaaaggtgcactttctgggaccttgttcagaactcaagtttacttctaacaacgtgttacatggttcacctgctcacatcaaaataaaagtcacttgtcagccatgtggggaactgctaagcagggcacactaacaagatcaaacatgtatagctgagaggcacaaaacaaacagaaagttggggccatttaggatagagaccatcaagtttacacagggaactgaagaagcctccaagagccacaaacttaagtaattaaactcaattccatttgtattcccaaagttaccaccattcctttcctggagtctctcttcctttaaggccagctgtagattgtctccctgggtccctatttcctttccaagcccagaggttctttatctttaggttttgtggaaggcggaaccacagtacttaagagtggggctcaggtcagacaacctagattcaaattctggctctccctttaccgtcaagtgactgtacctttctgagcctgagcttcctacactgcaaagcaggaataattagtatgtatcatcatagggttgttataaagattaaatgagatatcacacacaaaatgcttagaataatagtacctggtctataattaatgctcaataaatgttagctatttttaatcactttagggtagagtagcaatactaaaaacaacacacttaggaaagtaacaagtcattaaggagaggcaaaaccttcagggttctctatgaacaaatgggattatttcaagggaccaattctacagatattttgcagatatgcacaaagaaatatgtaaaaaaatgcttactgcaagtatttacgtatttgtagcaagaaatgaaaaaaaatcgatcactatcatatacagaatcctaggtagtcattaaaaagaataaacgaaaattaaatgcactcatgatcaatttccaagaaagattaagtgaaaaaaaaaaaaggtactgaaaaacatgtatggcaagatccatgttttgtagaggtagggtgtacataatgcaagtatgtgcacatgtacatatatgagtgtatatgtgtaaacatacagaaaaggtaacccaatttttaaattttattttttgtagagacagggtctctctatgttgcccaggctggcaacacagagaactcctggcctcaagtgatcctcctgccccagtctcccaaagtgctgagattacaggaatgagccactgcacctggccaagataatcccatttttagtagtgattaccagtagaagaaatgggatttcactttttactctatatatttttgtgctgtttaacttttcctaataaaacacatatttgtgttttaaatttaaaaaacatttacgaatggaggacaagtaaatattatttacaaataaacagaagggaaaaatgaagggaataaaaatgttctataataaacgtatttctattaaaagaaaaaatgttaaaaatgtgaatacatgccgctttatttggcttatgtgatatgggtgactttccaccaccctctcttccttcaaaataccctttcactctggacaggttttacatttcaagggagtgggggtaggaaggaatctgatttcaaggtaacttgataaatttacttacatgtaatctgcctcgaagctctcggtcatttctcattttcacataaattcgctcatctaggctgagcctgataagatccaggggctcctctacagtgttggtagtttgttgctgataaaagaaacaggattagtaatgtagtactagagtcagagtagtgcttaaatcactgctatgctgtgtgaccatgggcaagttatttaacctttttctgcctcagtctcctaatctgtaaaatggagataatagtgtctacctaatactgtttttgtgaggcttaagtgatatacatgaaggcttagaacagagcttttcacataatacgtgctatataaatgtaggttaaaacacacatacatgagaagttacacagcaaaataatcatgactatactttgttccctcaaaatccaaactgcctgacccaatttcagggcatagggtctcagggactttagctttatctcaaatattatgtaatcattggaaaaacactcacttaatgcctaccatacactagtcagaatgccaaatagaggtgtaggtttatgggaagattatgaattcagcacaggttgagtttaggctgccaactggtgaataagataaatatatttagtagccagtatagaacactggttgaaagcactggcttagccgggcatggtggcacatgcctgtagtcccagctactccaagggctgaggtgggaggattgcttgagcctggcgaggtggaggttgcagtgagccaagatcgtgccactgcactccagcttgggcaacagagtgagactcttgtcttttttttttttaaaaaaaaaaaaaaaaaaaaaaaaaaaaaaaaaaaaggcaagcaagcactggctttggagtcaggcagtccgggttcaactcctggctgtgacctgacatttatgaactgagattaaaaatcatgccatctgtaattctcagattcttcatttgtaattgagaaagccacaaccttctttctgggttcttatgaggattaaactagttaatgcatttaaaaacagtgccaggaaaacagaaaatattaatatttagaaatggttcctattggccgggcgtggtggctcacgcttgaatcccagcactttgggcggctgagaaaggcagatcacctgaggttaggagtttgagaccagcctggccaacatggtgaaaccccatctctacgaaaaatacaaaaattagccaggtgtggcggcacgcacctgtagtcccagctacttgggaggctgagacaggagaatcacttgaacccaggaggcagaggttgcagtgagctgagatcacgccactgcactccagcctgggcgatagagtgagactccatccaaaaaaaagaaaagaatagaaaaaaaaaggaaaagaaaagattcctattaatattatattattacagaactgctggaaacattggttttagaggtcagggctaggatgacttggggtcacccacatggaagggatggttgcagccgctaagagttagaaagattattcaaggagagcttcttcagtaagtacacaaggccagtggaggaaggtaactgaattggtaacaggctctgaagattcaaaaggcctgatgagagaaaaaaataacctaactcaactggtccctatgtccctcagttcaacaagtgtttgttaaaggatcagataaccaactgttagattacaatgatagagaagtcacaatccccaccctcaaggagctcattctactgtggagaggcatacaaataattataatactgtaagaatatgcacatgaaaaagccctactgctacctaagcctctgtctgggatgcccactgtctgctcttttcatcctgtagctttaaatattggcttctcaaagaggcttcctctgatcatctaactcattcactcaaatattttttgagtgtttccagcactgttctaaaccccaaagacaaaagaatgaacaaaacaaaatccctgctcttatggcatttacattctagtggggagagattcacattaaacaaagatgcatacatttaatatgaaaaaataactctctatgaagaaaaatgaggcagggtaaccagagtagcgggagtgctatttgggcagaagtcctctctgaggaggtcagatttcagtagaaagtttaagttgtggcatgatctccaaagatatttgaggaagaaaaagaccaggtgaaaaagcttctaggaccatctgttattctgcataccagttccttgtttccttcacagcacatcacagttcctggaagtcttacatatttatatttacttttatctgttctcctcgcaaatataagctccaagtaatggcaaggatctcttatatgtcgatgtcagtgtccctggcccttagaacagtgcctaaccatacaaagctgatgttcactctatctgctgaatgaataaataattgttgcgctcactaatgataacaactcctaactttattacctggctttctattggaatcctgacagctccatgaggtagctaaggataataatctacagatttaaaaaaatgaagcgaagagtgtgagaatagtcatcaggtgggcttctaacaggaaaaggtctcagggcctacggcaaaattcggagggggggttacggaaaggacagggtggattaggccatggtgacttggagagaggaggcacgactggccatttttcctgagtctggaaaaagcagcctagtacaagaagctccttcgagcgacctccttaaaatacacttacctggtctacgtcgtccgccatgtttcaaaccctgcgccctttcccgcctctcgcgagaacacaagagcaacgtcaatctccggaaacgtgaggatacaatacaccggaaatagagagaaacctgttgtgctctttcctgcttcccgcagttttttagtggccacgggtatggggtggagcttcctttaggggcgtgactaggcctccaacgaaggggcgtggccaagcgcaccgcctcggggcggggccggcgttctagcgcatcgcggccgggtgcgtcactcgcgaagtggaatttgcccagacaagcaacatggctcggaaacgcgcggccggcggggagccgcggggacgcgaactgcgcagccagaaatccaaggccaagagcaaggcccggcgtgaggaggaggaggagggtgagagcgaggcccagcgggcttcgcgggagacgccgccggtgggcggaggaggcccagaggcagggcgggagtccagacgcggaggcctggtggaggttgctgcgcgcgttccgcgccgtgggggcagcccggcaggctgcggccggccctccccgctgtccccgcgtctttgtcctgcgcacccagagcggtttcccgcgagcttcgcccgatccaagctcctgcgtagcttttttcccgctccccgttgtccagaggatacagatgttcagggttgaactcggagaaggcagttatttgtgtcccaggaagacagacggacggaccaggacgtagagtgatgcagtgtgctgactcccgaatgataacttcagctgagtctcacccagagttccacagtgggatcccacctgacttcccctcatggatatttgataggcttcttacatttgtcatgggcaatgcagaactcatggttttcctctttaaatctatgctttcctccgtttttccagtctcaatacttgttataaagcaaagcccacctttttcttatgtccacacatccagtccgtcagcaagtccagtcagttcagcctcaagagtgtatttcaaatttgtccacttctcttcatttccatgaccacagcccctgtccaagtcatcatcacctttcagttgagtgactgcagtttcctctttactggcctcccagctctgcatccagcaacccaaataatcttaaaaaaaaaaaaaatcatgccctgctcctgctttaaactccccttggttttccattgctcttagcttaaaatccagttgttttatcctggcctacaagatactacatgttttggctcttgctacctctcctgtttctcttaccacttgtttccttgccagataccctccttattggcctcctt

SEQ ID NO: 2996 - DNA, 6000 bp, Homo sapiens
tctttgcatgactctgcttcaattaattttagaaaataaaaatactctaccttttattgaggttccaaaagggattgcaatattaacctaaaatataaaattatttaataattcagtcttttcattgtttgtcttgctgactctctggatgggtatttatattccacaagaatatacttttgcatgagggaaaaaagactctcccttctgatctaaatgaaatcatgattaaatgttaataaaattcataacaaaggagcatttattttaatgttagatcattgattccgttgtttctttaaatgttttataaaaaaggaatttatgcattcccatttttaaacattgtatggaaaccaaaaaataaggaaaaattttgaagtacaaattatttcaaaattaattttttcaaatctgagaacagattgcctactccaaggccagaggttgcataaagcttaagatttgacagtttgaggagggtgcccctaaaatcaagatttctggatcttacaatggtagttagccctctaataataggcaaagatgctaaacacttcaatttctactaatctaaaaaaatgcacgtaggaggatacttcagaggcatcacaaacttttctagttggttaaaaagcacagcttttatttccgtttgaagagaaaggtagaggagttaaaagggaaagggggataaaggaaacacaaaaactctgaatcaaaaggatgttcatagtattcaaaagcatctaacaataatctgaatgtccaaccatgagataattgttaagtaacttatggcagagccacacaacaaaatataattgagtcatcctttaagataaagaaaaacgatatatgatgtaatgttactcatgcaaagttgattttacagtatgctttctgctatataaaaaacagactagaaggaaacagaccactatttcatggtggctatttctggatggcagaaatatgggtgactttctgttctctgctattttttggtccctaagcatctagagactcttttccaggactctccaaaatcttgagttatctaatatgcctaaccagactccttgagttcagtgttctttcagtagggcaggaattaccactgtggtctgcttgcccatctactgggatttaataagaacaccggagtaaaccttccagcagcaactcatagcactcagaataaaattccaactccttagcttggtatccaagctcaggcccttgctcacttctcctacccagcccctcgctcgctgtgtccagccaactggccaagttcattccctcctaagagtgtttaaacacactgttctctctgcctagaactcttttccccagaacttcctatgaatggctcaaaattacactaaatgcctcaaaatgccacctccttacaaaggccttccctgacactgattcccatttagctgcctctcccccagccccatataagtttgagggtttttcttttcatctatagaagcattttctgctatgtacccaaataagttttatcacagcagtcttagcacagggtgatagctcttatcatcatgtgaatccgtttttttttaacttgttatctgctctaagtacccctccccccagattataatcatgagagcaggtgcctcatctgtcttgttcaatattatcctagtacctggaacagtgtgtgaaaatagtaggcgctcaataaacagctgttgaaggaattaatggatatcactgaaggtgttaacacagagaagaaatgaaaagaaaccagaggtgctttagtaacacaaaggaaatcatgtggaagcctgttttcttttctcctatttgtcaaaagcagccaagtatcaccttcatttgcatgtacaggggtgctattaaaacctacactattacagtgttagcaactacactgacagtcaccaaattattgtcatctgcagcccaaaccatacttgctaagtctatgcttccccacaaaaccaccaaaccacaacaaaggttgtaactctgcagatcctggaagctgccttgggaactgactgctagctcctctggctagcagaataaacttgggtgcatctttacctccgtttaggctgaatgacaccagctagcccaactaatttacctaacatgggtaaagctaaagctcttggctttatatgctatcccactgaaaactcacagccaccccgcaaggcagttattacatttcacagaggaaattcagaagggctaaaacatttgtccaaaataattcacccaagtgcataaaactaagaattgaagctctaccaagctggaaccgaggtgaagtgttgagctgggaagaatacaggtagcatttccatcagattaaaaccgtaaatttttaattgccatatatccaaattacattctgactagaataccggcccctttttgtgaccccttgctaaaataccaaccatcctttaaatcacagatcaaactacttcagagagcgttccccgatcacgccagtcaaacttgattaatcctttggaagctacaaagccttgtaccttcttccacaatatttagcacactttgccttgaatgttttacatgtaaatgtcatgtcaacactactctatgatcctccaagatatgtttatctctcatgtcacctcattcatgtacagcacatagtagatactcaaaagatgttatttgaatgagtaaatgagtgaataaaatggaactcgtaatattacatatgaggtaaatcacctcctaagtttacgaattattaccatttcactatttcctaatggatgatgaatttataaccggtatagaaacagaatctagtgtgatagcctttgccggttacctagtctaatctacccagttttttcaggagacccagaaattccttctacagcctgcattttgcaattatttaaaatatttactagccgggcgcagtggctcatgcctgtaatcccaacacttcgggaggccgaggcaaacggatcacctgaggtcaggagtttgagaccagcctggccaacatggcgaaaccccatctatacaaaaatacaaaaattagccggacatggtgtcaggcacctgtaacaccagctactcgggaggctgaggcaggagaatcacttgaacctaggaggcggaggtcacgccactgcactccagcctcagcgacagagtgagacactgtctcgaaaaaaataaaaaataaataaaatatttatttagcatttagccctaccaatccacgggccctgcatccacagattcaaccaaccacagatgaatatatttcgggaaaaaaaatacaaatttaaaaaatacagcatgacaactatttccatagtatccacattgtattaggtattattagtgatctagagatgatttaaagtatgtcggaggatgtgcataggttacatggaaacactaggccatttgatataaggtacttgagcatcacaggttttagtatccgcggggtatctgggaaggaccaccttagtttgctcaaggaatgtctaacttgagttttgaagaaatagaaaaaatcagccctggtaaaagccatggggggttcactctaggcagaaggaacatcaaaggaaaagactcaaggaataacttggcatatttgaggaagagaaaggaggccaataaggagggtatctggcaaggaaacaagtggtaagagaaacaggagaggtagcaagagccaaaacatgtagtatcttgtaggccaggataaaacaactggattttaagctaagagcaatggaaaaccaaggggagtttaaagcaggagcagggcatgattttttttttttttaagattatttgggttgctggatgcagagctgggaggccagtaaagaggaaactgcagtcactcaactgaaaggtgatgatgacttggacaggggctgtggtcatggaaatgaagagaagtggacaaatttgaaatacactcttgaggctgaactgactggacttgctgacggactggatgtgtggacataagaaaaaggtgggctttgctttataacaagtattgagactggaaaaacggaggaaagcatagatttaaagaggaaaaccatgagttctgcattgcccatgacaaatgtaagaagcctatcaaatatccatgaggggaagtcaggtgggatcccactgtggaactctgggtgagactcagctgaagttatcattcgggagtcagcacactgcatcactctacgtcctggtccgtccgtctgtcttcctgggacacaaataactgccttctccgagttcaaccctgaacatctgtatcctctggacaacggggagcgggaaaaaagctacgcaggagcttggatcgggcgaagctcgcgggaaaccgctctgggtgcgcaggacaaagacgcggggacagcggggagggccggccgcagcctgccgggctgcccccacggcgcggaacgcgcgcagcaacctccaccaggcctccgcgtctggactcccgccctgcctctgggcctcctccgcccaccggcggcgtctcccgcgaagcccgctgggcctcgctctcaccctcctcctcctcctcacgccgggccttgctcttggccttggatttctggctgcgcagttcgcgtccccgcggctccccgccggccgcgcgtttccgagccatgttgcttgtctgggcaaattccacttcgcgagtgacgcacccggccgcgatgcgctagaacgccggccccgccccgaggcggtgcgcttggccacgccccttcgttggaggcctagtcacgcccctaaaggaagctccaccccatacccgtggccactaaaaaactgcgggaagcaggaaagagcacaacaggtttctctctatttccggtgtattgtatcctcacgtttccggagattgacgttgctcttgtgttctcgcgagaggcgggaaagggcgcagggtttgaaacatggcggacgacgtagaccaggtaagtgtattttaaggaggtcgctcgaaggagcttcttgtactaggctgctttttccagactcaggaaaaatggccagtcgtgcctcctctctccaagtcaccatggcctaatccaccctgtcctttccgtaaccccccctccgaattttgccgtaggccctgagaccttttcctgttagaagcccacctgatgactattctcacactcttcgcttcatttttttaaatctgtagattattatccttagctacctcatggagctgtcaggattccaatagaaagccaggtaataaagttaggagttgttatcattagtgagcgcaacaattatttattcattcagcagatagagtgaacatcagctttgtatggttaggcactgttctaagggccagggacactgacatcgacatataagagatccttgccattacttggagcttatatttgcgaggagaacagataaaagtaaatataaatatgtaagacttccaggaactgtgatgtgctgtgaaggaaacaaggaactggtatgcagaataacagatggtcctagaagctttttcacctggtctttttcttcctcaaatatctttggagatcatgccacaacttaaactttctactgaaatctgacctcctcagagaggacttctgcccaaatagcactcccgctactctggttaccctgcctcatttttcttcatagagagttattttttcatattaaatgtatgcatctttgtttaatgtgaatctctccccactagaatgtaaatgccataagagcagggattttgttttgttcattcttttgtctttggggtttagaacagtgctggaaacactcaaaaaatatttgagtgaatgagttagatgatcagaggaagcctctttgagaagccaatatttaaagctacaggatgaaaagagcagacagtgggcatcccagacagaggcttaggtagcagtaggg

SEQ ID NO: 2997 - DNA, 6000 bp, Homo sapiens
agggcttcccaagacctctctcccagtgggtttgatccattattgtttacctacccagcactgagatttctagctcttgagattccttttcagaatggtgtaaggggccaggcacagaatgggctgaccataatccaagtgctttgggaggcctaagcaggaggattatttaagactaggagttccatcatcaaagggagaccctgtctacagaaaaaatttaaaattagctgggcgtggtggtggtggcggcccgtttcctgtaatcccagctatttaaaaggctgaggcagcctcgcttaagcccaggagttcaaggtaagaggattatttgagcacgggagttcaggctgtagtgagctgggattgcgccactgtattccagcctgggagatagaatgagaccctatctcaaaaaaaaaaagaaaaaaggtatcttgcaccctcttttaatctgtgattgtgtataggggaaagaacagtctttagtgtaactctatgctagttgtttctcattgagcatcatctgatttttattttaaggtttattttgtcaggcccctttggatcttctttcctgtattaggcatatgtaaccctacacttttttttttttttttttttaaatagtctcactctgtcgcccaggctggagtgcagtggcatgatctcagctcactgcagcctccgcctcccaggttcaagtgattctcctgcctcagcctcctgagtagctgggattacaggcgcacaccaccatgccgggctaatttttgtatttttagtagagacggggtttcaccatgttggccaggatggtctcgatctcctgacctcgtgatccacccgcctccacctcccaaagtgctgggattacaggcgtgagccaccgcgcctggcccaatcctatgctgtttcttaaatcgcctactgcgttccacatatatggtcatttgtaaattgacagagtataccaggtgccaggatcataatatggaaggtagtgtaacatggcagttaagaatgtggactttgaagtcagatgactcaggttgggatcctggcttgtcacatacttgaacaacacctaacaataagacttcttttttggctgggcatggtggctcaagactgtaatcccagcactttgggaggctgaggtgggtggaccacttgaggtctggagttcgagacctgcctggccaacatggtcaaaccccatctctactaaaaatacaaaaattagccgggtatggtggcatgcgcctttagtcccagctactcggaaggctcatgcatgaaaaatcacttgaacctgggaggcggaggctgcagtgagccaaaattgcaccaccgcagtccagcctaggtgacaaagcaagactccatctccaaaaaaaaaaaaaaaaaaaaaaatgctggggttggtggctcacacctgtaatcccatcattttgggaatctgaggcaggcagatcacctgaggtcaggagttcgagaccagcctgaccaatatggtgagccccgtctccactaaaaatacaaaaattagccagggcttgtggtcccagctgctcggaaggctgagacaggagaattgcttcaacctgggaggcagaggttgcagtgagccgagatcgtgccactgcactgcagcctgggcgacagagcaagattccatctcagaaaaaaaaaaaaaaaggacttctttttctgtaaaatgggttgatatggcatgaggattaaataagccaatctgtgaagtatacagaagtgtagatctagaccagtgcacagccagccactgcttgtactccatctcatcctcattttacctttacctagaacagacagtatcagtgaagctgctatccatgcttgtgttaaagtgaatgcccaatacaaaagccaggctttactaaggtccacagcaggcccgtggggcttctaccgtaagaactatatttttccctaattgtgactatttttcttttgcagccacaggtggaattaagaaatctggcaaaaagtaagctgttccttgtgcctgaggagatggtgaccctttatttcatctgtatttaaacctctctattccctgccataacatcttttgccacgtatagctggaattaagtgttgtcttggagctgttgtacatttaagaataaacttttgtaaaaaaagaaaaatcttacagtggctcatcatctctttagttgttttcactaagtcattcctaccataactgtgaatttaaagtaaaaccagctcagaatcttgccagagtctgttctttggtccttgttctaccctaaactttgtatcacctgaaattaaaccaactcatttgaaaggatggcgttcttgtgtggttgtatacctgacagaataccttacatgagtttagtggaagaatttgcacttttttttggtgggggagggggtggagtctcactctcacccaggctggagtgcagtggcatgatctctgctcaatgcaacctccacctcccgggttcaaactattctcctgctttggcctcccaagtagctgtggttacaggcacccgccaccatgcctagctaattttttgtatttttagtagagaggggtttcaccatgttggccaggctggtctcaaactcctgacctcaagtgatctgcctgcttcagcctcccaaagtgctgggattacaggcatgagccactgtgcctgaccagaatttgtgcttttaaaagaaaacccatctttatgttgtcacatccaaattgccgtatattttgatgagacttgttcatctgttcatgtaaggcgtctgctatatgcaggcactggggtatgtaacggaacagttcctgttgtcaaggaacttctctactgtggaagaggcagggcagggcaaattacatgatccttcaagttgctagcagtgaagtccccatgcgcaccaaacaggtccagggcagcagctgcgggaagccccagcccacttgctggtggatggagggggtgccagtgccaggcaaggggttgggggtgaggcaaaatgggggctcactctacctcctgctgcccaggactggagtcccaggcatacctaccgcttgcccctcaataaatgcaaagacagagaccatccataatgtgtgctgaatatgttttaaaatgcttagctgggtgtggtggtgcacttctgtagtcccagccatttgggaggctgaggtgggaggatcacttgagcccaggagttcgaggctgcagtgagccaagatcacaccactgcactccagcctgggagacagaacaagaccctgtatttaaaaaaaaaaaattcagaagcacaagtatttggatttccctcccaggcccttaatacaattatgttaataatgctcagctttctctgagaatattgtcgaagagcgctctggaaccattatgagactgctaaatcaaaactaggttttagaatattgaaaactttcatgattaatgtactagatattaacgggggagagggggcagggggaagcctgtgttggtcctctccagaaagttgcacagccagtagcacccttcagtaggcttcaggcattccctgtggggccttgctagctggcacccagccgtatgctgctaaaacaaacctgagcaccagtgattcacactgttcctgaaagcaagttacttggtggaacctatccctctttaacaaatgaacagtcctgtctctttccaggaccagagtcctgcagcaattaagcatgcaacacttgggaagctatctgacggagactaccagttgctccaaaaaattttaaactccttagacattataggccctgatagcactctctttttcatttactcttttcatttaatgctttcacaaatattcctaggacactcacaggtgaagtttggcactgagcaggtaaggctgaaagagtcttgctcctgttactctccattgccaaattctctattgcggctaacttctgcacaccacagctgcccaataaaatctgtcaggcacgcaagcccacctcaaattgctgctcctttgtgaagctttgcctctgttcgccacaggtaactcttacctggcctttgtgtggcctccctttcaatgtagaattctcgtgttagtcttatgtgccagcctcctacccctctatcctgctaacttgactcaacttgtaggacagcgcaggtgccatttacagggggacttccttgacctcctgagccctattctatacaaccagagcttaggaaaaaaaaacagtccagcactcagaggaatggatgttaacagcctgagcagctcccaccccctcccacacaagaacagctccaaacatcattcctccttggactttcctcctccctgggcctacctcaaatgtacacatgtgaaacattcactaaacccgaagatgtctgcacacgacagctctattcatactcctcacccaacaaattccactctcctcaagaaagcctaggggtttgtgggaggtgggtctggcggcagaaggaaagcgaggtcacggagaccacatccctgaatgatgcctggctcgactcaaacgcaacacgcgtgaatgctagggcaggctgctcctgcgcggccctcctccacggagtgccagggagggagcgcaaagccaccagcgcggcggagctggtgcgcctccggcccgcctctccggtaacgggtcgcgccgcactgagtccttgcagcaaacctgccgaatcccgcccgtggacctctaaacaccgggcggggccgggtgtggcggcgcgctcggacgttcgtcattcctccgcgccctccgcctgccagctgattggcccctgggccaggggcggggcactcgcggcggaggcaagcggcggcgcgcggacggttggtccagttctccggcctggcggcaggcaagtctagctcggcgctgtcggatacttggggtgagcggaaagcatggcggggacctccgcgccaggcagcaagaggcggagcgagcccccggcgcctcgccccggcccgccgccgggcaccgggcaccccccgagcaagcgggcccggggcttctccgcagccgctgccccggaccctgacgacccgttcggcgcgcatggggacttcactgccgacgacctggaggagcttgacaccctcgcgtcacaggccctgagccaatgtccggccgcggctcgggacgtgtccagtgagtgctcctcgcggccttttgctcggagggagttgtcaaccgcgccagatccccttgatggctgtggcttcggaacctcgcggccagcactgccttttcgcctttttaaaatatgggaacaccctgatttaagcagcggttgtcttccagaaggtcctttgattttagggggaaatgcattagccaggtcaaacagccgatttgaaacacagaaggctaagttgacattttacgttattttctaaagtttaggccacttggttcttggttctaagcagagatccttggaacacacctaccaccaccatcagaaccatcactacccatgcatggggacccattcttgtgacaagtttgagcggctttagatcttatgaagcccactgtctcccttgggcagtgtgagcatgggaggagccagacacaggcaagagatgaaataaatttattcttttatacaaccagtaaactgtgctaggtgcccaaacgtgaggaactgcagctgaccttacaatgaacaaaatacaaaaactgtccttcatggagcttacattctagttgaggagtgagtgaagtcttgaggactcccagaaagagaaatgttttgagtgcaccttgcatctgtacttgggtgtctcaaggcaccttaaactcaacacgatcatttcctggaaacccagtcctcctccagcacttctagcatggtgccggcaaagcagacattcagagaatgatgaccagatgttccacaaggaagt

SEQ ID NO: 2998 - DNA, 6000 bp, Homo sapiens
tttggggctcttgaccttatctccatcccacacttaatctatttttctttgtgtttgttgccagtaccttggctggaatgtcaggcctcaggaccacaggttcttatgatgggtcattttccctctcagccctgagagaagcacagaacctggcattcactggactgaatctggttgcccggaatgagtgctcacgtgatggagacccagcagagggaggcagaagggccttcccactctgccagcttcctggagccgtgcatttcctcccccttgtacagttcttcatcggcttacactgccaggccctgcaggacttggcagctgctaagagaagcggagcacctggggactcaccgacacattcctcctgcgtgagctctggggtagagaccaaccctgaggactcagtgtgcatcctggaaggcttctctgtgactgcacttagcattcttcagcacctggtgtgccacagcggagcagtcgtctccctattactgtcaggagtgggggcagattctgctgctggggaaggaaacaggagcctggttcacaggcttagtgatggagatatgacctcagccctaaggggggttgctgatgaccaaggacagcacccactgttgaagatgcttcttcacctgttggctttctcttctgcagcaacaggtcaccttcaagccagtgtcctgacccagtgccttaaggttttggtgaaattagccgaaaacacttcctgtgatttcttgcccaggtattaagctgcataggagtcatgattctttgtgggtctcacctgacctcttaaggtctaacccatggcacttgtactttgctcacatcttgacttatctacactagttagttctaaggcttggttcagggagttctgaagtgatgggaagtggggccaaatgggagaaccaaggaagtggtttatttgatttaattctgcctctgaacaacaggtaagcaaaaggcacacatgattaaaggaggctgctaacctctgtggaggagggccctgccccaggacaagggttaagacaaggggcctctgaacctgagatgtgggtaaggtgaagaccacacatcacaagcacgttgaagtttagtggtttccctaaggaagcagaggatgtggagagggtctgcagcccacgggctgaccttgctgggagtctctgcctgtcattgtgcccatctttagcatgcatctggggtggcctgttcttcttaaggtttgtgggtagtatattatagtgaacctagcgaatgaacactgtgatcataaattcctcccttgggattccagagccgcaagattggggagaactgtgaacacaaccagcccaccccctcatccagtaatccagtctccctcagcactctaccaaagggtcagtttctatgttggaatgattccactggctgaatatatcttaaatcatctcatctctgagctcagcactgctgtttcctagatctgtttccatctgaatatttttggttggtctggcccatgctaaaggtggtactcagctggacacagcactgcagtgtagtgtgggcagtgggatcaggcagactcaggactcaagtgcccagcaggggcccagctcatagtggctgtttttttttgttgttgtttatttgtttgtttttgtttttgttttgagacgaagttttgctcttgttgtccaagctggagtgcagtggtgcgatctcggctcactgcaacctccacttcccaggttcaagcagttctcctgcctcagcctcctgagacgctgagattacaggcacctgccaccacacctggctaattttttatatttttagtagagacagggtttcaccatgttggccaggcttgtctcaaatgccggacctcaggtgatccacctgccttggcctgccaaagtgcaaggattacaggcgtgagccaccgggcccagccttggttatttgtttaataattgttaaatgaatgaatcccaggctgggcacagtggctcctgcctgtaatctcagcactttgggaggccaaggtgggaggatcacttgagcccaggagtttgagaccagcgtgggcaacaaagcaagactcccagctctacaatttttttttttttaattagccaggcatggtggcagtgagctatgaccatgccactgcactccagcctaggtgacagagtgagaccctatctcaaagaatcccagaaaccatgtttttactggtggtagacacaccattattccactcctgttgagcttgtccacagggacattcaaaacacagccacagctgggcatttatctatttcatgtactggggctcttcataaaatttcatttaaagaggttcttaggggctgggcatggtggctcacgcctgtaatcccagcactttaggaagccgaggtgggtggatcacgaggtcaggagatcgagaccatcctggctaacatggtgaaaccccgtctctactaaaaatacaaaaaagtagctgggcgtggtggcaggcacctgtagtcccagctactcgggaggctgaggcaggagaatcgcttgaaccctggaggcggaggttgcagtgagctgagtttgcgccactgcactccagcctgggtgacagagcgagactcagtttcaaaaaaaaaaagttcttaacgctatcaaaaaataacttggaaaccactgtggtgtacataaaagtggattttccttgcagtaccttctgcaagtggcagatattggacatcttacagcccaataatgaaaccaggtaataaccatgttaaaattccagcttcccacaaagggctgcacaccctggcaactaaaaagcattgaactttttgtctgctgtgcaggatttgccctaaagtgagttcaccccacatagtgagaccttgcttcctaaggacacactgagggatatcttgaccttctgtgcttagaaactgcagatgtctgaaggggtacacacctggccagaccccatagagtgtttcagaattgccctcctccccacccaccaggccagtccatcgtgctcccccaggctatgtgggttgagcaaacagcagcagttgccttggggcttggtttattggggtaatagctttccttttgcccctgagacctggggcagtatgcccagaacccctccctcctgcacaccccacagtaggcacattctcccactggcagcagatgtgttttctggcaagtagagaaaatggctttccttgccctgtgagaggtctcataagatccagccatagccaaggccatgtttgtcacctctggaggcctggtcagtccttctgtgggcacagaacatttctctcccacctaagttaggacctgcatccctgtttgggagcatgtggaagccaggcatcccagatccaggaggtcatcccacttcctgggcgatgctacaccagataagggcctgtcctctcagctgcagcagtcttgcagtggaagtgcccacttgttcacatgaaacaagtttcatagcaagtaagtaggggtcaggccagcactgaaacccaagtctggctgaaccaactcacctgttcatactgacttgctcaattttctgttacctctagtggagtgtgaaggtaggttatggagctggggttggggagtgtcacgtctctctgggtccctgtcttttaggttccagtgtgtgttccaagtgctgccaaagtgcctcagcccagagacacccctgcctagcgtgctgctggctgttgagctcctctccctgctggcggaccacgaccagctggcacctcagctctgttcccactcaggtaaagcagggtggggcgggcatctagactgctcctgcagatcaagggaagggttggggtgggaacagggtcaagggcctcagagggcttctgcagtatgtagcccacgctctttatgagaaagggcaccctgagtgagaggtgcgctgtccttttcagaaggctgcctcctgctgctgctgtacatgtacatcacatcacggcctgacagagtggccttggagacacaatggctccagctggaacaagaggtaaaaactccagagccccttctggacactgtccccaccccatcctaagaaccaacagaatctcctttctttccgctgaggagaaacggagctttaattcattttagtaacaagagttgataaagcaactaaagaggtaaactcagtttgggggctgtgcaccacacagatgcaatgcagacaggacttggcagagttgcctgatgactgatcctgtcttggctttgggacgtgggggcagaatagggggctggaggcaggtgggttgctggtgacacatgagtgcttgtcctgggtcttccctgggaaggtcccacaccacttcttggaccccatttgtgcagacaaacagttgctgaagcaagtgaactcttatagaagcttaagaaaaccctcgcagggactggtctccttctgcccaggatggaaccactctgttcttgttctaggtggtgtggctcctggctaagcttggtgtgcagagccccttgcccccagtcactggctccaactgccagtgtaatgtggaggtgagtgggtaggggccaacagctggcagctctggtggtaagggggccccgtgcaaggactgtaggccccactgcaaaccccctcacgtgaggtggctaggctgagcggattgttagggtgcaggccatggtggcaccaggcctcagtctgcaccccccctctctcaggtggtcagagcgctcacggtgatgttgcacagacagtggctgacagtgcggagggcagggggacccccaaggaccgaccagcagaggcggacagtgcgctgtctgcgggacacggtgctgctgctgcacggcctatcgcagaaggacaagctcttcatgatgcactgcgtggaggtcctgcatcagtttgaccaggtgatgccgggggtcagcatgctcatccgagggcttcctgatgtgacggactgtgaaggtaagcctgccagaggccatcctgcccagcccccatggcttcttccagaggttccccaacaagtcagattcctgggtgtcccctcagcaggcccccgcccactgcagcctgttccagcactggggccattttcttttatcttcctgcctcagttcttctccaagcatattgggatgccttttgcatctatctgttgagtgtgcctggcagagccacggtttttccagaaatagccgtgtctgaattgcctttgtatcactttgtttgcagtagctgagggagcagggcctgggtgtggaagggactggttagttcctgcggacgttgggggaggagaggtgggacctgccctaggccctggcacctttgggccctcaccaggaacctctcctttttgtctcagaggcagccctggatgacctctgtgccgcggaaaccgatgtggaagaccccgaggtggagtgtggctgaggccctgagtgtccagccacatggtggcaccagcaccactcctttccttaccacatcaactgattaaagcagtgaccagcaggaactgcccagagaactggctggccttgtttcctgagtctgatctgtttggcggagtgggaggggtggagcaggacccggaccctgagtggctgggatccttcttcctgtccctggctgttgctgagcccgtccccatggtaactgatctgccttgaggaaggagccctgccctgcctgtggaattgtcctgagtcattgctttgggctggggccatgggaagaaaccattgtgtggcagggaaggaggtggctcttggcccaggcctaaaccaggaaagcctgggaaactgggacccacaggtgggcatgaaagggccgcagcaggggctcccagcagtgtgtaagaccgggagctggtctggcaccactgccctggtccttccagctgcctgtcactggtatgatgg

SEQ ID NO: 2999 - DNA, 6000 bp, Homo sapiens
tgttcttcttaaggtttgtgggtagtatattatagtgaacctagcgaatgaacactgtgatcataaattcctcccttgggattccagagccgcaagattggggagaactgtgaacacaaccagcccaccccctcatccagtaatccagtctccctcagcactctaccaaagggtcagtttctatgttggaatgattccactggctgaatatatcttaaatcatctcatctctgagctcagcactgctgtttcctagatctgtttccatctgaatatttttggttggtctggcccatgctaaaggtggtactcagctggacacagcactgcagtgtagtgtgggcagtgggatcaggcagactcaggactcaagtgcccagcaggggcccagctcatagtggctgtttttttttgttgttgtttatttgtttgtttttgtttttgttttgagacgaagttttgctcttgttgtccaagctggagtgcagtggtgcgatctcggctcactgcaacctccacttcccaggttcaagcagttctcctgcctcagcctcctgagacgctgagattacaggcacctgccaccacacctggctaattttttatatttttagtagagacagggtttcaccatgttggccaggcttgtctcaaatgccggacctcaggtgatccacctgccttggcctgccaaagtgcaaggattacaggcgtgagccaccgggcccagccttggttatttgtttaataattgttaaatgaatgaatcccaggctgggcacagtggctcctgcctgtaatctcagcactttgggaggccaaggtgggaggatcacttgagcccaggagtttgagaccagcgtgggcaacaaagcaagactcccagctctacaatttttttttttttaattagccaggcatggtggcagtgagctatgaccatgccactgcactccagcctaggtgacagagtgagaccctatctcaaagaatcccagaaaccatgtttttactggtggtagacacaccattattccactcctgttgagcttgtccacagggacattcaaaacacagccacagctgggcatttatctatttcatgtactggggctcttcataaaatttcatttaaagaggttcttaggggctgggcatggtggctcacgcctgtaatcccagcactttaggaagccgaggtgggtggatcacgaggtcaggagatcgagaccatcctggctaacatggtgaaaccccgtctctactaaaaatacaaaaaagtagctgggcgtggtggcaggcacctgtagtcccagctactcgggaggctgaggcaggagaatcgcttgaaccctggaggcggaggttgcagtgagctgagtttgcgccactgcactccagcctgggtgacagagcgagactcagtttcaaaaaaaaaaagttcttaacgctatcaaaaaataacttggaaaccactgtggtgtacataaaagtggattttccttgcagtaccttctgcaagtggcagatattggacatcttacagcccaataatgaaaccaggtaataaccatgttaaaattccagcttcccacaaagggctgcacaccctggcaactaaaaagcattgaactttttgtctgctgtgcaggatttgccctaaagtgagttcaccccacatagtgagaccttgcttcctaaggacacactgagggatatcttgaccttctgtgcttagaaactgcagatgtctgaaggggtacacacctggccagaccccatagagtgtttcagaattgccctcctccccacccaccaggccagtccatcgtgctcccccaggctatgtgggttgagcaaacagcagcagttgccttggggcttggtttattggggtaatagctttccttttgcccctgagacctggggcagtatgcccagaacccctccctcctgcacaccccacagtaggcacattctcccactggcagcagatgtgttttctggcaagtagagaaaatggctttccttgccctgtgagaggtctcataagatccagccatagccaaggccatgtttgtcacctctggaggcctggtcagtccttctgtgggcacagaacatttctctcccacctaagttaggacctgcatccctgtttgggagcatgtggaagccaggcatcccagatccaggaggtcatcccacttcctgggcgatgctacaccagataagggcctgtcctctcagctgcagcagtcttgcagtggaagtgcccacttgttcacatgaaacaagtttcatagcaagtaagtaggggtcaggccagcactgaaacccaagtctggctgaaccaactcacctgttcatactgacttgctcaattttctgttacctctagtggagtgtgaaggtaggttatggagctggggttggggagtgtcacgtctctctgggtccctgtcttttaggttccagtgtgtgttccaagtgctgccaaagtgcctcagcccagagacacccctgcctagcgtgctgctggctgttgagctcctctccctgctggcggaccacgaccagctggcacctcagctctgttcccactcaggtaaagcagggtggggcgggcatctagactgctcctgcagatcaagggaagggttggggtgggaacagggtcaagggcctcagagggcttctgcagtatgtagcccacgctctttatgagaaagggcaccctgagtgagaggtgcgctgtccttttcagaaggctgcctcctgctgctgctgtacatgtacatcacatcacggcctgacagagtggccttggagacacaatggctccagctggaacaagaggtaaaaactccagagccccttctggacactgtccccaccccatcctaagaaccaacagaatctcctttctttccgctgaggagaaacggagctttaattcattttagtaacaagagttgataaagcaactaaagaggtaaactcagtttgggggctgtgcaccacacagatgcaatgcagacaggacttggcagagttgcctgatgactgatcctgtcttggctttgggacgtgggggcagaatagggggctggaggcaggtgggttgctggtgacacatgagtgcttgtcctgggtcttccctgggaaggtcccacaccacttcttggaccccatttgtgcagacaaacagttgctgaagcaagtgaactcttatagaagcttaagaaaaccctcgcagggactggtctccttctgcccaggatggaaccactctgttcttgttctaggtggtgtggctcctggctaagcttggtgtgcagagccccttgcccccagtcactggctccaactgccagtgtaatgtggaggtgagtgggtaggggccaacagctggcagctctggtggtaagggggccccgtgcaaggactgtaggccccactgcaaaccccctcacgtgaggtggctaggctgagcggattgttagggtgcaggccatggtggcaccaggcctcagtctgcaccccccctctctcaggtggtcagagcgctcacggtgatgttgcacagacagtggctgacagtgcggagggcagggggacccccaaggaccgaccagcagaggcggacagtgcgctgtctgcgggacacggtgctgctgctgcacggcctatcgcagaaggacaagctcttcatgatgcactgcgtggaggtcctgcatcagtttgaccaggtgatgccgggggtcagcatgctcatccgagggcttcctgatgtgacggactgtgaaggtaagcctgccagaggccatcctgcccagcccccatggcttcttccagaggttccccaacaagtcagattcctgggtgtcccctcagcaggcccccgcccactgcagcctgttccagcactggggccattttcttttatcttcctgcctcagttcttctccaagcatattgggatgccttttgcatctatctgttgagtgtgcctggcagagccacggtttttccagaaatagccgtgtctgaattgcctttgtatcactttgtttgcagtagctgagggagcagggcctgggtgtggaagggactggttagttcctgcggacgttgggggaggagaggtgggacctgccctaggccctggcacctttgggccctcaccaggaacctctcctttttgtctcagaggcagccctggatgacctctgtgccgcggaaaccgatgtggaagaccccgaggtggagtgtggctgaggccctgagtgtccagccacatggtggcaccagcaccactcctttccttaccacatcaactgattaaagcagtgaccagcaggaactgcccagagaactggctggccttgtttcctgagtctgatctgtttggcggagtgggaggggtggagcaggacccggaccctgagtggctgggatccttcttcctgtccctggctgttgctgagcccgtccccatggtaactgatctgccttgaggaaggagccctgccctgcctgtggaattgtcctgagtcattgctttgggctggggccatgggaagaaaccattgtgtggcagggaaggaggtggctcttggcccaggcctaaaccaggaaagcctgggaaactgggacccacaggtgggcatgaaagggccgcagcaggggctcccagcagtgtgtaagaccgggagctggtctggcaccactgccctggtccttccagctgcctgtcactggtatgatggccccggtgcattgtgccaccagcaggccacagctgtggatcttggaaggcctctggggtcccccgggagcaggggagtgggtgtgggggggaacggatggtggtgagagggacagaccaggcaggctgacgagcagggcgggcctggctcacgtgggcctgtaggcgggcccacgccaagtttcacttcccgccactgctgccagcgagagccgcgggagagtgtgcagccgagtcactactgcctgcctgcctgcctgctacggtgagtgtggcccccacaatgggatggcgcagggcaggagggccatgggttcccccaccccagactaagggggcactaggggaggggccgagtcatgtgaagagggagaccctctcagacagtcgaatgtgctggtcccactaaggaaaccacctcaccctctccaacttcctgcctgaaaatgggccctggagctcgcagacagggcaggattgtgcagggaaggcctgagatgtgcttctgcccaccccctaccccactccctccccttcggatcttaacactgggcactcacacacccaccccatgctcctctccaggctcagcagcaggtacgtacccaaccatgggctcgcaggccctgcccccggggcccatgcagaccctcatctttttcgacatggaggccactggcttgcccttctcccagcccaaggtcacggagctgtgcctgctggctgtccacagatgtgccctggagagcccccccacctctcaggggccacctcccacagttcctccaccaccgcgtgtggtagacaagctctccctgtgtgtggctccggggaaggcctgcagccctgcagccagcgagatcacaggtctgagcacagctgtgctggcagcgcatgggcgtcaatgttttgatgacaacctggccaacctgctcctagccttcctgcggcgccagccacagccctggtgcctggtggcacacaatggtgaccgctacgacttccccctgctccaagcagagctggctatgctgggcctcaccagtgctctggatggtgccttctgtgtggatagcatcactgcgctgaaggccctggagcgagcaagcagcccctcagaacacggcccaaggaagagctacagcctaggcagcatctacactcgcctgtatgggcagtcccctccagactcgcacacggctgagggtgatgtcctggccctgctcagc

SEQ ID NO: 3000 - DNA, 6000 bp, Homo sapiens
cctgcccccggctaggcattgctctgagctccagtatcaggaagtgtttggaagccctgacctgccacatcctcacatcctcccagcctctctgcctatccccttgccttgacgtctcctcttttttatttttattttttcagatggagtctggctctgtcacacaggctggagtgtgatcatagctcatggcagccttaaacttgtgggctcaagcgttcctcctgcctcagcctccagagtagatggaactacaggtgtatgccaccacacctggctcaaaggctccccttttaccccctcccaggtctggttggtgcacccatcctatctgtattgcctcccccaggaagccatccctgaccatcagacactttctctaagaccccccgccaccaaagcccaggacagcccactgagcactgtagtcattaaccattaaaggattcctctcttggattcaccatgaatttccagtggccaaggactgggcccaatccatcttagtgccaaccctcccagggcttggcccagaggggcacctcaccatatccagctgacttgctgttctctgaggcaaagtagatgcccttgccaacacgcccaccagaatgtggcatgatgcggagcccactagtgaggatggcggccaccacggccatgttggtgccatgccacagcagcttccgattacccagtttggagtgggcctggaatctgtcttcctgagtggagaggaagtgagaaatgggagtgatgccacccgagcactcagtcgccttgccctgctgcttgtgaccaaggcctagtgtccctctgcttactcacgcgcactcatggccggcagaaactgaccagagctgctaaacgatttgctaagggaccgattagccaaggacatcttcctaaggcacagtggtgatgggggagaggtgggggaacctccctcacctccccttcttggtttactttccagatgtgttgaagtgtagggcacctgtggttgctgccagtctgttctaagtaggtctgtatcacctgtggggagagcagaagctggttgccagggtgggaggctcaggagctaatcccccatttttcttcccccagtcccaagccctcctcaggccctggagacacaggaagagaaggctgagggcgagtattcctctgggcacctcgagggcaggtgggcagagggacagtgcccactgatagcctggcccctctgtggggcccaactcaccttgtactcaggtgctccagagtctagcagctgcagctggcacttgagaagctggtagtctcggtccagggggtgtggcacctcctccaccgtcttctcctgctcagagactgcctgcagggcctgggccagctcgatgtccgccagcacctaggatgatgggccctggcagtttgtcttcccacttgacctctggcctcccctctcctctctcacatgactggtattgtagccaccccacctgtgtgtcccacctgtccctccccaccctatctgtctgcccagccttccccacccgtctgtcagcctgcccaggcagtccatccttctgggccttcttggccacctgcccttcatctcgctcgcctaggctgtctgttcagtgccccactgcctgcccgcacccctgccagccctcaccagcagcatgtccttcttggcctgcagaagctcaggggaattgatgggcgggggctggctgtggccgaagttgtgcgggatgacggtgtaaaagtgtgaggacagctcctccaggctttggccaccatccgtggggcctttcagggcctcctccagcgcctccaaggcctcgaaaccccgtgcaatctgttgcttgctcagctttcccaggggcatcttcttcacatctagggggacaggggagtggggagactcagccccacagccctgccaccctgaggcccctgccaccctgcctgcctctcacccctcacccaggtccatgagggccatggtgttcttgaacatctccttgctgaagatgttagtgatgagcttctgcgtggctgggtccagggagcagggctgcacccgcttagtcacagtcctcactgggcctctgtccacctgaagatagagggcacatgtgggcaggagcagcggggcagggcgtgacaccagacagagaccagccagcctgaggccagaggggagttctgtggctgaggctgcgcagctgggcagtggcagagcccaaccagcgggaactctccaacgagtcccctccctcagtccagggcctgcccaccttccttggccatctcaccttcaccacagcttcctgggcctcatcctctgcctgtacttcgataagtgtgtacttgcccgggtgagacacaaagtggtcccgctctgcccagttgttcttggtcttttcccgaaatttcttctcaaagtccttctttgcatcttctagccttgtgaagtggttgatctttgactggccgacctctccctgcaaccgacagccttcaggggtatgcccaccatcagcatttgctggcctgtgtgtcgggccaggccctgtgctgagtgccctgggacagttgggaggtgcccccccaagtcagtagctgtggccttttgaggaccctggggagtatgtgcagagcaggcagggcactcaccacacggccccagtggttccagcaggtgaagaagcggttgctgtcttggagcagctggatgatgtagaacttgttgttgttgttctcgatgttggtctggttcagggtgcagttgtagtcctcatacacctgggccagaggggaggtggggggcaggctggctggggtcagatggggtgcctggccgtacaccgagagggctctgatggggacaggagtctgacggcagtgggagtcagagggaccctgtcttggaagcttgggggggtcactgctcttccctaggggatgcggtgtgagaggacatggctaaaccctgacatggaggtatggggggtgctgggggggacacagctgggccctggatgggggaatctgagagggacatggctctgccctgaggggacatgggcaagcgcccaggagactgatgtagtcacagcctttccctaagtgcggtgggaggaggcctgcatggggtctgaagggcagatgtgacccgcctggacctgacgggacacagccctgatgtctggggtcaggagaacatggccttgctctggcgcttacctgggggccttgggctccaaaaccagaacagagtcctaagggggtggcctgggtgtgtttgtgcttatcagtgggcaggctctgggcctgactggggactgcagctcacctgggtcccggggttgctgctgagtggacatgttggatccacgcggattatgcgcttctctgcgggtatggccttgagggcctcagcggtggagcggaaggggtcctcctcccttcctgcctgccggcccttcttcttctcagggccctcagtctgtacccagggcttcggctttggagccatggctgtcctggggcacagagaggcccttaggcctccatggtctcctcatccccaacgacccactctcagtccccacccctgccctgggccagcacagcaccaacttgccccaccccgggttggcccttcggtggcctcccactgcatcctgtgtccactctgacggcattcccagccccagaccacacccagctctttgtcactcagaaacacccctttccccagtcccaagtgcaaggttaggactctgtccagtctgcccactctggtcaacagggtctgcctggctccctaccctctgcagctcacctgtgtgtcctgaggggtagggaaagtgaaaggaggctctctctcttccacttcggggctcctccccctgtgtcagctagttcagccctggcatggttgccgggccgagtcaccgagctatgggggagggtgggcagaggatcctgggggcaggattcttggggccagattatcctcccggagcttagaacccagagctgtagaagcccttcccaatggactcaagagttctgaggagccagaactccggatcagtggccttgaactgatagagggcaaaggccagtcccaccaggccttgccctgccctgccgtgggcaggaccataggacactcacccaagaaaagcagggacatgggagaggtcctggctgccacccggcctggttgtgtgcgcctcccagggcagtcccaggtctagcaactctccatgagcctcaggcgtgaattagggagagaattcccaacaatcgccagaggccggggatgagcttgtgtgggggattagacatcggctatttggccaccagtggggtgaagcagaggctggggcaggccgagtcaggcgaccagtcccacggacgggtggacactcgatctggcatatccaaggccggggcagtcgcgtccgtagcgctgctcatgtggccggggcctgcagcacgcatctgccggtcgcgcggtgaccttgggcccggatacagacgcagcctccctctccccggggctgcttggatccccgttgggtctagcgccgggctgcccatggaggggaggagtcacgttccagaacgcgaaagggcgccgcgtctctggcgccccccagcggccaaggggcgcaaacacagagaaggctcttgctccgacttcgaagtgggccagcagcagagcgcaagcgccacagcatcaggccggaagcgccgtggagatgcgggcttcctactcgagcctggtgcgggagcctaggaacttcaggaggcggggctacaagcgtgcatcctatgggtgcctgggggcgtggcagagcctgcagaaggacccaatggagcagtaggaggcggggcccggcgggcggtggaagcctatcaatacgcggggtcttgccaggcggctggggagctgggagggttcagctgccacgtgagttctgcggccgctgctacacgcctggtgggcagcatgtcggcaacagcggctgctcgtaagcggggaaagccggcctctggggccggggctggcgcgggggccggcaagcggcggcgaaaggtgagcatggcgcttctgagggccgcggtcagccctgctactgggacaaccgtcatcccatccaggggacctgggtcccggcccttccccagcccttcgccctggacccctgctggagtcagcttcgtccctctctccgcgggccaaatcctagaaagccgttcgcttaacccgggaaccaccgccttccccattcctggggttctgagggaaccgaggggggggggcccttggtcaatgccagggtggtctggacccctgaccaaagaaaagaccgtataattcccaggccgactctgcgggggacaggggcaaatccaagggtggcggcaagatgaatgaggagatctccagcgactctgagagcgagaggtgagctattcttttccacatagtgggagggaaaactgagtcccatggtgcacggaagactgagtgagtccgaacagaactgagcctagaatccaagactctgtcccttggctctgagatcgtggctgtttcctttagtttctggtcctgcaaagtcttgtttctgcgaggtctctgggtgggaaggaccctgggccccaatccgaggccattgagacctccttaggttttggcagggactggactgattgagaaattgcaggaaaacagaacaaagctgtcaagtatttcttgcatccttcttcccttgccagttttcctgcaatttcacaattactgggctccccgtctcttaacatgccaggcactgcctttgctgttggaagtgcagagataggcaggcgggtgaagagagtgtgttgtagtgaggtgtgtattttatagttgtgtgttctgggaacagaggagggacatttaaatagggtcttgagagatgaagaggagtctctcacggagag

SEQ ID NO: 3001 - DNA, 6000 bp, Homo sapiens
aggggtggaaacagacccaaatcccaaagagatcactaaagcctctcaactctgggggaaagaggaggcttccaagagaaaccaggcttccaaaagaaatcaggtcacatacaaagagtcaggaatcaaaatgtgcaggcatctcaacagcaatactgagaacaagaagacaaagaagcctcacacacaaagctctggaggaatacactgacccctaaaatgccatgcccagtcaaacaatcaacgacgacactgccaggtgtgcaaggtgccatggaattttctccctctttttctttaggaaggatagaagctgtgctcccaaacaagagggtaaactgggaaagagaaaggcaagggataccggaaaccagagatgcgacacaagagagcagaaagggtgacactatccccagacatgacgggggcagtctggatcagatccaaggacccaccaggcagacacaccaggactgtcatcaccacagcaccatcctttaccctgggaacaaggttccaagcgaaccttcactgtttggggattggcctttactggtgaagttacggctttcccctccatgccccagcccccggaccagctgagagtactcacttcacccaaagacaggtgctgctttgacctgctcctgggagctgggggtaggtcatgggcactcagacacagagaatccaaggcagcccactccctctgatcatgtgcctgaagacatctagtctctgtccactcccctaaccgtgtttcccaagactcactcgtaaacctgcccctgacttccccagaagggaccttgaaaactctcaggaaagccaaagctggaccatgccccagaaataatttagtgccctgtgcctggcaagccttcagccaacagggctagtgctgcccttcccttacacagccaagggacctgtgttaacttcggacttctactcaatttagccaaactaattaatctattgttgaaggattcatacgcatgagacagaacgctaaagaaatgcaagggaagtacacactatgattccatttacagggcatgctagaaaatgcacaactctaggggcagtggttagcagagacttggggggaaggagaggggctgactacgaaggagcaggaggagttctggagggtgatgaaactctttaccttcagggtagaggtggtcacacaactgtgtgtgtttgtcaaaactcactgaactataactttaaaaagggcatgttactatatgtaaattatacctaaatggaaaatgttaattttttaaaagaagaacaaagaaaccaaagaaatgattaactcaagttaggaatgacagttgcggcttctaagtttctgcaaatgttctagttcttaacctaagtggtaagtaagtgtacagaggtttaccattttaccattactctctgtagtgcaaatatatctcattcacttttctgtatctaacacacttcacaacacaacattctaaaaatatttaaaagcacttagcccacactagcctggcacacactcacccacaataaccttcggattaagaaaagtacattaatggctgggtgtggtggctcacgcctataatcccagcactctgggaggctaagatgggcggatcacttgaggtcaggagttcgagaccagcctggccaacatggtgaaactccatctctactaaacatacataattagccaggcatggtggtgcaggcctataatcccagctactcaggtggctgaggcaggagaatcacttgaacctgggaagcagaggttgcagtgagccgagatcgcaccactgcactccagcctgggcaacagagtgagactctgtctcaaaaacaaaaaaaaaaagtacattctttccatgagcaaattaaggcaacacatactcaattttagaagcgagttctaaagtcaactcatagggaaggcactaggattctctggtccaagagcctccaacccacagggtcaggcctgacaccatgcctgaccctttgaaaacctgcaagcaaccacacccatcacctgcagaaatgagggaggcatccaaagccctctacaatctacatgcacttatgaccagtcctcctgtttttgtgtgtggtttttttttagagacaggatcttgctgtcacccagactggagagcagtgcatgatcatagttcactgcagcttcaactccctgggaagggatccccaaaccttagcctcctgagtagttgggactacaggtgcacaccaccatacccagctaactttttttttttgtacagacaagatctcgctatgttgcccaggctggtctcaaactcctgacatcaagcaatcctcccgccttggcctcccaaagtgctgggattagaggcatgagttaccaggcccagccccctttcatcttttctactgcccattctggcacacttacacctcagactttcctctgatcactgaatgccttccctacctctccgtgagagactcctcttcatctctcaagaccctatttaaatgtccctcctctgttcccagaacacacaactataaaatacacacctcactacaacacactctcttcacccgcctgcctatctctgcacttccaacagcaaaggcagtgcctggcatgttaagagacggggagcccagtaattgtgaaattgcaggaaaactggcaagggaagaaggatgcaagaaatacttgacagctttgttctgttttcctgcaatttctcaatcagtccagtccctgccaaaacctaaggaggtctcaatggcctcggattggggcccagggtccttcccacccagagacctcgcagaaacaagactttgcaggaccagaaactaaaggaaacagccacgatctcagagccaagggacagagtcttggattctaggctcagttctgttcggactcactcagtcttccgtgcaccatgggactcagttttccctcccactatgtggaaaagaatagctcacctctcgctctcagagtcgctggagatctcctcattcatcttgccgccacccttggatttgcccctgtcccccgcagagtcggcctgggaattatacggtcttttctttggtcaggggtccagaccaccctggcattgaccaagggcccccccccctcggttccctcagaaccccaggaatggggaaggcggtggttcccgggttaagcgaacggctttctaggatttggcccgcggagagagggacgaagctgactccagcaggggtccagggcgaagggctggggaagggccgggacccaggtcccctggatgggatgacggttgtcccagtagcagggctgaccgcggccctcagaagcgccatgctcacctttcgccgccgcttgccggcccccgcgccagccccggccccagaggccggctttccccgcttacgagcagccgctgttgccgacatgctgcccaccaggcgtgtagcagcggccgcagaactcacgtggcagctgaaccctcccagctccccagccgcctggcaagaccccgcgtattgataggcttccaccgcccgccgggccccgcctcctactgctccattgggtccttctgcaggctctgccacgcccccaggcacccataggatgcacgcttgtagccccgcctcctgaagttcctaggctcccgcaccaggctcgagtaggaagcccgcatctccacggcgcttccggcctgatgctgtggcgcttgcgctctgctgctggcccacttcgaagtcggagcaagagccttctctgtgtttgcgccccttggccgctggggggcgccagagacgcggcgccctttcgcgttctggaacgtgactcctcccctccatgggcagcccggcgctagacccaacggggatccaagcagccccggggagagggaggctgcgtctgtatccgggcccaaggtcaccgcgcgaccggcagatgcgtgctgcaggccccggccacatgagcagcgctacggacgcgactgccccggccttggatatgccagatcgagtgtccacccgtccgtgggactggtcgcctgactcggcctgccccagcctctgcttcaccccactggtggccaaatagccgatgtctaatcccccacacaagctcatccccggcctctggcgattgttgggaattctctccctaattcacgcctgaggctcatggagagttgctagacctgggactgccctgggaggcgcacacaaccaggccgggtggcagccaggacctctcccatgtccctgcttttcttgggtgagtgtcctatggtcctgcccacggcagggcagggcaaggcctggtgggactggcctttgccctctatcagttcaaggccactgatccggagttctggctcctcagaactcttgagtccattgggaagggcttctacagctctgggttctaagctccgggaggataatctggccccaagaatcctgcccccaggatcctctgcccaccctcccccatagctcggtgactcggcccggcaaccatgccagggctgaactagctgacacagggggaggagccccgaagtggaagagagagagcctcctttcactttccctacccctcaggacacacaggtgagctgcagagggtagggagccaggcagaccctgttgaccagagtgggcagactggacagagtcctaaccttgcacttgggactggggaaaggggtgtttctgagtgacaaagagctgggtgtggtctggggctgggaatgccgtcagagtggacacaggatgcagtgggaggccaccgaagggccaacccggggtggggcaagttggtgctgtgctggcccagggcaggggtggggactgagagtgggtcgttggggatgaggagaccatggaggcctaagggcctctctgtgccccaggacagccatggctccaaagccgaagccctgggtacagactgagggccctgagaagaagaagggccggcaggcaggaagggaggaggaccccttccgctccaccgctgaggccctcaaggccatacccgcagagaagcgcataatccgcgtggatccaacatgtccactcagcagcaaccccgggacccaggtgagctgcagtccccagtcaggcccagagcctgcccactgataagcacaaacacacccaggccacccccttaggactctgttctggttttggagcccaaggcccccaggtaagcgccagagcaaggccatgttctcctgaccccagacatcagggctgtgtcccgtcaggtccaggcgggtcacatctgcccttcagaccccatgcaggcctcctcccaccgcacttagggaaaggctgtgactacatcagtctcctgggcgcttgcccatgtcccctcagggcagagccatgtccctctcagattcccccatccagggcccagctgtgtcccccccagcaccccccatacctccatgtcagggtttagccatgtcctctcacaccgcatcccctagggaagagcagtgacccccccaagcttccaagacagggtccctctgactcccactgccgtcagactcctgtccccatcagagccctctcggtgtacggccaggcaccccatctgaccccagccagcctgccccccacctcccctctggcccaggtgtatgaggactacaactgcaccctgaaccagaccaacatcgagaacaacaacaacaagttctacatcatccagctgctccaagacagcaaccgcttcttcacctgctggaaccactggggccgtgtggtgagtgccctgcctgctctgcacatactccccagggtcctcaaaaggccacagctactgacttgggggggcacctcccaactgtcccagggcactcagcacagggcctggcccgacacacaggccagcaaatgctgatggtgggcatacccctgaaggctgtcggttgcagggagagg

SEQ ID NO: 3002 - DNA, 6000 bp, Homo sapiens
tccccaccaagcccaggatgctcatgttcgtgctgaaccagcaggacatgtgtccccaggggcttgccttccgccacaaaggctcttacaatccatgaactccctaggagctgagctcctgccctccctgttccctgggtcaccctcattgcctcaggaccagtacctgggaccctattctttccccatctgaaaaaatcccctggtcttcccaggtcctggagccccctcaacctccagggcacccccatcccagcccccaccccctagccttcatcagcatgcaggctcaggctgcccaaacacaaggggattgttcttcttgcatgctcagggtggggggctgggagcaggcagcccacacaccctggcaggcccaggccacgaggaggctggcttgccccaccctgtgtccccagacaggctgtccaccctccctactcccatcactgctgcccctccagcctccatcaccattgcccagtggcgctgacatcttgaggaaagagctctgagctgcacaggtagacccctgggttctccagctctgccagttgtctcccatgtagccttacaaacatttcccttcctctctgggccgcgagcccctcttgtgattggtaagacctttccagctgtgacaggctgagcccaactcgactctgtgaaacgtaccccaccccccagcccttcttccagtccccctcttccatgaggagacccactctgctcccaccctctgaaaacctaaagcacagcccaaatcccccaccccagcagcatacctagggagctcctagtcctggtaaaacggcaggagtagggctggggatgctgagaaaggaaccaggaatcctgtccaggcaggtcctacctctgcccatgtggctggccctcatgtctgggtcttctcactctactctcattactcctccgggaccctcagccccatctttggttccaaatgtccccaggccccatgaaccttaactcttctccctgcacactgaccctggtcttgtctcaaatttcctctttctggagctctgtgtatagtggaaagacaggctcagaaatgcccagcggggacttctttgagttgcagcaacatctttgaggggcacagaggcctgagtgatcacatctgacttggaagcctgcggagggcttcacagaggaggtggcgtttgagaaggattttgacagagagtggggaggatgggcgttttgagctgaggtaagcctggagaaaggcccgaagggctggaggtgctaagtgtgttctgcagcctggcatgtgtgaaggatggggtggagatgagacaagagagacaggggctggatcatgaaggtccttgatggcctgtctgtggagttcaggctttattctttggggactgggcagccatgggtggctgttgagcagcagagtaagcatacagttttcagcatggagattggaagctagaggcctttctcaatgtagatgagagagtgaggggatgggtaccatgaggctgtggcctttctcctggagcccagcctgggcccgggcttgacttggtttcccttggttccgaagactcctgggggctgcctaatgatggtgtatggaagctgtagcatttctggcacctgccaacttgtcagagctgcctttcccttcctggcactttgtctatgtggcagatctgaatcaagaagccagaggctggaacttgtggaccccaggatgctcacctgaggcttcccactcccctcctcctctcccaactgtagatgattggctatcccgggaggctgggaggccaagaggctgggcacatgtgtccaagatgctggggcagttcttatgaaggcctggctagttaggagagtgagcatctccagagaagggattgggcaggagagttaggagccctcgatgcagacgtgctgtggcccagggtccacccccaccacaccctgcctccctggatgctccgagccattccccagcatcactgggtgtggctagcatggctgctttgggagtgggaataggagaagggggctgctaggtggggagctgggggtgctgagaggatgtggggggatgtgagatggagagtgaagcccaggtgggtccacaggccctagctggtccagacattctggccagcagagcggagggaatcccccaaggggcgggccagtctacttgaatcgcctggccccaggagccctcccctcccccggattgttcttgctccagaacaaaggcagggtggacacttgatccctgcatgtggggtgagctggctaagcccccagccctttgattgggcagctgtcatgggagagagacagctgggggggaggggcaggaagggggcagccaccatcgcttacacagctgtcacccccccgcctcctccagcctgagtggcagaaagccagggacaggaggagtgggcactggggctggggagggggcctgggagtcaggagggaatgcccgaggtcagaggcctggtgtgagcttggtatgccctgccagggagccctgctgaccagagggggctgggcacccgcggaggtgagctggaggtcactgtggcatgttgtgtggctgccacgtgggtggcccggcaaagacccagggcccacccggctggagcagcaaatgactccctagagccccactgagggcagggggagccagtgatgcctcatggggctgctcgttccttgggccctaggagaataatttggaagacatgggtcagaaccccttgttcttgcctaaagatgggaaagaccttgagagtctctcagaccaggaagggcgcagatagaccagcaactctctccctacccccagcccctaaacacaatacaggtgggtttaggtcaggtgaagacctggccaaagttacccactggacttggggcggtgggtctctgctggagacccaggcatcttttcatggcagaagctctagttctggccatgttccagccctcctgccccatttttcctggagccacaagaggtcatgtggagatggtttggggacaatgtcaggtctcccactggttaccatcccaagggggtccttgaaccccagaaaattttggaacttaagaccgaggctctggacaagttgtcagtcctttccaaataggatccctgtcttctagctaggcaaaggtctcagagacgactgaagcccaatccccactttcgaaggagcccgccctccaggaagaggactaacagatccagacaggagcagcctgaaaggggaggcagatggggctttggatagcctcacactagcaatgctagtcccactgtgtcccacctctctgtgaccttgggcaggttactgatcctctccaggcatcaggttctcctgtgtagtgaattcatctgctcagctaaccagtatgttagctgagttccagctgagctcagtatgttctgagcaccttctctggcctggctctgaactgagccctggggacataaggagaaggcagcagccttggctcctgctccaaggggctcctgggcttggctgtccagagaagcagaaaccaagcacgtcatcacaagtgctttgatgggggaagtgcaggcagctgggggaatgtctagcaagggcagccagcatgaggctggccaggatgctcggagagcacagtccctgcatccactgctcatctccagcctctggagtccctgtggcagaactcaaatggaaggaggagcagctgcacccaggggagcagggtgtcacctccgttggataggtgaggaaacaaagaccttatgccatacggtggcttgctgggacttctgagaaggagccaggctgggagcccctttcaccttccgtgctcaagctctgtctagcaaggggagttcagaagagggcgttggacagaactccatgccctttcctgtcatgttgggatggggcagggggctgaggaggaaggcgcccagagacttctggagtgttccaagctcagcacactcatccttcatccccacaccctcctgggcatgaggaatttgcagtgttagggcttggtcttggcccagacttagcaccagttggtcccactccctgttttccccatagggttctggtcccccagtgagctccccatcaaggctgagccttggcaggagacagacgcctaaggagagggatttccaagcaggattaaggttgaggattaagtcggggcatgaaaaagggtcgggtggggagggctggccactgagctaatcccagcagctaatctcaggctccaccttcctccatcagttaatggccttgacattcccgcagcccaccaaatccttttcttacccatcacgcagtcccagggagaggtattccctccattttataagtgaggaaattgagactcagagcccaagtgacttgtttctggtacagtagaaagtgttccaggctgggaatgtggccagcctggacacttcttacctcctgttcccaaggccatttccagcacatagaagagagattggaaaccaacgtgcagaactgccagtcccctgacacgctgtgccccacccactgcagcccagtgctgaatgaaccctgcccagaggtgtctgtagtgagcttctgccctagtgacttttggtaggtgggagtgtgcctcaattcccccctcaacccctgcctcaagcctttaccaggcagtggcaagacctgaccacacccgaggcctccctgccttcaaggcttcccatggctgctccagcttcctccccagctgctcttctgtgctccatccaccatctggctgctggacgaaagtgcctctcatatggagtaagctttcagcctgaactccaccttcagggccccatccacagaggttacctcttccaagaggtcagggaggaggctctcctcctgactcccataggcttcctagttaattatttcttttagtgtctcagggtaagggaaaggctaggtacctaccatgtatgtgcttattgttttaattctcatcactctttggagatgggaatttgtatccccttctacagatggagaagctgaggctcagagggttgaatgggctccccaggcttacacagctcgtgagacacacataagcaccctggtcagagtgatgtgtggcgctcaaggtccatgcagtctctttcctctgggagtttgactagcccagctctggggtccccatgtaagggcaggggcagggtggactgggctcctctcgaacccctctttggctgcccctgccagagccggccaggttgcagcgcggacacactcgcaggtcgctgtggccccagcctcgcctgacagaatgagcggctcggacgggggactggaggaggagccagagctcagcatcaccctcacgctgcggatgctgatgcacgggaaggtgagcgggaggtggagggccaggcgaggcaaggctgggctgggctgggtttcactgggtatcccagtggggaggggctgggcctgggcactggcacccatctgacggctcttgtcttgtccgcaggaagtgggcagcatcatcgggaaggtaggtgcctagctctgctctgtacatccccctccagctgaggcttcagcccagggaaggaggctgtgacctctaagttaagagtgattatctgttttgtacctcccacagaagggcgagactgtaaagcgaatccgggagcaggtgaggatggagtttgggggaggagcccagggcacctgatgtggaggggagatccctgccccactttctctctgaaccactccttctgggctgaccagtgagtcccccagagggtggcagttttgagccttgcctcaggcctggtgagtggggcaggcagacaagttccggcaagggagcagggaagatgccccgctgcccggcgctcattctatatctgcagagcagtgcccggatcaccatctccgagggctcctg

SEQ ID NO: 3003 - DNA, 6000 bp, Homo sapiens
gcagggggctcggcagaggcgccgggcgggcggcccgggccggaaggactggcctggcgggagcggaggggcttggagccgggcgcagcgcgggcggtgcggggaaggccgtggctggggaccgggcttcaggccggacgcccctacccccaacccgtggggctctgggagtggcaggggaagggtcgcccgagccctccaggaagcggccgccgctcggggcgcaccgcggcgcgcggggcggggcgggcggctgcggcactggggcggctggggcgggcccgccgctctgtaatcggatccggggagggggcggggaggggccgggccgggcgggccggggggtggggggggggcgcggagccgggctccgggccggccgggctccgcgcctgtcaaacccctcattgttcgcagctgatgtcactcgcagttgtgagcggccgcctctcccggggacaatgtgggactgagcggcccagccgccgtgccgccgccgccgccgccgcaggacagccccagcgaggtagggcgcgggccgggcggggcacggcgggccgcgaagtttgggggttcgcccgggggcagggagcccgcgcccagatccctcggttggggtcgcaggtttgtgagactgcgaggaacacgttctctgtcccacaccgctgaggcctgcacaggtgggaggcgctggtctgccagaggcgcccttggcaccagggaggggcttcctggaccttagatcccagatttgaggcccccatcccactcgctgtttctgtcctttgcgcctgctcctctctctgactcctgccctgggttctggttctgctccatctctgccctcacttgccactcccctgtagctcctggctgggcacacactccttcccatcctccgcagtcgttgggggagccagatacagacctccaggccaggggtgtatggagatgacagctgggggctcagagtggtccctcttgccccatagctcttcagcccttcagctctgacctagcttcttggctggggtcctggggggtgggggtgggaggctctgctactcacttcagcctggccctcatgcctgcctggccaggagagggaggtgcccgcctcctctctcccctatccctggcccgccatcttgagacctgtggcacccagtgccccacccggccccagcacccaggggagtggtctccaaggtgatgatgcacccagggccagttgcattcctttctccccaccaagcccaggatgctcatgttcgtgctgaaccagcaggacatgtgtccccaggggcttgccttccgccacaaaggctcttacaatccatgaactccctaggagctgagctcctgccctccctgttccctgggtcaccctcattgcctcaggaccagtacctgggaccctattctttccccatctgaaaaaatcccctggtcttcccaggtcctggagccccctcaacctccagggcacccccatcccagcccccaccccctagccttcatcagcatgcaggctcaggctgcccaaacacaaggggattgttcttcttgcatgctcagggtggggggctgggagcaggcagcccacacaccctggcaggcccaggccacgaggaggctggcttgccccaccctgtgtccccagacaggctgtccaccctccctactcccatcactgctgcccctccagcctccatcaccattgcccagtggcgctgacatcttgaggaaagagctctgagctgcacaggtagacccctgggttctccagctctgccagttgtctcccatgtagccttacaaacatttcccttcctctctgggccgcgagcccctcttgtgattggtaagacctttccagctgtgacaggctgagcccaactcgactctgtgaaacgtaccccaccccccagcccttcttccagtccccctcttccatgaggagacccactctgctcccaccctctgaaaacctaaagcacagcccaaatcccccaccccagcagcatacctagggagctcctagtcctggtaaaacggcaggagtagggctggggatgctgagaaaggaaccaggaatcctgtccaggcaggtcctacctctgcccatgtggctggccctcatgtctgggtcttctcactctactctcattactcctccgggaccctcagccccatctttggttccaaatgtccccaggccccatgaaccttaactcttctccctgcacactgaccctggtcttgtctcaaatttcctctttctggagctctgtgtatagtggaaagacaggctcagaaatgcccagcggggacttctttgagttgcagcaacatctttgaggggcacagaggcctgagtgatcacatctgacttggaagcctgcggagggcttcacagaggaggtggcgtttgagaaggattttgacagagagtggggaggatgggcgttttgagctgaggtaagcctggagaaaggcccgaagggctggaggtgctaagtgtgttctgcagcctggcatgtgtgaaggatggggtggagatgagacaagagagacaggggctggatcatgaaggtccttgatggcctgtctgtggagttcaggctttattctttggggactgggcagccatgggtggctgttgagcagcagagtaagcatacagttttcagcatggagattggaagctagaggcctttctcaatgtagatgagagagtgaggggatgggtaccatgaggctgtggcctttctcctggagcccagcctgggcccgggcttgacttggtttcccttggttccgaagactcctgggggctgcctaatgatggtgtatggaagctgtagcatttctggcacctgccaacttgtcagagctgcctttcccttcctggcactttgtctatgtggcagatctgaatcaagaagccagaggctggaacttgtggaccccaggatgctcacctgaggcttcccactcccctcctcctctcccaactgtagatgattggctatcccgggaggctgggaggccaagaggctgggcacatgtgtccaagatgctggggcagttcttatgaaggcctggctagttaggagagtgagcatctccagagaagggattgggcaggagagttaggagccctcgatgcagacgtgctgtggcccagggtccacccccaccacaccctgcctccctggatgctccgagccattccccagcatcactgggtgtggctagcatggctgctttgggagtgggaataggagaagggggctgctaggtggggagctgggggtgctgagaggatgtggggggatgtgagatggagagtgaagcccaggtgggtccacaggccctagctggtccagacattctggccagcagagcggagggaatcccccaaggggcgggccagtctacttgaatcgcctggccccaggagccctcccctcccccggattgttcttgctccagaacaaaggcagggtggacacttgatccctgcatgtggggtgagctggctaagcccccagccctttgattgggcagctgtcatgggagagagacagctgggggggaggggcaggaagggggcagccaccatcgcttacacagctgtcacccccccgcctcctccagcctgagtggcagaaagccagggacaggaggagtgggcactggggctggggagggggcctgggagtcaggagggaatgcccgaggtcagaggcctggtgtgagcttggtatgccctgccagggagccctgctgaccagagggggctgggcacccgcggaggtgagctggaggtcactgtggcatgttgtgtggctgccacgtgggtggcccggcaaagacccagggcccacccggctggagcagcaaatgactccctagagccccactgagggcagggggagccagtgatgcctcatggggctgctcgttccttgggccctaggagaataatttggaagacatgggtcagaaccccttgttcttgcctaaagatgggaaagaccttgagagtctctcagaccaggaagggcgcagatagaccagcaactctctccctacccccagcccctaaacacaatacaggtgggtttaggtcaggtgaagacctggccaaagttacccactggacttggggcggtgggtctctgctggagacccaggcatcttttcatggcagaagctctagttctggccatgttccagccctcctgccccatttttcctggagccacaagaggtcatgtggagatggtttggggacaatgtcaggtctcccactggttaccatcccaagggggtccttgaaccccagaaaattttggaacttaagaccgaggctctggacaagttgtcagtcctttccaaataggatccctgtcttctagctaggcaaaggtctcagagacgactgaagcccaatccccactttcgaaggagcccgccctccaggaagaggactaacagatccagacaggagcagcctgaaaggggaggcagatggggctttggatagcctcacactagcaatgctagtcccactgtgtcccacctctctgtgaccttgggcaggttactgatcctctccaggcatcaggttctcctgtgtagtgaattcatctgctcagctaaccagtatgttagctgagttccagctgagctcagtatgttctgagcaccttctctggcctggctctgaactgagccctggggacataaggagaaggcagcagccttggctcctgctccaaggggctcctgggcttggctgtccagagaagcagaaaccaagcacgtcatcacaagtgctttgatgggggaagtgcaggcagctgggggaatgtctagcaagggcagccagcatgaggctggccaggatgctcggagagcacagtccctgcatccactgctcatctccagcctctggagtccctgtggcagaactcaaatggaaggaggagcagctgcacccaggggagcagggtgtcacctccgttggataggtgaggaaacaaagaccttatgccatacggtggcttgctgggacttctgagaaggagccaggctgggagcccctttcaccttccgtgctcaagctctgtctagcaaggggagttcagaagagggcgttggacagaactccatgccctttcctgtcatgttgggatggggcagggggctgaggaggaaggcgcccagagacttctggagtgttccaagctcagcacactcatccttcatccccacaccctcctgggcatgaggaatttgcagtgttagggcttggtcttggcccagacttagcaccagttggtcccactccctgttttccccatagggttctggtcccccagtgagctccccatcaaggctgagccttggcaggagacagacgcctaaggagagggatttccaagcaggattaaggttgaggattaagtcggggcatgaaaaagggtcgggtggggagggctggccactgagctaatcccagcagctaatctcaggctccaccttcctccatcagttaatggccttgacattcccgcagcccaccaaatccttttcttacccatcacgcagtcccagggagaggtattccctccattttataagtgaggaaattgagactcagagcccaagtgacttgtttctggtacagtagaaagtgttccaggctgggaatgtggccagcctggacacttcttacctcctgttcccaaggccatttccagcacatagaagagagattggaaaccaacgtgcagaactgccagtcccctgacacgctgtgccccacccactgcagcccagtgctgaatgaaccctgcccagaggtgtctgtagtgagcttctgccctagtgacttttggtaggtgggagtgtgcctcaattcccccctcaacccctgcctcaagcctttaccaggcagtggcaagacctgaccacacccgaggcctc

SEQ ID NO: 3004 - DNA, 6000 bp, Homo sapiens
gttcatcagggagatctcgaactcctgacctcaggtgatccgcccgcctcggcctcccaaaatgctgggattacaggcgtgtgccaccgcgcctggcctaatgagagttacatgtgaccatcagctggctcttttttttttttttttttgtgaccgagtctcactctgtcacccaggctggagcacagtggcacgatctcggctcactgcaacctctgcctcccgggttcaagcgattctcctgctgagtagctgggactacaggcacgtgccaccacacctggctaatttttttttctttttagtagagacggggttccaccatgttggccagggtggtcttgaactcctgacctcaggtgatccacccgcctcggcctcccaaagtgctgggattacaggcgtgagccaccatgcctggccgataatttttcttaaacttttaattaaattgctaattcttgaagttggctttattgttcccatatttcagatcaagaagctgaggccccaggttacacactaaagtaaatggcagaggcagaaataacacctatgtcctcctgaccccaaggcatgttcttaaagttctggaaacctcctggaggcttccttgctgctcctctgggactgccaccctgggcagggtgttctgtggcccctcatcatcgtggttttgaaccacaggcccttcaccagcacagcagcagcaggcatggcagcaagcgtggagcagcgcgagggcaccatccaggtgcagggccaggccctcttcttccgagaggccctgcccggcagtgggcaggctcgcttctctgtactgctgctgcatggtattcgcttctcctccgagacctggcagaacctgggtacactgcacaggctggcccaggctggctaccgggctgtggccattgacctgccaggtacttaaggggcaggcttctgggcagggtttggggaggtctcattagggacagggccaggttcctataacatgtagcccctccccactccaggggtgggggcggtgggatctggaggacccagccaggctgggccctgaacttgacagcgtttggtcaagcacactgcaagggcctctgagcagtcttgatccagatgtggtcctcaccgcccagctgctcctcactgttacctgggcattgtctcagtgtctctgagcctctgtttcctcatctgcaatgggagataaccacactcatgttttgggctcgctctaatgagaatggaatgagataatccatgtgagtatgtggctagtacctgacacagagtaatcggtgctcagccaattggaagtaaagtattttgactgaataataaccataggcttttggaagccctaaggagtgagacctgagtcttctgggggacaaggcagggcctggtgggtggccaggcccccacttgtgatcccacatgcaaagccctgagctgggttctagggtagatgggatcagtgcccagactgcctgtcataacccagatggctgggtcccaaccctcggtgccaggtgtgaaaggagcagcatggctggccccaccccctcaggccagggatggtatggtttcagggctcaagggcgagcctcctgcccaggcaggattgattccaatggtgggttggcttgagcttcagggtgaaggtctggagctaatcttgttggtgaagcctgaatgactggaggaggagctgcagaaccgacccctcagctgctgtccttcaggagcctctcttgtcccaatccagggccaggtgcctttcacacagttaattttcacaacaatcttaaatggcagatacttttgttatccccctttaacagatggggaaactgagcagctgagagaggactgagggggacctacccaaggtcacatagacaataaatgcagaattgggttctggacccagacttcttgggcttcagagcctgattctctccaggacacttactgctggggagacaggcacagacgtggagagaagtgcctcatgcttggcacgataagatagaatgaggctactgtaggaataaacgtgggcacactgggtgttacaggaacctggccacagagaaactgacctaggagggcttcctggagagagcaaccatctcccttgttttgccattcactgcccttgtcttgtctctttcacacctgaatccctgcaggtctggggcactccaaggaagcagcagcccctgcccctattggggagctggcccctggcagcttcctggcggctgtggtggatgccttggagctgggccccccggttgtgatcagtccatcactgagtggcatgtactccctgcccttcctcacggcccctggctcccagctcccgggctttgtgccagtggcccccatctgcactgacaaaatcaatgctgccaactatgccagtgtgaaggtacccttgtgtgggaagctgaggtgcccctgccaggagcaaggaagggtgcatccctgggctttcctcatctgggggctggataatcaaggggtgtcttctgggaggagctgaccacccaactccacccttttggtttactcagcagactactgtgccaagccctgtgctaaactgtgttctggggcagacaccaatctgtgcccccacccactgggccagcttgtctctctccctcatatggggtggtcccaggaagagactgaagtggggagggctggggatgctatggcaggtccctgttgactctgccccacccccctatccttcctctcagactccagctctgattgtatatggagaccaggaccccatgggtcagaccagctttgagcacctgaagcagctgcccaaccaccgggtgctgatcatgaagggggcggggcacccctgttacctggacaaaccagaggagtggcatacagggctgctggacttcctgcaggggctccagtgaagcccagcactgctgcagggggtgggctgcctgcctgctctgagctctctcttgcacgctctctcttctctcccaggctctggctcatgcacatgcaacaggtgcgtctgtctatatgtctgggttcttgtcttttgtggtctgtttgtcttttctacctctttctcttgcagtgatagactgagggggtaaaatcaagagaaaaaactctcaggaatcaaggaacataatcctgtggagggtaatccattacatgagcttctcctgttcttccactttcctgcctggctttcactccttcccctgctctgcccagcctttccctcccacccactcctccttctgcaaatgccctgaaggccagcccttaccccaacacccacttccccacctccttaggccccagatacatacatgcccacatgcacgcttacatgtttagagccatccttgtttccaaatatgacccttcgcttgagggcaactgcataggtacatctaactctggactggcatgcacattgtcatgtgcagctttgcatatacacacatgcatacatgagcctccacacaagcacttgcacacatgtggactcctaaccatgctaacctcactggctgggaaggtggggaccccatgggccagcccttgcaggaggcccttttgcaaggcttagggtgtggccagccctgaaagctacttggacacaggtttcagctggccccagcccagaagtgacccccagaaagggagggccaccgctttgccccctgcttttacccttccttctgggtgctctacacctcaggttaccaggcctgaggcatctcagccaagcttgtttcctgctctgaggcttgtggggtgggagccagagtggaggtcggtgaaataaagtgatgcaattagaccccaccggctcctgcttctaaagagcgccgcccctcccccacccctgggaccaacactgtgggcccctcccccaccccggcgggaccagatggtccccctgccctttgtccaccaggccagatggagaggaagggagattggattcccctccccacccacacatacccaggtgccaagagactcagctgtggggggaggtggaggtcagtgggaccaggctgagccgattatggaggagtgggggggaaggaatagttgcttccccgagggcggggggtgcccagcggacttgagaacagttcatcacccccactagtatcccttccccagtaaaagactcaacggagcccgttccttgcgaccctatccccaaaaggaattccgggggtagatttggggttatcacaggatcgggtgcacagggccacacggctctcaggcccctcctccagcctgtcctgcgcggacgagggccgggccatgcagctgtgggtggccgaggagagcgggtcttggtgggcgcaagcccgagcggaggatggcgcgcagcgagcagagccgggagctaggcggggcgcagggtcccagccggagctcggagggacgcgggccgggagcgaggcggagccggggctggcggggccaaggcggggatgggggtgcagggggctcggcagaggcgccgggcgggcggcccgggccggaaggactggcctggcgggagcggaggggcttggagccgggcgcagcgcgggcggtgcggggaaggccgtggctggggaccgggcttcaggccggacgcccctacccccaacccgtggggctctgggagtggcaggggaagggtcgcccgagccctccaggaagcggccgccgctcggggcgcaccgcggcgcgcggggcggggcgggcggctgcggcactggggcggctggggcgggcccgccgctctgtaatcggatccggggagggggcggggaggggccgggccgggcgggccggggggtggggggggggcgcggagccgggctccgggccggccgggctccgcgcctgtcaaacccctcattgttcgcagctgatgtcactcgcagttgtgagcggccgcctctcccggggacaatgtgggactgagcggcccagccgccgtgccgccgccgccgccgccgcaggacagccccagcgaggtagggcgcgggccgggcggggcacggcgggccgcgaagtttgggggttcgcccgggggcagggagcccgcgcccagatccctcggttggggtcgcaggtttgtgagactgcgaggaacacgttctctgtcccacaccgctgaggcctgcacaggtgggaggcgctggtctgccagaggcgcccttggcaccagggaggggcttcctggaccttagatcccagatttgaggcccccatcccactcgctgtttctgtcctttgcgcctgctcctctctctgactcctgccctgggttctggttctgctccatctctgccctcacttgccactcccctgtagctcctggctgggcacacactccttcccatcctccgcagtcgttgggggagccagatacagacctccaggccaggggtgtatggagatgacagctgggggctcagagtggtccctcttgccccatagctcttcagcccttcagctctgacctagcttcttggctggggtcctggggggtgggggtgggaggctctgctactcacttcagcctggccctcatgcctgcctggccaggagagggaggtgcccgcctcctctctcccctatccctggcccgccatcttgagacctgtggcacccagtgccccacccggccccagcacccaggggagtggtctccaaggtgatgatgcacccagggccagttgcattcctttctccccaccaagcccaggatgctcatgttcgtgctgaaccagcaggacatgtgtccccaggggcttgccttccgccacaaaggctcttacaatccatgaactccctaggagctgagctcctgccctccctgttccctgggtcaccctcattgcctcaggaccagtacctgggaccctattctttccccatctgaaaaaatcccctggtcttcccaggtcctgg

SEQ ID NO: 3005 - DNA, 6000 bp, Homo sapiens
gccatcgcccccggccgcactggtagttttcaattccagcatgtcagaatacctggggagcttttaagacatgtcagtgcctgcactccatcccagatcaattaactcagaatctccaggggtattataatattttaaaagctccctagggattctaatgtgtaccactggacttgttttagctgagagtcactggatttcaaacacaaaatctccttaattagcatctcctttgttctgagtacctcagacctaatcagtactacccttattccacgttcgttgtttattttccagctcctttctttctttgcctttttgtaaatcacttccactcacatcacatgagaaacagagttttcagtctgggtagataattctgttttagtcaattcacaaatgtagtttgagtaatttttgtttttgtttttatttttatttttgaaaccgggtcactcgggggattgcagtggtgccatcacaactcactgcagcctcaatctcctgggttcaagcaatcctctctcctcaacctccctagtagctggggctacaggcatgggccaccactcctggctgatttttaaattttttgtagaaatagggtttcactatgttgtgcaggctaggctcaaactcctgggctcaagtgatcttcccgccttggcctcccaaagtgctaggtttataggtgtcagccactgtgcctggcctaatttgggtaaaattttatttttccatataacttctgaaatttccatgggaaatcactcttgataatttatgtaaagttaaaaaaaatcagatgatgtttttgaatgtacatcaattattgttatttgggggctttttttcttctgtttttagcaatattaaactgaaaaaaaaaaccacttcgagtatggcacatcttccttaaaattctaaatattatattttaaaaacttttaaaattcataactaagttgattaaaatcagggaatcctttgtaggacagaaatgtcaaacatattctagaggattaagaaaagcactagacccaaagttttccatagtgatgcctgctgttccccctggagtctagagcatggattatgggctctgttgttcccagcagggtgagaagtaagatctaaaattctttgcataggccaggtgtggtggctcacacctgtaatcacagcactttgggaggccaagaggggtggatcacttgaggtcaggagttcaagactagcctggccaacatggtgaaaccccatctctaccaaaaaatacaaaagtgagctgggcgtggtgatgcccacctgtggtcccagctactcgggaggctgaggcacaagaatcgcttgaacctgggaggcggaggttgcagtgagctgagatcgcaccgctgcactccagcctgggcaacagagtgagactctgtctcaaaaaaaaaaaaaaaaaaatttctgcagaaagccaaaacccaagaaaggcagcactctcagtgaatgaagcagagaaatatctgtcctgcagattgagacaataaggatgcaagcctgcacaaacctgactctgggtatctagcataattctactacttacatattttttaaaaagccaaagattaaatttaaagtgatccacaattggtatgtctcccaggtaactggcagaagtatgtgtaaattttatttggaggggtttgctcagaccttgaagaatttttttttttttttgagactgagtcttgctctatcacccaggctggagtgcaatggtgttgtagcaggatgagctgcagacaaaacttctcagacaccgagttgtagaaggaagggctttattcagctgggagtatcagtgagctactatctcaaaatccaagctccccaaatgcacagtttctgtcctttttaagggctcacgacactaaagttttcgtacgaaaggatcgtggttgactgagcagtctaggggatacgtaacaggggtttcatgcactggtattcagaaagaaacagaacagggcaaggagtttcacgatgttcttctatacaatgtgtggaatctatgaataacatcagtttctaagttatgagttgatttttaactactgggttgaggcctggcaggcccaggcctggtttcgggcgtggcgccgggctgctggtctttggttttacttccttgtttttttttttttttttaaaaaaaacaagtactgagtataatacaatataaaacaatatgagagggtctctctcttcccaatatgagagggtctctctcttccctcagtgtgatcctggctcactgcaacctctacctcctagattcaagccattctcctgccttagccttccaagtagctgggaccacaggtgcaccactaggcctggctaatttttgtatttttagtagagatggggtttcaccatgttggccaggctggtctcgaactcctaacctcaaatgattcggcctgccttggcctcccaaagtgctgggattacaggtgtgagccactgcaccctgcctccttgaggaattatcacagacaaaattccaaggaacacgagtttagacacaatacagatggaaaatgcttctggtattttaatattagttattatgataactgttagcataaacatctttaatatttttgagaaatagccttctattctccattttcagagtttttctgaaaaaattagaaatgttgaacatttaaaataaattatatattttaaaatattctctaggcttttggtaggatgacataaaactttcaattcctttctaattatttttctgatttgatcatagttcacctaataataaaaacagaatagctttgtaagagatttttctagtttagccttttcccagcaaaatgctgaatttaaattgggggctatattagaacatctaaatattttctctgaatagtatttattatgtgccggcactattctaagtactttacacatattgacttactcagtcctcaaaataaccaaataggttgttacaattattatctctatcatacagatgaggacatggaggcacaaaagggttacgctgtaatcccagcactttgggaggcggaggtggacgggtcatttgaggtcaggagttcgagaccagcttgaccaacatggtgaaaccctgtctgtactaaaaatacaaaaattagccaggtgtggtggtgcaggcctgtaatcccagctacttgggaggctgaggcaggagaaacgcttgaacctgggaggcagaggttgcagtcagcagagatcaagccactgcactccagcctgggcgacagagtgggacactccgtctcaaaacaaacaaacaaacaaaaaatgggttaagcaagttgcccaagatctcacagctactaagtttcaaacctagactgactgactccagagttgcactgttaacccttaagttacactgcatctgagaaagttctttcttggctgcaatctaggggtctctctctcttttttttttttttctttttttgagacggagtctttctttgtcgcacaggttggagtgcagtggtgcgatctcggctcactacaaccaccgcctcccaggttcaagcaattctcccgcctcagcctccagagtagctgggattacaggcacccgccatcatacccggctaattttttgtatttttgtagagacggggtttcaccatgttggccaggctggtctagagctcctgacctcaggtgatgcactcatctcggcctcccaaagtgctgggattacaggcgtgagccaccacggccggcgagatctcttttatttctttaatagtactcttcatttctgcccaagcatatggcacacttcattaactgacttgtttaatgtctgccttattctctagactctttctctttgagagcaggaaccattttatgccatttcactgccatttacccagtggctagcttacagtagatactcagtaaatagttgttgattgcgtaaaaggccaagagaaaaatgtttcattcacggagtaatgtcgccatctcgtggaactttagaatattgtcatttaaatcaaaaaaatgttttcacggaaggaattgatggttcgaatgctattttccagattgtattcgagtgttttttttttttttaattggactggaccttttgagatttttagtgctctagaactgcacagcctcttcaggtcaggcttagggcctactagttttgcttggtgaaatgaattatgcaactaggtaatgaatggtcaccgttttacgttcagaactcgttcgcttctacctttacaaaagggacaacacagatgcattactaagctcttggctcataacgatccctggggtatattcagagccccttcctcgcggcgttcatatagtgtctcaggggtctgtcagccagcaatccccaattcctcattacatattcctcacaatgcatgctggctaaaatggaaattgtgttcagaaatagccctgccctaccatcatatactaggagaaaggaggaaattatgctctattagaaaccctaggctatcttgcataatgcttctcaatctgaaataattttttacagaataccaatacgttaagaagagctacttccctgatctacctattatgggcagcccattttatgaagttagcatggccttcctattcaaaccagaaatggacaaaaggagaaggaaggcttttaggtcagtatggttataactgtagattctgtattcttcctctttaatctatctctcatattaaccaaccaggaggttggaggccggaagtcttagacgccagcgagagccgctccttccccacgagtctatggctttcgggttacttaagccacggagaactctatggttccggggcgggccgggaggtttgagtttgaagactggcgggaagatgtccgcagctgttgccaggccagggttctcccgagagggaggacgctgggactgtggcttgccctgatcggccgagaagagtttgccatgaatcttctgcgtcggagtgggaaacggcggcgttcagaatcaggctcagattcgttctcgggaagcggcggtgacagcagtgccagcccccagttcctctccgggtccgtgctgagcccgccgcccggccttggtcgctgcctgaaggccgcagctgcaggtgctccaggaacccgggaggccgcgggcaacgggggcagctccgccgggccatgggtcgggaggtgtcctcaccccacgggacttgcttcgttgcataccccattgggcttctactccccttctctgtgactggggcctggtgtggcaggtcactttctgttcagacatacgcgtgttttcagtgatcgcctggtattaatgttcacgtggcttctggatctttcgacctttagagaaacaacttcctagttagcttcatcccatcatctgttgggcggctcgttcctggtagtacccagtactccttacagacccttaagacaggattgttgggcctggagtacggcacaggctgttcggcgtccaggggaaggctggaagggattcgtaatgagattggttgggtgtcccgtggatgtcgacccagttttttaaaatcgttagttgtgcagtcgtcatggaactaaaacttactataaatagaaactcacctaacttagctttgtaatgcttgcatattgccctcctcccccaactacacccgtaattccaacactctttatctactgtgtattgcacgcttttttgttcgtttgaggcttttaaggaatttttattatatgcagtaaataacaatttattacttttctatacatggtcaatttctcataagattcttgaagtcaggatgtgctttaaagagcttcatttcaacacataggaattccaacacacggtgaagggctaactgtaaaactcatatattagaagtaaattaaattttaattttttc

SEQ ID NO: 3006 - DNA, 6000 bp, Homo sapiens
gtgttcttacatgttcaagtaatttagtctttttattgggattcattctttagttttactaccttcaagttggctttctgatgttttaacttagacttttgaagttatttcagttgtgctttcatctgcatctacaagtaagctatttcaactagttctttgaggcattgtggaaaaataggtctttgtcagagttccttgttaatttaagcctcttattaaaactttctcactgaagccacctgaattcaagtcagcctcatcccttgtgtgcactggtggttttcttttcttttctttttttttgagatggagtctcgctctgtcacccagggtggagtgtagtggcgcgaacccagctcactgcaacctctgacttccgggttcaagcgattctcctgcctcagcctcccaagtagctggtattacaggtgcgcgccaccaggcctggctaattttttttgtatttttagtagagacagggtttcactgtgttagccaggatggtcttgatctcctgacctcgtgatccacccgcctcggcctcccaaagtgctggggttacaggcatgagacaccatgcccggcctttcttttcttcttttctttttttttagtagagacagggtttctccatgttggtcaggctggtctcgaactctcgacaacctcacgtgatccgcccgcctcggcctcccaaagtgctgggattacaggtgtgagccatcgcccccggccgcactggtagttttcaattccagcatgtcagaatacctggggagcttttaagacatgtcagtgcctgcactccatcccagatcaattaactcagaatctccaggggtattataatattttaaaagctccctagggattctaatgtgtaccactggacttgttttagctgagagtcactggatttcaaacacaaaatctccttaattagcatctcctttgttctgagtacctcagacctaatcagtactacccttattccacgttcgttgtttattttccagctcctttctttctttgcctttttgtaaatcacttccactcacatcacatgagaaacagagttttcagtctgggtagataattctgttttagtcaattcacaaatgtagtttgagtaatttttgtttttgtttttatttttatttttgaaaccgggtcactcgggggattgcagtggtgccatcacaactcactgcagcctcaatctcctgggttcaagcaatcctctctcctcaacctccctagtagctggggctacaggcatgggccaccactcctggctgatttttaaattttttgtagaaatagggtttcactatgttgtgcaggctaggctcaaactcctgggctcaagtgatcttcccgccttggcctcccaaagtgctaggtttataggtgtcagccactgtgcctggcctaatttgggtaaaattttatttttccatataacttctgaaatttccatgggaaatcactcttgataatttatgtaaagttaaaaaaaatcagatgatgtttttgaatgtacatcaattattgttatttgggggctttttttcttctgtttttagcaatattaaactgaaaaaaaaaaccacttcgagtatggcacatcttccttaaaattctaaatattatattttaaaaacttttaaaattcataactaagttgattaaaatcagggaatcctttgtaggacagaaatgtcaaacatattctagaggattaagaaaagcactagacccaaagttttccatagtgatgcctgctgttccccctggagtctagagcatggattatgggctctgttgttcccagcagggtgagaagtaagatctaaaattctttgcataggccaggtgtggtggctcacacctgtaatcacagcactttgggaggccaagaggggtggatcacttgaggtcaggagttcaagactagcctggccaacatggtgaaaccccatctctaccaaaaaatacaaaagtgagctgggcgtggtgatgcccacctgtggtcccagctactcgggaggctgaggcacaagaatcgcttgaacctgggaggcggaggttgcagtgagctgagatcgcaccgctgcactccagcctgggcaacagagtgagactctgtctcaaaaaaaaaaaaaaaaaaatttctgcagaaagccaaaacccaagaaaggcagcactctcagtgaatgaagcagagaaatatctgtcctgcagattgagacaataaggatgcaagcctgcacaaacctgactctgggtatctagcataattctactacttacatattttttaaaaagccaaagattaaatttaaagtgatccacaattggtatgtctcccaggtaactggcagaagtatgtgtaaattttatttggaggggtttgctcagaccttgaagaatttttttttttttttgagactgagtcttgctctatcacccaggctggagtgcaatggtgttgtagcaggatgagctgcagacaaaacttctcagacaccgagttgtagaaggaagggctttattcagctgggagtatcagtgagctactatctcaaaatccaagctccccaaatgcacagtttctgtcctttttaagggctcacgacactaaagttttcgtacgaaaggatcgtggttgactgagcagtctaggggatacgtaacaggggtttcatgcactggtattcagaaagaaacagaacagggcaaggagtttcacgatgttcttctatacaatgtgtggaatctatgaataacatcagtttctaagttatgagttgatttttaactactgggttgaggcctggcaggcccaggcctggtttcgggcgtggcgccgggctgctggtctttggttttacttccttgtttttttttttttttttaaaaaaaacaagtactgagtataatacaatataaaacaatatgagagggtctctctcttcccaatatgagagggtctctctcttccctcagtgtgatcctggctcactgcaacctctacctcctagattcaagccattctcctgccttagccttccaagtagctgggaccacaggtgcaccactaggcctggctaatttttgtatttttagtagagatggggtttcaccatgttggccaggctggtctcgaactcctaacctcaaatgattcggcctgccttggcctcccaaagtgctgggattacaggtgtgagccactgcaccctgcctccttgaggaattatcacagacaaaattccaaggaacacgagtttagacacaatacagatggaaaatgcttctggtattttaatattagttattatgataactgttagcataaacatctttaatatttttgagaaatagccttctattctccattttcagagtttttctgaaaaaattagaaatgttgaacatttaaaataaattatatattttaaaatattctctaggcttttggtaggatgacataaaactttcaattcctttctaattatttttctgatttgatcatagttcacctaataataaaaacagaatagctttgtaagagatttttctagtttagccttttcccagcaaaatgctgaatttaaattgggggctatattagaacatctaaatattttctctgaatagtatttattatgtgccggcactattctaagtactttacacatattgacttactcagtcctcaaaataaccaaataggttgttacaattattatctctatcatacagatgaggacatggaggcacaaaagggttacgctgtaatcccagcactttgggaggcggaggtggacgggtcatttgaggtcaggagttcgagaccagcttgaccaacatggtgaaaccctgtctgtactaaaaatacaaaaattagccaggtgtggtggtgcaggcctgtaatcccagctacttgggaggctgaggcaggagaaacgcttgaacctgggaggcagaggttgcagtcagcagagatcaagccactgcactccagcctgggcgacagagtgggacactccgtctcaaaacaaacaaacaaacaaaaaatgggttaagcaagttgcccaagatctcacagctactaagtttcaaacctagactgactgactccagagttgcactgttaacccttaagttacactgcatctgagaaagttctttcttggctgcaatctaggggtctctctctcttttttttttttttctttttttgagacggagtctttctttgtcgcacaggttggagtgcagtggtgcgatctcggctcactacaaccaccgcctcccaggttcaagcaattctcccgcctcagcctccagagtagctgggattacaggcacccgccatcatacccggctaattttttgtatttttgtagagacggggtttcaccatgttggccaggctggtctagagctcctgacctcaggtgatgcactcatctcggcctcccaaagtgctgggattacaggcgtgagccaccacggccggcgagatctcttttatttctttaatagtactcttcatttctgcccaagcatatggcacacttcattaactgacttgtttaatgtctgccttattctctagactctttctctttgagagcaggaaccattttatgccatttcactgccatttacccagtggctagcttacagtagatactcagtaaatagttgttgattgcgtaaaaggccaagagaaaaatgtttcattcacggagtaatgtcgccatctcgtggaactttagaatattgtcatttaaatcaaaaaaatgttttcacggaaggaattgatggttcgaatgctattttccagattgtattcgagtgttttttttttttttaattggactggaccttttgagatttttagtgctctagaactgcacagcctcttcaggtcaggcttagggcctactagttttgcttggtgaaatgaattatgcaactaggtaatgaatggtcaccgttttacgttcagaactcgttcgcttctacctttacaaaagggacaacacagatgcattactaagctcttggctcataacgatccctggggtatattcagagccccttcctcgcggcgttcatatagtgtctcaggggtctgtcagccagcaatccccaattcctcattacatattcctcacaatgcatgctggctaaaatggaaattgtgttcagaaatagccctgccctaccatcatatactaggagaaaggaggaaattatgctctattagaaaccctaggctatcttgcataatgcttctcaatctgaaataattttttacagaataccaatacgttaagaagagctacttccctgatctacctattatgggcagcccattttatgaagttagcatggccttcctattcaaaccagaaatggacaaaaggagaaggaaggcttttaggtcagtatggttataactgtagattctgtattcttcctctttaatctatctctcatattaaccaaccaggaggttggaggccggaagtcttagacgccagcgagagccgctccttccccacgagtctatggctttcgggttacttaagccacggagaactctatggttccggggcgggccgggaggtttgagtttgaagactggcgggaagatgtccgcagctgttgccaggccagggttctcccgagagggaggacgctgggactgtggcttgccctgatcggccgagaagagtttgccatgaatcttctgcgtcggagtgggaaacggcggcgttcagaatcaggctcagattcgttctcgggaagcggcggtgacagcagtgccagcccccagttcctctccgggtccgtgctgagcccgccgcccggccttggtcgctgcctgaaggccgcagctgcaggtgctccaggaacccgggaggccgcgggcaacgggggcagctccgccgggccatgggtcgggaggtgtcctca

SEQ ID NO: 3007 - DNA, 6000 bp, Homo sapiens
acacactctctccactcacttattatcttaagtctaaaggtttcaagtttgatcttcatacatcttattttacatccttttaattaactttttagtcctcctgtgaattatcttaaaatttttcatattcctcattagttgaagaaaccaaaattggatatgatcctacagtgtagtttttagaagtactgggtctggtttaggtcttactctcaatgtttccataaaggttatctaataattgtcagaaatttatcattctattctaaatggctagaagagcacctctaggattaaagagaaaaaatccttttcagcaggaatcataatgcatgttctaaggacatcagaaaaatgccagctcttttatcatccctcatgtagaaattgactaaaaactataaattctagataattacagcttttaaaaattctggacagagaccatttaaaagattgagttttaaaacaaagtagtaacatcactaacatttacctttacaattcctatgacctatgaagatgtagaaaagtgtttatcacactgattttaaatccactcttaaatatccaataggcaaaagctggaagaacttagagtagccttaaaaccttagaagaaaacaatatattatgggatgaaaatgtggtcttctggggttaagggctgatatcttggatcattcttccttctgctttctgttcctcctgtgtttctgataggcaagtttcttaccctaacttcagttccaacttactttccactgcagcaaattaaaaaaactttacacaaaaactagaggtttatctgtaagggaggtactgtctgaagctattaagagtttttctctactatgaaagtgtagagggtccgatcataatcaaaagagacgaggtgacaagggggtcattaacataagctaattttaaataggagtgtccatttggtttaagtgtttaatctgacagctttctgactacggaatttgaaaatcctcgccatggaaagcccaaagaaaattaatactgttactttctttggtataccctattcatctcaaatgtgaataattgtttatttgcattttgtaacatttctaaaaatagtcattatgaacaattcttattttctcattcaagaagttccaatcaagttaagtggaagtaatattgtcactgagactgtggcatgcccaaacatcttattttcacataatctatcccatttctagctcccttctttaggtcatttggatactttattcacctgctgaaatgcctttaaacctaatatgaaagattaattagggagcttacctatatttatgaaatacttgctttggtataaagagcaaagtggacattactccatgttctttttttttttttgtcagtcttgctctgttgcccaggctggagggcagtggcatgatctcggctcactgcaacctccacctcctgggtttaagcaattcttgtgcctcaacctccaagtagctgagatcacaggcatgtaccaccctgcctggctaatttttgtatttttagtagagacagggttttgccatgttggccaggctggtcttgaactcctcgcctcaagtgatctgccaaccttggccacccacagtgctgggattacaggcatgagccaccatacctggcctgctccatgttcctaatcagctaagacctgcaaacaaaaagcagcctactcaagattcataggaagcatttttacttacaattcctctcctcgtttggctttcttgtctgaaaccagatagacagttccaaaacttccactgccaagtttttgttgaagcacgtatcttcttgcaatcaaggtctttggataagtggaaatggctgttgatccactcacacacttagctgcctcttggaatttcagcattgctccaaacaagagagaactggttcattcatttatagaaacttaacattccagtctcctaagaaatggtcaaattcatccagtgttggtcagttccttaaagatgaaaagttaaaagatcaggtctaaaggttgctaaacgatgtctaacaaaaagtgttaagtgcagtgatatctgcaccttgatcagcagactgacaccatattggttaacaacttgaaaaaaaatgttaaaaggtagagataccacaaattccagaaggcaatctttcacaggaagagcctccctttgtacattgaaatttggcagaagtgaattatagccaactttccacaaatttctgggatgtacatctgttttacaatgagcaatctcttcatttatttaagatttatactccccaactacttataaaagaatccaaatacaagaacattatcacctccttaaatctatacatctgcatcaacctttttgtaatgccctcttctcaccttatatttactttggtttacaaagagtgagttaggattaaacaaggaattagcaggtgctgtttcctttagatttatttttttctgtagatgttaaaccacagtttttgtatttattaggacagatgcaaagaaggataaggattgagaattttttcccatgctcagcaaattctagtttctgaagttcctattgtacacattgtgtataatctctctggattaaaaacaggaagagttacaaattcaattcaaacctaaaatcccatttaatgtcagtggaatataaatgctacagataaatctgtaattcctcagggagctatgagacgtggcagttatgaaaggcaggactgtttaggccgggcgcagtggctcacgcctgtagtaccagcactttgggaggccaaggcgggcggatcacgaggtcaggagatcgagaccatcctggctaacacggtgaaaccccgtctaatacaaaaaaattagccgggcattgtagcgggcgcctgcagtcccagctactcgggaggctgaggcaggagaatagcgtgaacccaggaggcggagcttgcagtgagatctcgccactgcactccagcctgggcgacagagtaagactccatctcaacaaaaacaaaaacaaaaacaaaaacaaaaaaaagaaaggcaggactgtttcatatgagtaggtacaaagtaaaatcacttttatttcatcagaatgttaaatgttttgttagttatcaagaaaagtgtgcttttgttttaaatctatatagaaataacattttaaattgaaaactgcctacaccttgaagttaggttttcatattcaacaattccaaagctatgagacaaaaacctagtttttaaggatggtcaatgggctttacgtggtggtgtccgtcaaccacaaaaactactagggcaattaaccacaaaaatcctcaaaacagaacataagtaaatgcccatttacaacattttccttcttaaaatgtatgaatcagttaagttgtacctaataccagtgagattagttaccagctttttcttttcccttccaaagacacgttagtaaaatctgctggaaaaacaactacagagcaggcctctaaatataccttttgtttttacttccccttcactgtcataaaagtgatgccgtctggccatactaagctgttcaaataaatatatggacttacagactttccagctgaaaagggtccttcaggtcactcagtaattctccttattttaaagatgagattaaggttccttttagagaaggacagaattagggacggacagaatgagaagttcacttctagcggctcttattttaaaggacagtctaaacccagcagtgcttaagtagtctggtccaggctgcagaagactctgggactaggttccctcccgcccaccctcacagactcagccctgccacccccatcccagtccacttttaggtcatccattccattagtctcctctgcgcaaccataaacctacccaagaatgtgtcgcattgtctagattctagaactatctgttcacttgacaacacgctccccctcgaggtttgagtgaacttgggcactgcgaacacatcttctttatttctgcatccccaatccctggcatacctcctggcatatactaggtgtttaacaaaccttgttaaggcaagtaagtgtccagcagatcaactgccgcccaaaggagagaaaaaaggttagttaagaaagctagatgggaacttggagaaagttactaccttgtgcaaactacccgttctcggtgaaacagatctggctgggggcaaaagacaacggaaggagtatttatcacaagttgaaaaccagtagttatcttcccaggtaataagaggaaggcaatttgtcaccagtttctgctacagcacaaatctacctttaaagtaaatcttaaccttaaggtaaaacgaacaattccttgcttcttcacctttttaaacatttacattttggcaaagcaggttaacgtttattgaggggcactgagactggagtacatccggaggtaagatgtccaggaaagcgaggagatcgcagccatggcgtcctagagattcggaacccagcccgggcagcttgaaaccattaccttccccctcgcaggggagcctggctagccccaaggaggacagttcgctttacctttccctgtcgtggtcggagcggcgcccggggctgcccaagtcttgcgggtaatcgggcaggcctcaaactaggggcaaccacacccaccgagcgccagacaccgcgggccacggctgtttggaaccgtggccagggagacggcgcggggcatactgggaagtcggggcgaggcggcaccaaggcggaagtgttcgccgacccaagtaggcggagaaagcagaggaggaccggcgggccaagctttcctagcctgacagcagccatttcggaacgtacgtcccagccctctttagctacttagcgcctctgggcccgagaacacctgctccttggctcagtctggcgccaccggcatcacggaactgtacttcccagagacgtcacaccgggagacttccgattcccgctcttgagattggactctcacgtgcaggagccagtcctcgctgggctctagcgggcttctgatggaggagctactcctctgggaggacagagtaggtgggctctgctgcaggtccgggcggcgggttgtgagggccgaggtggcacggtgtatgaaggcctgtgtttgaagacttaggtcagaccttttgcccgcctttcccctatgcagctctatgcaactgtctgtgcaaggtcctgtaatttgcgtaggacgccttgacacagtctctgcttatggacgctttacaaaactatcttgcaaagaaataagtactatacaggataaggttctgagatactgacagggctggaactagggtgagataagtgtaaaatgtaaatggatgccaataaaattcagtaatcaaggtaagttttaatgcaatctctaaaaatcaaaattatagcaaaaaaaatccatgactgacaaaatgtcacgattttaagtaatagtaacagtaccgtgctgtgccatattgaagcccgaggtgtcaaaagaaaaaccatcaattctgatcctgcgagttaagttagccaggtgaggaagcgtagctgggccagatatgcaaaataagatgatgaaaagagctcgtggttaggggtgtaactggatagaggggttcctagaggcatgaagcagttttccttataccaaaaactatgccaattaagaagggcccacaaatccaaagcctgaaagaagttccgtgactgattgtcaatacaaaagaaaaacttgatccttatcataggtcctacacaccttactttactgaagcccaaatgctttgtgattatgagatgaatatgatatcttttttttagcttaggactttttactttgaccccacaaaacaaatactctgtgctgtaagatgttgactattaccacttaagaatcaaagttcacagaacttctatactggtgtgtca

SEQ ID NO: 3008 - DNA, 6000 bp, Homo sapiens
tattggtgtgggtaaagttttaataaatcccttgtttgagactgacttacgctccactttctagttttgtacccctggaaatgtgctaaaggtagattgtcagttgtgttaccaagcattataaaaatgacttataaaattgcatctaagcttaaactatatataaatgaactataaacacctgatggggacaccatatcttggggcttccctgagtgcagtgtcttgtaagtaggatgtcccttgcagggacctagctatgtttatggaattattataagaaagactggatcctatagggaacggggcttttaagctactgaaaccttttcttctcctttatctaactgaggtataattcatatgtcataaaagtcatccttttaaagcatacaattcagtgggtttagtgtatatatatttttagagacagggttttgctcaacagggagcacaatcatagctcactacaggcttgacctcctgggctcgagcaatcctccaacctcagcctcttgagtagctgtaccaccatgcctggcaaaaaatttttttttttttttttagtagagacagtcttgttgtgttgcccaggctggtcttgaactactggcctcaagtgatcctcccactttggccttccaaagtgctgggcttacaggcatgagccatcttgccttggtttagtatatttataaacttgtgcagccatcactaattccaaaacattttcttcacccccaaccaaagaaaccctgggggtttaacagtcactcgccaatgccaagaaggctcttggactcactgcccaatgccaagaaggctcttgcactcattcactatgacattcatctcctcctgtctgagatgtgactgaagaggaggctaagaggctagttcctggtcagctgtatagcccagggaatggcactactgatattttgggctagagattctttgttatgggacactttcctgtgcactgtaagacttacaggttgtaaaatttagcagcatctttggcctctccccactagataccgatagcaaccactaccccttctactccctaggtagggacaacaaaaatgtctccaggcattgccagatgtcctctgggggacaaaatcaccaatggtgataaagctttggtgtagactgataacagtgctgggagaactctgacagaaaaggaagacctgacttaaatccactgggaagctgtggttgccgtcctacatccttaagtagactggtgccacgtgtggtctgtgagttttgtgagactgaatatttcattggatctaagaagatcccctaatgggcattgcaattgttttttttttaagttatctctatttaatgtctaaatctagttcttttatcagcatagtttcatatctatttgtaattttaaatatatatgtaatataaaaagacaacactgggatccatgagaatttttttctccttgaaaaggtggtctgggtgttactcaggtttaagcaacactaagttagactaagagtcatgttttctgtatcaaactaggcaaataaccataatgacacaaaaacctattttaaaaaaggtattcattaataaaagttaaaaaattagaccttagcatcagtactaaccttatctgaaatccgatgtagtctgagatgttgtgcctatgattagtgtctatacactttttttgcagttgtgaatttttttcctttttttttcagccacgtaacccattctattgatagctagtattaacctggtagtaataacaatatagtagtaataactgtgacgataacacagactactgaagtacagtggaaatggtagatttagagctaaaagagctaggtttgagtcctagcactgacactttctggctaagacattacctagttcactcaagttctagatttcttagctacgacatgagggcaagatagcactcaacctcatcagtttgttatagtaagtgaactaatatagaagacagcactttgtatcctgtaaagtactttacaaaaatttcattagtattacaaatacttacctcagtcaatctgcttaagtcagaatgatccttggccagttctactgcatcaatgattgaggttctgatatttttattaatcctttccacttcactgaaagctagaggctgaggaggcaatgcattccaggatgtcttgtccagatgtggtgaggcatttaaaagaagcccatagatgatttgcctgatgggctgagatattctgtgggcatttggttgctgcatgttttccacctgtgtgggaagaatggtccgtcttaggaccaaagcatcactgatgaaaggagatagctggcctttagctaaagccactaatacccattctggtaaaccaagattcaaggcatctggacagacataagtaccacactggaagaagtcctgtagcttcacctgggactgttggtattcttccatggaacagcagagaagttccttaacattttctcgatccttttttgggaggtatttcagaacattatctagtgcttcggtagggttggcaaaatgagacaaccaattcagaagtcccaggattcggtggtgtctcctccctttagaactggtagctccaagaggaagacgcgctttacttaagaatgtctccatgatgggtagattaacatggtcatttccacatagcaccgcaaagagaggtagtagagctttattcatattgctgaagtgatggcagaatgcatcaagggaaaagcatttggcagggatatagttttgtgtgcccttaatagtgttcatatttctccactgaaagctattcaatgggcaaaacccagttttcaggtcaaaaatgcaaaagtcactatctgatgataacacagggcaattccaatggttagcaagtgtcataatgtcccgatctgcttctgaaaagcactggacaaaacacacccgcagcttgatcaaaacctgtatgaatacttcccggatgagtaagggacatacgtacccactcccaccaacagaaagggaatgggccatctggatcttctctctagctctatcctttaaagttgtaagctttttatctgaaatgtcacatcctccatctaatacaacatatgggcatatattacaagcaaacagtgattcaaagaatttttgtacaacatctgcaaaagaatcatagtcccctccataccggagatccaagtttgaactgaagcaaagacggtggaaaagagcataaccatcaatgacaatttttgtgtcccgcaacttcaaatcagtgaagaactcattactatgatcttccacaaaactcattagtcctcggatacccatgatgacagtctaaagaattaatcgcctgtttaaaacaacagaaaacattttcaattgatgctagttatggggcaccaagtcattgcttccagcaccattaaatcaatagcaaatgttatgaagtgctctttagatagaacatagatatcaacatcataaattcttacctagatcctcaagcaatgttagctgtgctttttcattctcctttgctttctgatacaaggcacaaattcaatggtttcatgggttgtaatctttggatggtgacagaggctgctgctaattctaaagaaaaatcagttgaagtccattactgacacaccagtatagaagttctgtgaactttgattcttaagtggtaatagtcaacatcttacagcacagagtatttgttttgtggggtcaaagtaaaaagtcctaagctaaaaaaaagatatcatattcatctcataatcacaaagcatttgggcttcagtaaagtaaggtgtgtaggacctatgataaggatcaagtttttcttttgtattgacaatcagtcacggaacttctttcaggctttggatttgtgggcccttcttaattggcatagtttttggtataaggaaaactgcttcatgcctctaggaacccctctatccagttacacccctaaccacgagctcttttcatcatcttattttgcatatctggcccagctacgcttcctcacctggctaacttaactcgcaggatcagaattgatggtttttcttttgacacctcgggcttcaatatggcacagcacggtactgttactattacttaaaatcgtgacattttgtcagtcatggattttttttgctataattttgatttttagagattgcattaaaacttaccttgattactgaattttattggcatccatttacattttacacttatctcaccctagttccagccctgtcagtatctcagaaccttatcctgtatagtacttatttctttgcaagatagttttgtaaagcgtccataagcagagactgtgtcaaggcgtcctacgcaaattacaggaccttgcacagacagttgcatagagctgcataggggaaaggcgggcaaaaggtctgacctaagtcttcaaacacaggccttcatacaccgtgccacctcggccctcacaacccgccgcccggacctgcagcagagcccacctactctgtcctcccagaggagtagctcctccatcagaagcccgctagagcccagcgaggactggctcctgcacgtgagagtccaatctcaagagcgggaatcggaagtctcccggtgtgacgtctctgggaagtacagttccgtgatgccggtggcgccagactgagccaaggagcaggtgttctcgggcccagaggcgctaagtagctaaagagggctgggacgtacgttccgaaatggctgctgtcaggctaggaaagcttggcccgccggtcctcctctgctttctccgcctacttgggtcggcgaacacttccgccttggtgccgcctcgccccgacttcccagtatgccccgcgccgtctccctggccacggttccaaacagccgtggcccgcggtgtctggcgctcggtgggtgtggttgcccctagtttgaggcctgcccgattacccgcaagacttgggcagccccgggcgccgctccgaccacgacagggaaaggtaaagcgaactgtcctccttggggctagccaggctcccctgcgagggggaaggtaatggtttcaagctgcccgggctgggttccgaatctctaggacgccatggctgcgatctcctcgctttcctggacatcttacctccggatgtactccagtctcagtgcccctcaataaacgttaacctgctttgccaaaatgtaaatgtttaaaaaggtgaagaagcaaggaattgttcgttttaccttaaggttaagatttactttaaaggtagatttgtgctgtagcagaaactggtgacaaattgccttcctcttattacctgggaagataactactggttttcaacttgtgataaatactccttccgttgtcttttgcccccagccagatctgtttcaccgagaacgggtagtttgcacaaggtagtaactttctccaagttcccatctagctttcttaactaaccttttttctctcctttgggcggcagttgatctgctggacacttacttgccttaacaaggtttgttaaacacctagtatatgccaggaggtatgccagggattggggatgcagaaataaagaagatgtgttcgcagtgcccaagttcactcaaacctcgagggggagcgtgttgtcaagtgaacagatagttctagaatctagacaatgcgacacattcttgggtaggtttatggttgcgcagaggagactaatggaatggatgacctaaaagtggactgggatgggggtggcagggctgagtctgtgagggtgggcgggagggaacctagtcccagagtcttctgcagcctggaccagactacttaagcactgctgggtttagactgtcctttaaaataagagccgctagaagtgaacttctcattctgtccgtccctaattctgtccttctctaaaaggaaccttaat

SEQ ID NO: 3009 - DNA, 6000 bp, Homo sapiens
gacgaggtttcactgtgttagccaggatggtctcgatcttctgacctcatgatctacctgcctcagcctcccaaaatgctgggattacaggcatgagccaccatgcctggccaggcctgaatttttaaattctctttatttttgtttgcaaacaggccaattccctgagcttgtcttttgcttatctaattaaatgcagccagtagcaacccacatagaatagaatgtgctaatgacattctattttacctcctctttgctagaggagacttagtaggcctatgttctatcttccaggttactgaagacaatagtttaaacaaatgttttgctaatcagactatttctgtagcgataatatcatttgctaatttcacttctaaattgtacattcaaggccgggtgcggtggctcatacctgtaatcccagcactttgggaggtcgaggtgggtgaatcacaagatcaggagttcaagaccagcctggccaatatggtgaaaccccatctctactaaaaatacaaaaattagccaggcatggtggcacatgcctgtagtcccagccactcaagaggctgaggcagaagaatcgcttgaacccaggaggcggaggttgcagtgagccgagatcatgccactgcactctaacctgggcgacagagcgagactccatctcaaaacaaaaaccaaagcaaattgtacattcatttatttatacgtatttattcatttacagcattggaaacaaacataaaactctataactcaaaaaacctatttttagtttggctttaattttgagaaatattatctatgtagtaaaatataataataaatattcatattcccaccacccacattgtaaaagtaactattttgtcatatttgtttcctgtgttttctttcccgttctttttttttttttttttttgagatggagtttcgctctttttgcccaggctggagtgcaatggtgcaatctcggctcaccacaacctccgcctcctgggttcaagcaattctcctatctcatcctcccgagtacaggcgcctgccaccatgcctggctaattttttttatttttagtagagatgggtttcttcatgttggtcaggctggtctcgaactcccgatctcagatgatctgcccacctcggcctcccaaagtgctgggattacaggcatgagccaccactcccggcctccttttccattctataaacagataaagttgcccataatgtcaccccaagcagggtctggagagactggctctaggtgacagaagtgccagagaaacaggaaactgatcctaaatgccaggaaagtgagggaaaagttaattccctaccccaactacatttttttttctttttcttttttcttttttttttttttgagatagggtctcactctgttatcccaggctggaatgcagtggcatgatcatgactcaccacagccttgacctcctaggctcaggtgatcctcccacctcagcctcctgagtagctgagactacagatgcccgccaccacgttcagctcatttttgtattttttgtagagatgaggtttcaccatgttgcccaggttggtctcaaagtctggggctcaagcaatctgcccaccttggccttccaaagtactaggattacagatgtgagccatagcacccggtccccagcttcttttttaaaaaagtttgtaaatattagagatgggggttcttgctacgttgcctaggctggtctcgaactctcagcctcaagtgatcctccagcctgggcctcctaaagtactagaattacaggcgagagtcaccacgaccggcaaatatggaatgcttcacaaatttgcatgtcatccttgcacatgggcaatgcttatctctgtatcattccatttttttttcagtaaacatgctgccaaagtaagcaccgaaacctcagcttccgagggcatatcataacctttccctgttttcaccaaagtcttcagggaccacaaacccatatacagttagttccttgtatctgtgggttccacatctgaggaggtcaaccaaccggggatcaaaaatattcagaaaaaaaatacaatttttatgtaaaatttgccatagtagaaaaaatacaacaataaaaaaacaaaatttaaaaatacagtataacaaacgtttacatagtatttacatagcatcaggtattataagtaacctagtgattatttaaagtacatgggagtggccaggcgcagtgacttatgcctgtaatcccagcactttgggaggctgagtcaggtggatcacgaggtcaggagttaaagaccagcctggccaacaaggtgaaacccgtctccactaaaaatgcaaaaattagccgggtgcgatggcagacgcctgtaaccccagctacttgggaggctgaggcaggagaatcgcttgaaccccgggggtggaggttgcagtgagcagacattgtgccaactgcactccaacctggacaacagtgagactccgtctcaaaaaaaagaaaaaaaaagtacatgggagtatgtgcacaggttatatataaggtacttgagcatcttcagattttgttatctgtagggggccttggaatcaatcctccgtggatactaaccatttcaccctttcctgaaggactgctgttcaagcaaactttaatgtgtaccaaaatcacctgaagggcacagattgctagccctaccccaagtgctcctgacttaataagtctgaagtggagcccaagaattttcattcccccaaaattcccaggagatgccgatgctgctggtccagacactacacatcagaaccactgctttatccattttccaggagtagatactagagacagaccctctctgcttatctggagacacaagatgggagaacttgccccctagtggtgaactcttactctaaagacaggtcactcctctggtatcaagttccggctgggtaaaagctaaagggtgcattttcttcatcttcattagcagcatctatgaatctccttctcttgtgaggtctctacttggcccagaaatgccaggaatgggctccctccccggtgtggaacttcacacagagatgggcagacagcacgtgcccaggagcagtgtggtgtgtcaggaaaggcacgggcaagtgacacagtccctgaacttcactttccccatctccataacatgagacaatgatacccatctattatagggttgctgaaaagagtaaacgggaatagtgtgagcaggagtcccatgttaactgtaaagtgccctagaaatattaattgttattacagattcaggtcagatttgcaccttaacaattaactgtggtttcttttttttcccacctctagtgatttttgtttttttgcttttaaggctttcttcacccttcccccagcaataggcctttacctttgagccccagtgttaattgattctgactcatttctggtaaaaaaaaaaaaaaaaaaaaattaatgatatttattaaagcacagtaagacagattttattccggaccatcaggataggtatagcaaccatggcaatgggattctgaattaggagagagagagtgggctcaactctaaatacaccatgggcaagtgggaatttatagccaaggaacaaaaagcttggggtcactggataaaaaattactaagaaggaacttcaggagtaaaggggtttcttgctgaaaataggtcaaggtgatcagacatcaccttggatggtagaggatgaggaacctgatcagatattgagggtagagggttctaactggattttccaaggaaatgcacagataaacctacgagaaggttgaggagtctgactaaagtttggccaagcaaagaatctttgtcaccttccatcggtgtattcaaaaacttaagactcaagctgctcattactatctttaggctctaaaaagaaaagaaaaacaaaaacaatcaagggacatggcattatacttttacattagtaaatccaaagtcattttctcaatctcagcagtgaataataaaatgatcctcattagtatagtggctagattttataaaataagaaaaaatttttttaaaaaagaataaaatgaaaagaagcaacaacgaatcagttttccgctggttatcactaaggtttgcaggcccatcttatcccctctccctttgctctctgccatctgaatcttaggttcagtcccagaatctccccagtactgaggcagatgcagagaaagagaacggcgatgtccactgaaggggaggaggaggggagaccattgaagatcttgacaaagatccctttgcattagctgtgtaataagtcatcctttcttcccttgccatcttgtggctgtgttaggcggtgattctattcctgctgtgttggagggaaaccacccagtccgtagtcagaagacctggatgcagtattaattctaccacctactagccgtgtgcccttgaacccatcatttaacttcctccgtttttacatctacaaaatggaactaccactatttgcctcacggaattgttttggataataccttttcccgtgcatgcctggtataagacaggtgtaaaataaatatctattgaggaaatcctttctttccctggcttttttaacagtaaaggagtattcctggcctgtggtcctacctcttgaaccgacggcgctgggcctactcgcagcggagactaggcccgcccagcaaagccctaaacccaaagggtccggcccaagctttccctgaagccccaccgcccacagactgctcacctccacgtttgacatttccgctcttctgctgcagctgccgatggcgtcacttccaccggaaaaggcaagcgcggccgcgcggttggcgcgaaagtcggttcccgttctgggcaatttccgggttctccagcgtttgctttggggtaggggcggcgccgagtcgggggagggggctgtgcgccgggctggcgcccgaccccagccaccgccctgcggccagcgcgtcccccgactcgccgcccggagaccccgaggctccaacgaggtaagtgaggcgcggagtggggacacagctcctccccagccccaactggggttcgcgatgccttctgtggccttcaggaccctcttttcctgtcctggtaactggccctggagccggcgggtgggcctttgacgccgagaggacgtggcttccgtgatcccagagccaggccttttcctggagatgggaaccggagcatctagccttatgcagggccaagaccatgctaactggcttccatgtttatatttaaaatctgtttactgagggatgaacgtacctcgcaggccgtgggtatccgcagggacagatacactctgtgtatccttaaaacaagtgcaattgaatgtccattggcctaaagggcttagagccttcatagcagggccttcctcagtgtattcaattcgggttaattttgctgtctgatttgcaaggattggtgttgtcatcttttaccttggctttgtccaagttccaggatttcttagaaatgccgttgacgaattcacgggcagagccagaatgtctgtctttaggcattcttgtctgcacagaaaaataggtaggttaaacatgcaactttttatctaatgtggttttgttcttgttaatggttcctttattttgacagttcagaaatgtccagaaatgacaaagaaccgttttttgtgaagtttttaaagtcttcagacaattccaaatgtttttttaaagctctcgaggtaagagttgaaaacatcttaataccgtgaattcattttcttgtttttaagtgtttttgatttgttgggctttatgtcttagaagtagatatttcactttcataataattttatagtctacattaatacagatatatcattatcacatatttttgaattgatctaagtacatcatta

SEQ ID NO: 3010 - DNA, 6000 bp, Homo sapiens
ttattttttgggagataagtatgaattatatttttaaaatattattttcctatatttatccctttcaactccatgaatgtattaaactattatacaaaggatgtataaatcttaatctttgcttctatataaatatacatgtgtatttttaacaacataaattatatctatataatatataaatatttatttttagccaggcttggtggtgcatgcctgtaattccagctactcgggaggctgaggcatgaagattacttgagcccaggaaatcaaggttgcagtgagttgtgattgtgccactgcactccagcgtgggtgacagtaagaccctgtcccaaatatatatatgtatttctatagctctctcttagaatgcttttttttttttttttccaaaacgaaatcttgctctgtcacccaggctgcagtgcagtggcgtgatgttggctcactgcaacctccacctccctgattcaaacgatttagaatccttttttttaaagactgtccacctatagtggaaaaatgtaagtgattaaaaaatgagtgtccttttaaattaaaacaaaaaatttcaattagccagttttcaacaaaacaaattctactatattcaatttacttaaaaaatgtacatgtatacatatatacacactgtggttgtatactgaactttgttaaaagtcacgaacaataagcggaaagtcttttaagctatcttctatgcagtgaaaaattaagaataagagatagatatataaattgatcaatcatcatgagatcaatatctacccttttttctttttccagacttgtacaagatatggttacatcagacataaccatattataaactggatgttcggctcttgggacacatcgctggtggtgcatacaaaatatgactacttgaggaccaacaattctgcagccaagctacaaaaaagagaaaagtttaaatgagttaagaaggaaaagaccaccagtcttacaaaattacattttgtaacattcaccaattctttaccaaagttgatgaccactgtagagaaatcagcaaatcattacaagaaaaaaataaagatgactatataatttctcagagatactatacattaaacactcacacacaaaagcaaatcaaacaatgcaagctatcaaaagaaataaacttcaggccaggcacagtggctcacgcctgtaatgccagcacttcagaggaggccgagcgggggtggatcacctgaggtcaggagttcgagaccagcctggccaacatggtgaaaccccgtctctactaaaaatacaaaaattagtcgggtgcagtggcgggcacctgcagtcccagtctctagggaggctgaggcaagagaattgcttgaacccaggaggcggaggttgcagtgagctgagatcacgtcactgcactccagcctgggcgacagagtgagaccctataacaaaagaaaaaaaaaaagaaaagaaaagaaataaacttcaaaagcccctttcactgaaaactgccttactgcttacatctataagcccaatattttgggaggctgaggtgggaggatcacttgagtgcaggagttcaagaccagcccagcctggccaacatcgagaaaccctttctctactaaaaataaaaaaatcagccgggtgtgtatatacatctgtaatcccagctactcaggaggctaaggcacaagaatcacttgaaccaaggaagcagaagttgcagtgggctgagcttgtgccactgcactaaagcctgggcaacagaacaagactctgtctccaaaaaacaaaaacaaaaacaaacaaacaaacaaaaaaagcctactgtaacataattagcctttcaatcctggtcttgccaaaccaaaagaattccaatgtactcataagttgcatagtactttataatccgcaaagaatgtatgtccattaaagcaaagataaaccaaaaaatagactaccaaaggtacacactagaagtcagcaaacctttttgaggtgatcaaagacaacgccactaaaagggtcacagatataaagtgatctatcattctcctttatcttcaatgcctcttcttctgtaataatctgaagatattcttctgattggaattcttttatggactgaaagaaaaaataaaataagaatgtacctgaaattactctcctgtatttaggtcctattcaaattccatctcaaatccagccttttccctattgaaagccaccatcacatctcacttagacctctgcagaaggctcccaagtggtctctttttcccttccttgccctaaatctgttctctacacagcagctaataatcttttcaaaaacacaagtcagatcatgtcactatctgctcaaaacctaatgtcttcacaccacacccagaataaaatccacatttcttactacagccttcaagacaacacagtctggtttcctgcctatctttccacctttacctcctacttctcatctctcttgcttattctattccagccactcccgctttcttgccaaccctggaacaagccaaccataacctcatttagaggctctgctcttgatcttgcagcacagaatactttttttccaggttttcacctgacttaatcccccacttcaatcaggtctgcttaaatgtcacctccccagagatgcccatcctaatcaggctttctcaaatacccttcctctacccttctagtctattctatttaaaaatacgtatttatatatatatatatagtttttgtctctctcccctggaagtttctatgtatcttgtttgctactatatcctgacacccagtaagcactcagaaatgttctgaaccaattttgaggtccttatgttaaatacagtaatccctttaaaactgtaagtcagatcatgtttactcttctgattatcaaccctccaatggctctccactgagagaaaaatggcccacaaggccctacatgacctctttaccattattctctaacgcattccttagtactcttcccccatccctcactcactacacaacagtacactaaacttggatagagactacaggcactttcccaggggctgtataaggttgctctctctgcctgcaacattcttctccagatatctgcaaggctatctcacctccttcacgtttactcaatatctttttcttcataaagcctaccctgatcacaccctatttaagattataacccccttctcttcccaccccaagaaacatcctctggaaccccttaacgtgttttgcttttttctcttcctaatttatcatgtctgattagtgtctatgtcctcctgctagaatgtaagctctgaaagaacagaaatctttgcctgttctcatcactgataaatcccaagtactagagaagtgcctatcaaatcatgaacacttcaataaatacttgctgaatgaatgaagtttaaaaaaatctgctacaaatgcttctcaaactttaatgcacactgaagatcttgttagaaatgcagattctaagtctgggttggaggccaagattctgcatttcgaagaaacttccaggccatgctgatactgctgggttctgtgagaagcaaggatctacatcacccctactatcatccaattattatactgtacataataaaacataatttttaacaattaaccaaaaaattttcaagtatgaccagtacacaactgactcaaatttctacagcacgcaaaggaccactctggctaggagacaaatgaaagcaacttaatttccaagaactgtaggtcagccatattaaacagcaatgtgataatagacttccagccccccgaaatacataatgatgtacttagatcaattcaaaaatatgtgataatgatatatctgtattaatgtagactataaaattattatgaaagtgaaatatctacttctaagacataaagcccaacaaatcaaaaacacttaaaaacaagaaaatgaattcacggtattaagatgttttcaactcttacctcgagagctttaaaaaaacatttggaattgtctgaagactttaaaaacttcacaaaaaacggttctttgtcatttctggacatttctgaactgtcaaaataaaggaaccattaacaagaacaaaaccacattagataaaaagttgcatgtttaacctacctatttttctgtgcagacaagaatgcctaaagacagacattctggctctgcccgtgaattcgtcaacggcatttctaagaaatcctggaacttggacaaagccaaggtaaaagatgacaacaccaatccttgcaaatcagacagcaaaattaacccgaattgaatacactgaggaaggccctgctatgaaggctctaagccctttaggccaatggacattcaattgcacttgttttaaggatacacagagtgtatctgtccctgcggatacccacggcctgcgaggtacgttcatccctcagtaaacagattttaaatataaacatggaagccagttagcatggtcttggccctgcataaggctagatgctccggttcccatctccaggaaaaggcctggctctgggatcacggaagccacgtcctctcggcgtcaaaggcccacccgccggctccagggccagttaccaggacaggaaaagagggtcctgaaggccacagaaggcatcgcgaaccccagttggggctggggaggagctgtgtccccactccgcgcctcacttacctcgttggagcctcggggtctccgggcggcgagtcgggggacgcgctggccgcagggcggtggctggggtcgggcgccagcccggcgcacagccccctcccccgactcggcgccgcccctaccccaaagcaaacgctggagaacccggaaattgcccagaacgggaaccgactttcgcgccaaccgcgcggccgcgcttgccttttccggtggaagtgacgccatcggcagctgcagcagaagagcggaaatgtcaaacgtggaggtgagcagtctgtgggcggtggggcttcagggaaagcttgggccggaccctttgggtttagggctttgctgggcgggcctagtctccgctgcgagtaggcccagcgccgtcggttcaagaggtaggaccacaggccaggaatactcctttactgttaaaaaagccagggaaagaaaggatttcctcaatagatatttattttacacctgtcttataccaggcatgcacgggaaaaggtattatccaaaacaattccgtgaggcaaatagtggtagttccattttgtagatgtaaaaacggaggaagttaaatgatgggttcaagggcacacggctagtaggtggtagaattaatactgcatccaggtcttctgactacggactgggtggtttccctccaacacagcaggaatagaatcaccgcctaacacagccacaagatggcaagggaagaaaggatgacttattacacagctaatgcaaagggatctttgtcaagatcttcaatggtctcccctcctcctccccttcagtggacatcgccgttctctttctctgcatctgcctcagtactggggagattctgggactgaacctaagattcagatggcagagagcaaagggagaggggataagatgggcctgcaaaccttagtgataaccagcggaaaactgattcgttgttgcttcttttcattttattcttttttaaaaaaattttttcttattttataaaatctagccactatactaatgaggatcattttattattcactgctgagattgagaaaatgactttggatttactaatgtaaaagtataatgccatgtcccttgattgtttttgtttttcttttctttttagagcctaaagatagtaatgagcagcttgagtcttaagtttttgaatacaccgatggaaggtgacaaagattctttgcttggccaaactttagtcagactcctcaa

SEQ ID NO: 3011 - DNA, 6000 bp, Homo sapiens
cctccacctccctgtccatggaaaaactgtcttccacaaaactggtccttggtgccaaaaaggttgaggacagctggtctctattgtcaaatgctgctaaaaggtcaaaggaaagaactggtcaacagccatatgaaagtcattggtaactctggtgagaggcacttaaggggtgggagggcaaacaggacagagagtatagtatacgtaggtttagggctgagtagaaggtgtagaaatggaaccagcctggataatacatgagttactagagggaggatgtctacttggaatgctgacttcttgaatcaactcatttgttaaaatactgctatagatgtttgatttctctaaatgacctgctactctccttttattctgttctacactctcctgccagattcaagtgtagctttgaccatcactcttatatgaaatctcccagagcctctccaatacttactgaagtctgtacaaatgtctcagactactctaaatgttcccttgtaccagccaaaggggaccgtgtccctccctcagcatgctttttgttcatactgctgcctctagttagaatatattccttttccccaatttctgtctcttgaagtcctcctcatccttcaagtccaatctcagatatggtgacaccttctccttgagctccttcctgatacacctcttctttccactggagtagattgtgtcctctatttttccaatacatgctgtttatatccctgtcctggcattcactggatttcactttgctcttaattgtctatgttctcattatatcctttctgtatccacaaattgtacattacctgaaattaactttttttttttcctctgagacaggatttggctctgttgctcaggctggaatgtagtggcgagattgtggcttactgtaaccctggcttccttggctcaagccatcctcctacctcagcctctcaagtagctgggactacaagtgttagccactatgccccgctgaaactaacttcatcttcctcatttttgtgtctgtcacagaagtacctaacccaatatcttgcccaaaatgactttttgaattaaatgggatttctgaggctctattatttataaggcttgcaaatttatactgctttttagaattaccatgctatttagctattgccttccagatagcattctaatttttataatctttcttcatatgttctaaaaatagctaaaatttggtatttttaaactatttttcagatgtgttatttaagcttaaaagtatacttattttagtttttaaatgcatcagttatttaattaggttcttggtaagacatttagaacacctatttgctaggataaactccattcatcagagcaaacacagattacaggtagccctggagctaaggaatagctttgatttttggtaacatttacgagtccacaactttctaattttttttttttttttttgagatggagtcttgctctgtcacccaggctagagtgcagtggtgcgatctctgctcactgcaaactctgcttcccgggatcaagtggttctcctgcctcagcctccccagcagctgggattacagatgcccgccaccacgccaggctaatttttgtatttttagtagagatggggtttcaccatgttggcaggctggtgtcgaactcctgacctcaagtgatccacccgcctcaggctcccaaagtgctggggtaacaggagtgagctagcgtgcttggccacgagtccacagctttctgatcaaccttgcattgctccataatcttctattactctctttctgtgttgacgatgtcactttcccagtatttgggcttccatagcatcatcttcttaagcaagcattggtaagatgttttggaattttcacattgctgatttcaattttgtgatgacctctggtgtgtttcccacagaatgtgaatgaggaccagaggtccagtcacaattaacaagccactcctcagctgctccagtaaaaccaccctcttgcctttgtggtgcccagtgaggataagcagaatgatcccaggagagaagctagtttgcagttttctctgtgctgactgaagtgtttctgtttgttttttctgtggctcaacagcagctttccaggcacatctttggaaggatctaggcattttgtagggtttactttgcaaaaagtatcaccattcttgttgccaccaactggttttgtagcaatggcaagaaccttttcctttttcaagtctggactttcttctttttaattctggatttagtacccgagtacttcctcttgtacctggcctttttgacatagcagattgagaatatctgccaattcctctgataaggacaggatttccgctgcaggggggcttccctttctttggctttttagccttgaggtgtttttgtttgtgttttttgacggagtttcgctcttgttgcccaagctggaatgcaatgatgcaatctcggctcactgcaacctccgcctctcggggtcaagcgattctcctgcctcagccttccgaatagctgagattacgggcgcccaccagcacacccagctaattttttgtatttttagtagaaatggagtttcaccatgttagccaggctggtcttgaattcctgacctcaggtgatccgcctgcctcagcctcccaaagtgctgggattacaggcgtgagccaccgtgcccaaccgaagttatgttttaaccttgccactagcatcagccttcttggcttcacgtttcttctccttggtgtctggcttctcaactttttcccccaccatcttacaagacgggaaggagctattttttttaatacatgttggaatatcctggctatgcagatacaaatagtaatataacatccacccaaatataacattaaattttgattaaataataattaattcaaatcctactaaaagaaaacccttagggatacattgaagcttcatcatttcattcccttctctcccttccacaggtgcaactatcctggagttgatatctatctttgccaaacatgttttcatacttttatcaaacatatttgtatacataactcacacaacgcattgttttgtggttttaagattgtatataaatgatatgacactattatgtatacctttgaatttgctttttcaatcaatgtagttttcaggattcatcgttggtataggtagtataattcattcattttaactatgaaattatattccactttatgactttaccccctcttatttaatctttgctgtaatcttgtgaggtagacattattaatcccattttataaatgaaaaaatggaagtattaagagattaagtaactttactgaggtcatatagtttctagcagatggaatgagaacttgtgtagggcctgtaactcccaatcccatgtcctttctcctaaaacattcagtgattcattcaacaaatgtttactgaacaccacctatgtgccaggcacagttttaggtcctgggtatctgagagtgaacaaaatagacaagaccttgctctccaagagcttacactctaactggagagagacaataatatagtatgtccgggtgtggtggctctcacctctaattctagtactttggaaggctgaggtgggaggagcgtgtgaggccaagagtttgagaccagcctgggcaacatagcaagaccttgtctctacaaaaaataattagccaggcgtggtggcatgtctgtagtcccagctactcaggaggctgaggcaggaggatcaattgagcccaggctgaggtgagaggatcgcttgagcctgggagattgaggctgcagtgagctatgattgcaacattcattgcactagaacctgaacaacagagtaagacaatgtatctaacaaaaaaaagagggtgagacagaatgtgtatatatgttagtctatatgaggctctttggtgttaatttggcaaacacctgaaggaaaaagggcaatgacagagtggtgttcaaggcagagagtacagcaaatgcaaagttcttgaggcaagagcatatttggctgtcattccatcacttttttctttaagatactgtatcggttaactatcctcatgtaccaaagaacaaatgtaaacatactgcatgactttgagtgattaactacataactttgacatgtcaacaatctcttatggtggtcatctttccaataaattgagttgagctagaaaatgtgtattgccaaaatccattgatttactttaaaaattaaatcacaggttgcggatgcccgtaatggtggcatttccacacacagtactgttgctgatttgatgagacacaaatatattccaaccccattttcaaatattaaaagttggtagggtcctcaacgaaacctaacagtgacttcaagttgaaaaaaaatgcttaaaaggaaaaaaacagggagagcccaccttttggcctgtatctctcagaaagagggacaagagcggtgggaacgtgaggaacttttaaaatgtgagagcgttactctggggaaacctggagtttactcttggcctttactcgctggactgtcatagttctcacatttgtgaagcgagtctgggctggcggccctcaagccctatcctcccccgatgcggaagtcttgcttctctgtgcctcccaggcttgagaacagcagagtctggccgctcaaaacgaaagcttcacgaacgtcgctcgctcggtgctgagaaagaagcctgacgcgacccgggaaacttgaccgacgcacgcccgcccgcttgccccgccccctaacggcttcccggcttcccccgggtcctatgcagaaaagacgctgggcctggcaagcggggccagtagcggcttccgggaggagttttggcctccacacggctccgtcgggcgccgcgctcttccggcagcggtagctttggagacgccgggaacccgcgttggcgtggttgactagtgcctcgcagcctcagcatgggggaacatggcctggagctggcttccatgatccccgccctgcgggagctgggcaggtagggctaggcccagcctgggtcctgcatcctcctccgctgattccggcttgggtttcacgtgctctcccctcccctgctgcgctatggctgggatcccctaagcccccgctgcggcccttgtggagatgctccgtggctgatttgggcgcttctccctcagagtgcccgttgatagcacatggggcagtcgccacaaacctgcgggaagccggtccgtgggggagagaggcgtctgccggccctggtttaccactcaccccgatcgagagtttgcttcctgcagctggaggaagagtccctgctgatcgctttctggtcacttttctacactcattttcttctcgaaaatctttttccttagacgagggacttgacccatcagtttctgttctttgtgatcactcgtggaggaattggtttttagccttacattttgtccccaaactgcccttgaaagaaaatcaccgcttctcattttctgcaagtgacatcacttgctggaaaaggcagtttttttctttgaagtgaagtcatagtacatactgaagatgtgacctccctcgtattgatcgtccagttcccgatccgttattttagtcagaaattggagagatagacccctgggtccacaaaatctcagcgtgcacagagtgttgccaaaatttggagacaatttaatatttcatttgcaaatgcatgttgtctgtaaacctcatgaaaaccagtatcttaccacaaggagggagaggtgttgatggctctcacacctcttcaatacacaggcaggcttccctgaaccaggcctaaagactcggtagagcttgttttgctttgtttgttttaattctacactactgcgaacaagaaataaataagcttgtgctgctaccgcagttaaattatcatttg

SEQ ID NO: 3012 - DNA, 6000 bp, Homo sapiens
ccaccaccccgtctgggaggtgtgcccagcggctcattgagaacgggccatgatgacagtggcggttttgtggaatagaaagggggaaaaggtggggaaaagattgagaaatcagatggttgccgtgtctgtctagaaagaagtagacatgggagacttttcattttgttctgtactaagaaaaattcttctgccttgggatcctgttgatctgtgaccttacccccaaccctgtgctctctgaaacatgtgctgtatccactcagggttgaatggattaagggcggtgcaagatgtgctttgttagacagatgcttgaaggcagcatgctcgttaagagtcatcaccactccctaatctcaagtacccagggacacaaacactgcggaaggccgcagggtcctctgcctaggaaaaccagagacctttgttcacttgtttatctgctgaccttccctccactattgtcctatgaccctgccaaatccccctctgcgagaaacacccaagaatgatcaataaaaaatgaaaaaaaaaagaaaaaaaagaaaagagatttctttagctcacaattctggtagctgcaaagtccaagagcatggcgccaggctgttcagcttctggtgagggcctcatgctgccttatgacatggaggagaagcagaaaggtgagcaggcacgtgctgagtgaggggaccaaggaggctgacccacttcataacaacttgctctctcaggagctaatccatttccataagaacgaatacaatctcccaggaacaagaactcactcactatcttgagaatgacaccagtctattcatgagggatccaccccagtgagccaaacacctcacactaggccccacctccacactggcaattaaacttcaacatgagtttgggcgggaacaaaccacatccaaactgtagcatcctcctagactagcccttggaggtgggctgcctccacaaaaggaatgcaatttttgataaagtggttttgttggctgaagacagttgctggacagggactcattcaagagttggccagcaaccctcccagcagctgggggagtgagtatctcagtcctgaaaggtagcataccagagcatccactacacctgcattttctgatttttttttctatttatttgttatttttctagagatggggtctcagctgtgttgcccagactggtctcaaactcctgggctcaagtgatcttctcaccttggcctatcaaagtgctagggttataggcatgaactactgcactcagcctgcattttctgatttcaaaatgacactatcatccactatctgatcttttccactcctgacagctctcttttttcatttgctacccaagtcttttcctttcctagtgaccttataaaatatcatccaggccaggcacagtggctcacgcctgtaatcccagcactttaggaggctgaggcgggagaatcacttgaggtcaggagtttgagaccagcctgaacaacgtggtaaaaccctgtctccactaaaaatacaaaagttagccacgtttggcagcatgtgtctgtaatcaagtggctgaggcacgagaatcacttgaatccaaaaggtggaggttgcagtgacctgagttagtgccaccgcactccagcctaagcaacagggtgagactgtgtctcaaaaaatttaaaaaaaaacataatccagggccagaggcagtggctaacacctgtattcccagcactttgggaggctgaggtgggaggatcccttgagccaaggagttcaagactaaacatagggagatctcgtgctctctctctctctctttctctctctctctctctctctatatatatatatacacacacacacacacacacacacacacacacacacatcatgcaggtacagttttgtatcatctgtttcaaagggcaacgcactaaataaagctgtactcaacttttgaaagccctcttttaagattaaaaaacttcacagggtccaggcacggtggctcacacctgtaatcccagcactttgggaggccaaggtgggtggatgccgaggtgggcaatcacgaggtcaggagttcgagaccagcctggcaaacatggtgaaaccccatctctaaaaaaaaaaatacaaaaattagctgggtgcagtggtgcacacctgtagtcccagctacttgggaggctgaggcaggagaatcacttgaacctgggaagcggaggttgcagtgagccaagattgagccattgcactccagcctgggtgacagagtgagactccgtctcaaaaaagaaaaaacagaaataaaacaaaacaaaaaaactttacaaatctccacataatagtatcatagtagtaactgaatgaatgcccattacaataaataataaaagctattataaacttgttaaactggtttaatcatgtgaacacccacatatgtatgacacaaaaaaagataagtatttatataaggacatttcttgttctggtgagagagacaatgcttggtgtgcacacaagttcttcaactacctggattaggatgctgcctataattgtgtacaataacggagtagtcagctgaggggcaagtggagatagaaatccagcccaatctcttatcaccaagtttttcatcccaccaagggctgaatgtacctgcagaaaggtggcatttttttaaaatcaattgccaaaacaagataccactcaggtctctcttttctatttaacattaaggcacctctatgccagccctgaacctgcccagtgactgatcacaagctttgagtctggagtcagtccaagatgtggattatggctttgccacttacttgctattaacctttgttgtagtctgaatgtttgtccccacacccccaaattatagttattgaaattataactcccaaggtgatggtatcaggaggtggggcctttgggaggtgactggttcaatagagtggaaccctcatgaatgggagaaatgccttcataaaggagatggctggagaaaactagttagccctttccaccaagtgaggttacagcagtaagacagctgtcaatgagggagtgaaccctcaccagccactgaatcttatggtgccttgatcttggacttcccagccactaaaactgtgagaaataaatttatgatgtttataagccacccaatctatggcttataaacatagcagccaaaatggacaaagaccacttatccatcagcttgtctgtttttttgtttgtttgtttttgagacggagtctcgctctgtcaccaggctggaatgcaatggcgtgatctcagctcactgcaacctccacctaccgtgttcaagcgattctcctgcctcagcctcccaagtaggtgggattacaggcacctgccatcatacctggctaatttttgtatttttgtagagatggagtttaaccatgttggccaggctggtcttgaactcccgacctcaggtgatccgcccacctcggcctcccaaagtgctgtgattacaggcatgagccaccgtgcccagcccaacttgtctgttaaatgagatcataacatccccctctctgtggttgtgctgttccttcaggtagcaaatggataccatctattttcatagatcttgttttatcaactgtattgtggtataatttacatacaataaaatatacaagcattaagtatacagtttgataagttatggtaatgtaaaccggtgaccagatagataacctgtgtgttttttatactgtccagagattgtatcagactctgtggaaattacaaagtagcataaagcatccttactttggttaaacccttgattgggttaggcctgggatgtaagttctcacagccccctacttcctctgcataaccacacatcacattgtctgtcactctcctagtctgtaaagctacttgagggcatctcgagcgttttccctgctgtatctgcaggcatctaacacagtgcgtggacattctgtaagcatttgttgcaagataaatgaaaaaaacgtacaaagttaacaatggatatcatgctgagtttgtgccaaacaaaacagtcatttgaagaagacccggaacaaccttatgggttagtaattagtaaagaccagtagagaaggtggcctttgagaagggtcaggtttcaataggattaaggagcatttcagagctaaaccaagtacttggaagagataaaagcagtgggctcaggcaccagcctagcccactgtgcatgaagcttggtggggctaaacatgattatcagtcctttaacttttattgaacgccttcacttccagatttctaagtggggctcaggaattataatagatgtccacagctgcatggtcttctctctccacaacacgcagacactattagaagtaaaagccacgtgtcctcaagagggcaaggcaaagcatcttcagatgtctctgcccttaaagcacacgcgttctgctctgcgacgaagcaggacaaggaggacagggacctgcacctccggaggcccgcacctacgaagatagcgggctcgggaccttcggtggaccggcagggttccagaggcccgcgcgccgccgccccgccctcattgctgagcctgccaggtaagcagccccagcgccgtgcccgcgcgacctctactccttccgggagggtcgcgctcacgtctgaagtgggagcaatgcaccgggacagggacacctcctaggccatgcctgttccagtccagttctgcctgaaagtccggctggctcatcacctgcctaaataaaaccgtatacgggcaaactccctccgcaagcagcgcgccccagcaccggaagtgacgcgttacgtgcccgcgtattcctaccggcgtattcccgccctgcttttcgcccgccgttccgtggcgggaactgaggcgactgtggggacatcagtgatcgtaagtctcctgggcccgttattctcagattaggtgacggagctaagacttcgagaccatctcgtcctttttgtatcgcggaaacctgaggaacgagccggcggcggtgacctgcacgagaagccaggctaactggtaacctgctggaggaactgcaagcccgcttcgccttccccactcctgcccttgatgccccttgtgaggtcttccacctccttcggggccccagcctagtggccctttcatgccctggccgcgccctttggtgaaatggtggttccggacagcatcttgcaggccccggctttgggctgtattaatgtttaacagcccgaggcagggatggactaatccagtaacgttataaaaaccttggctgctaacagatattaaaaatttattttattgagcatatccccatatgccaagcaaggaactatgtatttgcatacattcttttatttaactcagttgtcctgtggaataggccttagctcctttaacagaaaaggaaaccgggtatcatagatggtaattcattcaccaaatattacggagcatctaccatgtaccaggcactgttctaggcaccagggcatgtagcagtgaaaaaaatagaattaaccggggacttttcaggcgagctaatgatgctttttatccctgaaaacagcctggaagaatgtttacctgcatgttagaaatagttaccttctgggtgggattttgtattacttttttaaatctctcatgcttttatgcattgttttgatttcttcaagtgagtgtgttatgagaaaaacagctgtttctattttaacaacagagtcccccaccttcccttccccacagaaagtctctgaaggtaggtaagcattgactctgccatgaaaataggtccctggccaggcgagatggctcacacctgtaatcccagcactttgggaggccggggcaggaggattacttgagcccaggagttccagaccagcctaggcaacatggtgaaaccctgtc

SEQ ID NO: 3013 - DNA, 6000 bp, Homo sapiens
tggtggtgagcgcctgtagtcccagctacttgggaggctgaggcaggagaacggcacgaacctgggaggcagagcttgcagtgagctgagatcgcaccactgcactccagcctgggtgacagagggagactctgtctcaaaaaaaaaaaaaaaaaaaaagaaattaaagtggggctgggtgcgatggctcacactaatcccaacacttagggaggctgaagcaggtggatcacctgaggtcaggagttcaagaccagcctgaccaacacggagaaacactgtctctactaaaaatataaaattagccgggcatggtggtgcatgcctgtaatgccagctactcgggaggctgaggaaggagaagcgcttgaaccctggaggcagaggttgtggtgagccgagatcgtatcattgcactccaacctgggtcacaagagcgaaactttatctcaaaaaaaaaaaaaaaaaaaaaattaaagtgaacacctgcttagaaagcattattattggccggatgcggtggctcacgcctgtaatcccagcactttgggaggcagatcacctgagatcaggagtttgagaccagcctggtcaacatggtgaaaccccgtctgtattaaaaatacaaaaaaaattaggtgggcgtggtggcacatgcctgtagtcccatttgaacccaggaggcagaagttgcagtgagccaagatcgcaccactgcacttcagcctgggcgacagagcaagactctgtctcaaaagaaaaaaaaaaagcattgttccactttgacaaaataagatcatgaatcttaagatgaaaagggaaaaccatttagtaaccttagtataggtaactattttggttaatgtagttacatatatacttagtatgtgttaactggttaatgccaattttttccatcatctaactgcataaaaaaatgaagacctattcaattcattgagggctaacaaaaacaacaagctgaaccaatatgaagtatcatatataattttcatcttacaacagtgatttttaagagaagctagaacaaagttacacttccaactctaagcttaggctttgtgcttagttaactaatcaaaagttctttgatccatacttttcgataaatcaggttaacactaggtaggaattatgatttttttttttaatgtcttctcttgggaatccagtatatgttataaagcagggactcatattcaaatacctgcagagattaagcagataacaagagtgaggaaggcagagtgtgatgcaagatatagtagggaccatggcaaattgaggaacacacgacctttccaaaaggagaagcagtacacaagtccatataactcctgtcatgtgagaacctgcccccagtgttgcctgatctcctgagaagctgaaaatccagaccctcctccacataattaaaaaaatctagattttcatgaggtttattggtgccaaacaaaacatataaggggctgggcgcagtgactcacgcctgtaatcccagcactttgggaggccaaggcaggcagatcacctgagatcaggagttgaagaccagcctggtcaacacgatgaaaccttgtctctattaaaaatacaaaaattagctgagtgtggtggggcatgtctgtaatcccagctactcgggaggctgaggcaggagaatcacttgaacctgggaggcagaggttgcagtgagctgacattgcgccactgcactccagcctgggtgacaaagtgagaatctgtcccaaaaaaacaaacaaacaaaaaggcaagcaaaaaacaaaaacacaaaaaacatatgagggccttactcggcctataagtaatctgtaaacattggtaattaccgaggctacattcaaccaatagttacaattacttgtggtaatatcacttagatgactgacaattttatttatttatttgagacagagtctcgttctgtcacccaggctggaatgcagtggtgtgatctcagctcactgcaatttctgcctcccaggttcaagtgattctcgtgcctcagcctcccaagtagctgggattacaggtgcccgccaacatgcctggctaattttttttttttttttttcccagtaaagagggggtttcgacatgttggccaggctggtctggaactcctggcctcaagtgatcctcccaccttggcctcccaaattgctgggattacatacaggattataggcatgagccaccatgccaggtggtgactgacaatttaaatgctaattcaagtgttgtttggacaaaaatgtatgagctaaccaaaactgaatttccagggctgggcgcggtggctcatgcatgtaatcccagcactttgggaagccaaggcaggtggatcacttgaggtcaggagtttgcgatcgacctgaccaacatggtgaaaccccgtctctactaaaaatacaaaaaattagccaggtgtggtggtgggcacctgtaatccctactatttgggaggctgaggcaggataatcacctgaacccaggaggtggaggttgcagtgagtcgagaccatgccactgcacgccagcctgggcaacagagtgagactccgtctcaaaaatagtaataataataataatactttccacctattgtaatgagaagaaggaggaacagattacatatttggatttaagtagaactcctgacctagtatttatagccagtttacagaaacttttgttttcttcacttctgtatcccagcccctaaaatggaagcctctgcttgtagagatctcagtttatctacaaaataagggagttaaactagattattctcaggtaactttagttccagggttctatgacttatataagtgggtgattttttttcaaagacaacttctaaacagaacaaagcattcctccataagttaaaaaaaaaaaaaagtgatcagtactggttagagagataatttatgaattattttaacaaagacacaagtgttcttactatttttccacccagggaacgggtttggctttcttgttctctccgctacttcccgcactggcagctactcctcgatccttggtcagcgggggtttagtactgatggatgtacctttaagaaatgcttgcatggtacttcaccctggtcaggtgcaagacagaaaaaaaaagcttttattgaaacttttattgcgaatcagcaccataggaaagcgggggtggtggtggggaaccattatgagaaagtacagcccgaaaataaacttagccttgtgcaaagatgttacataataaaggacatcaccccatgacctaggacactctgaatgcactgtactgagggctacaagaacagaaaagtggtcaaagtccctaacgaacttagaatctatttctagtgcaggagttatagaacaaagatcatatgtcacaaaaatgtttaatgagttccaaatgcattgataaatatgatgttgctaatgaccaaaccacatgggcctccatggtttctttcacagtcatgggcctagctctagctcagaccctgaaatggactcttcggcaattaaaggtgctctgcttgcaccacaaatgagaaccttcactcctttccttgggtcagaactcaaagacctttttttgttgttgttgtttttgagacagggtctcactcttttgcctaggatggagtgcagtggcggaatcatggttcactgcagccttgacatcccaggctcctgtcatcttcccacttcagcctccccagtagctaggactacaggtgcgtgccaccacccccggctaattttttaaatttttggtagagacagggtttcaccatgttgcctaggctggtctggaactcctgggctcaagtaatcctcctgccccggcctcccaaagtgctgggattacaggtgtgagccatctcgcctggccagggacctattttcatggcagagtcaatgcttacctaccttcagagactttctgtggggaagggaaggtgggggactctgttgttaaaatagaaacagctgtttttctcataacacactcacttgaagaaatcaaaacaatgcataaaagcatgagagatttaaaaaagtaatacaaaatcccacccagaaggtaactatttctaacatgcaggtaaacattcttccaggctgttttcagggataaaaagcatcattagctcgcctgaaaagtccccggttaattctatttttttcactgctacatgccctggtgcctagaacagtgcctggtacatggtagatgctccgtaatatttggtgaatgaattaccatctatgatacccggtttccttttctgttaaaggagctaaggcctattccacaggacaactgagttaaataaaagaatgtatgcaaatacatagttccttgcttggcatatggggatatgctcaataaaataaatttttaatatctgttagcagccaaggtttttataacgttactggattagtccatccctgcctcgggctgttaaacattaatacagcccaaagccggggcctgcaagatgctgtccggaaccaccatttcaccaaagggcgcggccagggcatgaaagggccactaggctggggccccgaaggaggtggaagacctcacaaggggcatcaagggcaggagtggggaaggcgaagcgggcttgcagttcctccagcaggttaccagttagcctggcttctcgtgcaggtcaccgccgccggctcgttcctcaggtttccgcgatacaaaaaggacgagatggtctcgaagtcttagctccgtcacctaatctgagaataacgggcccaggagacttacgatcactgatgtccccacagtcgcctcagttcccgccacggaacggcgggcgaaaagcagggcgggaatacgccggtaggaatacgcgggcacgtaacgcgtcacttccggtgctggggcgcgctgcttgcggagggagtttgcccgtatacggttttatttaggcaggtgatgagccagccggactttcaggcagaactggactggaacaggcatggcctaggaggtgtccctgtcccggtgcattgctcccacttcagacgtgagcgcgaccctcccggaaggagtagaggtcgcgcgggcacggcgctggggctgcttacctggcaggctcagcaatgagggcggggcggcggcgcgcgggcctctggaaccctgccggtccaccgaaggtcccgagcccgctatcttcgtaggtgcgggcctccggaggtgcaggtccctgtcctccttgtcctgcttcgtcgcagagcagaacgcgtgtgctttaagggcagagacatctgaagatgctttgccttgccctcttgaggacacgtggcttttacttctaatagtgtctgcgtgttgtggagagagaagaccatgcagctgtggacatctattataattcctgagccccacttagaaatctggaagtgaaggcgttcaataaaagttaaaggactgataatcatgtttagccccaccaagcttcatgcacagtgggctaggctggtgcctgagcccactgcttttatctcttccaagtacttggtttagctctgaaatgctccttaatcctattgaaacctgacccttctcaaaggccaccttctctactggtctttactaattactaacccataaggttgttccgggtcttcttcaaatgactgttttgtttggcacaaactcagcatgatatccattgttaactttgtacgtttttttcatttatcttgcaacaaatgcttacagaatgtccacgcactgtgttagatgcctgcagatacagcagggaaaacgctcgagatgccctcaagtagctttacagactaggagagtgacagacaatgtgatgtgtggttatgcagaggaagtagggggctgtgagaacttacatcccaggcctaacccaatcaagggtttaaccaaagtaaggatgc

SEQ ID NO: 3014 - DNA, 6000 bp, Homo sapiens
agtgaagggaccagtaattctctatctacttgtacaaaatctggtccatctcccctttcttctccaaatgggaagttaacagtagcaagtcctaagcgtgggcaaaagagggaagaaggatggaaagaagttgtaagaaggtgagtaattgtttttgtcattctttttatgtgctatatatcacagtcaagtgttatctaccttataattaaattcctcctactcttctaaaggttgcaaacaaactgatggttcaaggctaaatttgaccaacagagagagcctgtgccatattttagatgaaaaaaattacgtgttaatttggcccctcaaaagtattggagtttgctttgagaactattttagattgtgtctttctcagcttcgttatctcaaagccttatataatacaaagaagtattataaaagctacttgtaaacatttgatgaattagtaggtattgatgttaaactgttgatctaatcatagtaactgttgtctttaaatcataagataactttattttaagggtttcaggataaaaatattttgttttgcatgggattttaaaaataatatgtatccaagagtaaaaatacaatatctcagaaacgtaaaaggaggtaagacacctgaaatccagaaagaatgtgatccattgtcactctttgataacttattttaaagaactttccggaaatttcgtaaaaatttaaacttttggttatctgaaacaaaagctatagtgaaccaaacttagtaactactgttaatccctaagtgcagtatacaggtttttggcttatttcctccgtattttagaccaaatcttgtccccgtcatacctatgtttatttctgtctctattttcacacactatacacacattctttctttcactccttcacatacacactctattggattaattgaaatcacatcatcagaatattctctatacactaataagataatttggtttttgtatatgcatttaatactgtgttatacagtttggaaatgatgatcactggctgattatcatgctctttaggttaaaaagagttgttaggtaacttagttgtatatatagagaacagggatcatgcccttccttttagaaaatatgacaatttttaatacttaaccattctcaataaataatttgcttgtttattgaactatacttgactgcttctctttattgagaactttatactgtatttcttttagaaatattgtttaatcagcttatcaggaattcgggcctgacacctgtggctcatgtctataatcccagcattttgggaggccaagacaagaggatcacttgagactatgagttcaagaccagcctgggcaacatagcaagaccccatctctgctaaaaacaaaattaaaaaattagctgggcatgtggtttgtgcttgtaatctcagctacttgggaaaggtgggaggattgcttatgcccaggagtttgaggctgcagtgagctatgatcacaccactgcattccagcctgggtacagaacgagactctgtcaaaaaaaaaataataataaaggaaatctataatctatatctgaatgtttaaaattaaaatgtaattttgcaagtattagatggatattgcttttttttttttttttttgagatggagttttactcttgttgcccaggctagaatgcaatggcgtgatctcggcttgctgcaacctctgcctcccaggttgaagtgattctcctgcctctgcctcccgagtagctgggattacaggtgcatgccaccatgcccgggtaattttttgtatttttagtagagatgagatttcaccatgttggccaggctggtcttgaactcctgacctcaggtggaccacccaccttggcttcccaaagtgctgggattacaggcgtgagccaccgtgcccggcctcagattttgctttttaaattctagtaggattttctttttccggacattattaaagatttttagaaagttttcatatttgtggatggtcattttaatgctactataagaatacagggaagtaatgaatattttttcttttttcctgagaaggagtttcactctgtcacccaggctggagtgcagtggtgcaatctcagtccacagcaacctccatctcccggattcaagtgattctcctgcctcagcctcctgagtagctgggattacaggtgcacaccaccatgcctggctaatttttgtatttttttcagtagagacaggatttcactatgttggccaggctggtctcgaactcctgacataaagtgatctgcctgccttggcctcccaaagtgctgggattacaggcatgagccaccactcccagtcatgaatttttaacatcactctttgagttatgtatattagagaataaaaagaagcatatgagtaaagcaccaaaaggggcccacaagaagtctttcttgactcttgaggctagattagatgcccaaccagtatatatacacacacacatataatatatatatatacacatatatacatgtatatattatacgtatatacatatatatgtctatatatacatatatgtatatataatacatttgtgtgtgtgtacacacatactattgcaacactcatgacatggtggtgttttcataattagcgtgtagatagtcaatatatgtgggcagaaacccatgtctgtcttatttaccgttagtatttgcattagcacagcacgtgtctacatagtatgtgctttaccgatacaagtgaagaatgataatcaacaaagcaaacaatctttgatagtgagatgagaagctataataaagcttatctgtctgttgctcctgattgccttttctctgttcatctagagtaagagtaaatagaagaggcttattcaacaatattctgtatttatagaaagacattttagtaatactctttcctcttttaaaaattacaataactattgttaatgactaatcttaatttatatatacaacttttaaacaggtcaaagaaagtatctgttccatcaactgtgatatccagagtgattggaagaggaggctgtaatatcaatgctattcgggagtttactggtgcacacatagatattgataaacagaaagacaagactggagaccggataatcactataaggcaaaactttgtctcttacattttcttcctttattttattgcactatagcttaatgaaatacagccatatgagttttcagtggaactttgtgttacatagtatactttttaaaatgggaattttattagtgtttgagaagataaattttatagttttcttttttcctaggtaatacacttttgtgaagtgtttcagagacttttataggaatttgtatgcatgtgtagcaaaggtttaaataaataatttctgtacataaactgtttatatgacattcttaaaaatttgttctgagacttttagggagcgcatttctaacattttaagcagtgggtttttgtctttctcaaataacctttgagatttgttattctgagattgtgtctttagaatttgagttcttgggctgggcacggtggctcacgcctgtaatcccagcactttgggaggctgaggcgggcggatcacctgaggtcaggagttcgagaccagcctcaacatggggaaaccccgtctctactaaaaatacaaaattagccgggcatagtggtgcatgcttgtaatctcagctactcgggaggctgaggcaggagaattgcttgaacctgggaggcagaggttgcggtgagccgagatcgagccattggactccagcctgggcaacaagagtgaaactccctcaaaaaaaaaaaaaaaaaaaagaatttgagttcagatttgaatctgaagtgaagatataacttatcttgaataactcgtcgaatatgtctatgcctgaatattcttaaaataaaagtgatgttctaagaaatcataagaatgtaggaagctatatttaattactttaaagtaaattcatgttcctttgaaaaagagttttatattttttacatggcagatataagtttgtatgaggcagatgcccctttgcattatataggagagctaatagttacatcatacctcaaaaataagaaagcaagtagccatctctattttattcatcgtcctctccttctgactggttttcccctgggtatttgggtagtcacagcctatcttatctagaaaagagggaaccagataccctttattggtaattgctcccttgagtttccataaatatcaaatattttcctgaagatccagcactaaggttttatatggctatttttggcactatcaggattcctgcatcattttaagacatcttcccagaggagttacaataattatcctattaatagacaaactactaatgaatttttagtagacggagtcatcccagataccaagatttaaaataaaatactgttttcttactcagttgtattattttccttgtttacttctattatttttagtgttgattaactgtttcaatatttttaggattaaatgtttcaataacattgtggattacataggcttttatgtgcagtggtttttctaactgtagtgtattttacagtaggaaaatggtttcttagtctaaggaaacaatagtgaaatgtatttttgaaaaataagtcatttactattcttctgaaaaataaaagtagtaattcaggacagtttattgctttgtttgtagaatacctcaggaatggtaagaaaattgctgcccagcttttgttatctgtcctttgtttgtatgtgtgtatgtatatacacacaaaactgtgtgtgtgtttgtgtacataaatacatattaaaaacactttacatactcaaaagtagggaaaattctacctaatttttttttctcaatttataggggtggcactgaatcaacaagacaagcaactcaattgattaatgctttgatcaaggatccagacaaagaaattgatgaacttattccaaagaatcgtttgaaaagctcctcagcaaattccaaaatagggtcatcagcacctaccaccactgctgctaacacttccttaatgggaattaaaatgacaactgtagctctgtcatcaacatctcaaactgccacagcactcactgtgcctgcaatttcttctgcatccactcacaaaaccattaagaacccagtgaataatgtgaggcctggttttccagtttctcttccattagcatatcctcctccacagtttgcacatgctttgcttgctgctcagactttccagcagatccgtccaccaaggttgcccatgacccactttggaggtacttttccaccagctcaatccacttggggtccgtttcctgtcaggcctttgagccctgccagagctactaactcgcctaagcctcacatggtgcctcgccatagcaatcagaatagcagtggttctcaggtgaattcagcaggttctttaacttcaagcccaacaactacaaccagttcatcagcttcaacggtgcctggtacatctacaaatggcagtccaagttcaccttctgtccgaaggcagctttttgtcacagttgtgaagacatccaatgccaccacaacaacagtcacaaccacggcaagcaacaacaacactgcacccacaaatgccacatatcctatgcctactgccaaagaacactatccagtatcatccccatcttccccatcaccaccagcccagccaggaggggtttctagaaacagccctttggattgtggatcagcatctccaaataaagtggcatcttcctccgaacaggaagcaggtagtccaccagtagtagaaacaacaaacactagacctccaaacagcagcagttcttctgggagttcatcagctcattctaatcagcaacaacctccgggatctgtttctcaggaaccaagaccacctcttca

SEQ ID NO: 3015 - DNA, 6000 bp, Homo sapiens
gttttttttctagtagtttatgtgagtgggcaaaatcattaaatttttcctaccaccagttgtcagtccttgttttgtttgaatatatagattttgaagcctcaccattccctaagttaaaaaattgataggaatgaaactcctttacaaggagttttctattaaagttttacatgaagggaacaaacaacaaagtgttaagtcatgcaaaacagagttgcttgcttgtcagcacatttctacatatttttttgttttgattttctttttccttcttcaaggaaaccaatgctggtcctaaataaaattgtcaattttggaagattctttcattcaatctaggtatttactgagcttttttgtcctttaccttctttttatgagaggtttcactcttcattttggatatttgaacattttcagtcaatattttcttttattattttaaattatttttatatgtttacatttgtttgcatagcttaatatgttaattgctatttacactttaatacttctgttggcaaaataatgaaaagtcttgtgccattgaaatccattttagataaatgggaagacaattttcttgcctataaaattaggttgaggctgggtgcggtggctcacacctgtaatcccagcactttgggaggccaaggcaggcggtcacttgaggtcaggagttcgagagcaccctggccaacatgatgaaaccccgtctctactaaaaatgcaaaaatgagccaggcgtggtggtgggcgcctgtaatcccagctactcgggaggctgaggcaggagaatcacttgaacccgggaggcagaggttgcagtgagctgaaactgcgccactgcactccaacctggagtgcaaagcaagactccgtctcaaaaataaaattaggttgaactggaaggtggcttgtttttaggatgacaggttttagacaaatatgtataaatttctctttatatccttttgcccatggtatcctgcagtgacataggtaatcatattgatgaaaaggactggaaaacagaattaaaggggatacattattttgctatgtaacaaataactgcagaaaatctgaaatttagattctgtttatattcaatacttctaatatcttatttcagtgatccagtgacctaaagatagagtaaaagaacaaatgcttttgttagaaattgtggcacgtgcctgtagtcccagctactggggaggctgaggcaggagaatcacttgagcccaggaggtggaggttgcaagttagccgagattgcgccactgcattccagcctgggcgacagagcgagactccacctcaaaaaagaaaaagaaagaataaagaaattactactattgggccaggtgcggtggctcacgcctgtaatcccagcactttgggagtctgaggcgggtgaattacgaggtcaggaattcaagaccagcctggtcaacatggtgaaaccccgtctctactaaaaatacgagaaattagctgggcatggtggcaggcgcctgtaatcccagccgctctggtggctgaggcaggagaattgcttgaatccagaggcggaggttgcagtgagccggggttgcaccactgcactccaccccaggcgacagtgcgagactccgtctcaaaaaaaaaaaaaaaaaaaaaaacagaagaaaagaaattattactattagtagcaataatttaaaaggtattaggatactgtagtggatatcagacaattctcttatctgtgaatttgttcatttaatcaaaaaatgctggcgggcgcggtggctcacgcctgttatcccagcactttgggtggctgaggcaggcagatcactaggtcaggagatggagaccatcctggctaacacggtgaaaccccgtttctactaaaaatactaaaagttagatgggcgtggtggcacgcgcctgtagtcccagctactcgggaagctgaggcaggagaattgcttgaacctgggagacggaggttgctgtgagccgagattgtgccagtgcactccaacctgggcaacagagcgagactccgcctcaaaaaaaaaaaaaaaaaaaagcttaagagcctgctctatgccagagtgctggctctaggtatgcattggtgaataaagtgttgcctaatttcttttttcttttctttcttttttttttttttttttttttttgagacagagtcttgccctgttgcccaagctggagtgcagtggcgtgatctcgactcactgcaacctccacctcccgggttcaagcgattctcctgcctcagcctcccaagtagctgggattacaggcgcccaccactacagccaacttattgtttttgtatttttagtagagacagggtttcaccatgttagtcagactcttctcgaactcctgacctcaggtgatctgcccgcctgggcctcccagagtgctgggattacaggacaggcatgagccaccgcgcctggccaaagtattgcctgctttcaacagtgttgcctgcttttttctagtctttaagggagacagataataaatgatagccataattctgtgagaaagccataatcacatatgtattgttaaaaacaacagtaaatgtcagaaaacagaagcaccccataatcctagaatggaagagaaggggagagtgaaaggttttattaactttagtcttaggggcccccatttcttgtcagataaaggatttggaaggcctattcttggtttatggaaaaggagagtgttccagcatacgttccttgaactcaaacctatcattgcttgatagcattagaggaaaatttgaggaagggaaactttgttgacgacttgttttaagtctaaagatggagcagtttatttgaagcatagaaagaattgacctgggaggcaggaaataacaaaagccagtttgtagtttctgtttaagccaggtctcaacaatgtaaattactttgagcagcctttaaatgccaggcatacccatacctaaatgtaaacactaggtatggtatgaggtaaaacatagtgtcatttgtttgccattaattccacataccctttgcaatcagttctggatttgcatctggatttgactctgcatataactgtgtgccctgtctgatacttggttcccttattcgtaaaatgagattatcacagggaagaagtatagttgatgattctggatatggactccagtctggtgcaaactgcctgaattcagatctcaactcttcaacttaattagcttagcttgaaataattgggcaagttgcttaacctctttttgtcccatttccacatacgtaaaatggggataataataatatgttttaggattactgtgaaaattaaatgagttaatatataaaaagcatttaaaatggcatatagtaagcaaaatgtagtttaaaaatatgacatagctgggttgttatgaggataaataatatgtttatttttttaaaaaaagaaatcatatattgcttgacacagtatgggtatttcttaaataccagaaaccgtgtagtaggtactttatatcatttaatcttcatataaactgttaagaaaccataatctgtctagttgactgcacctagagcagtttctgatatttcaagttgaatgaatattatcccatttcatgattaataaattgaggcccaagagtactccaaaatcaccactaaaacatgacatcactttgaggagatagtaccagcaatgtcatgcacatcatcacatcacttttctcagtttagagcataaaacattgttcctttttgtttttggagacagtctcgctctgttgcccaggctagggtgccagtggcacaatggcaacatccacctcccgggttcacgtgattctcatgcagccacctgagtagctgggattacaggcatgcactaccacgcccagctaatttttgtatttttagtagagacggggtttcaccatgttggccaggctggtcttgatcgaactcctggcctcaaatgatctgctcgcctcagcctccccaagtgctgggattacaggtgtgagccactgcgctcggcccattgttcctttttcagtgcattttttcatattcaaagttgtataaggaagaaatttgacaatctaacaagttttactaaatggaagatcaattacaggaatgaatataatatatattggctccactgtcactcactcactttatttgctgtttgatgatccagatttggtgtctctaaatttcatttatctaggatattttagtctcttagagtatttattgtaagagaaaaaggccatttctttggttagtaaatgaagttaaaggcactactagaaaatgcatatatcaaatattatagcttgcttcagtaactgtaaattagttgaatgttaacctggttctcataagtatttacaagcagattagtttataaaaaccaatttactattaaaaaatctacattaggataattatttttgaaaccctgaagtcaactgtaatatgtatgttatataatacatttgcctgatgtagcaaatttctaacttggcattatcatgcctccttctttgcgtctttaatacaaccattaatctcactacaaggctttactaaggataaattgctgcgtaacccacttcaacctcttttgttcaaccaggaagccagacgtgttaaatagctttttaaaaaatatgttatttcttttttgaaattttaggattttaaaaattgaagtggtaaaataagagactttattttgtctgttaaaattacttgacagaagtttgctttggaatagagcttctgtatctttaaaaaatacacagtgagtcaccccctgctcttttggtagatgcctggctagtgaacagctaagctgctttaggcatgtaatagaacattccatttcctgttcccttgctgacacagaggagtgttcctgctggcaatgatctaatcatagtgcagtaagaaacatggcagtttgataaaacatggtggagacagcggctgaaatggaagcatatgttctagaagacattcttgaggtagggctaggtttgtaagtgaaatgaaagttgaaatctgaacaaagaaatcttatctgccggaattattttacagatgaatagattagaggagagagcaaagagaagcagagcataaaagcaagacacggtcagacctattccgtgtgagaatgtttcagactggttcacatgattactatagacgtctataattattttgtttaaacttcatgtttcataaattgtagatatatgtttgttagggaaaaaggggagactcaggcttaataaaaagccttgtgctggtggtgacctttagattaactcattagaaggtggggtctgcaaagcagctttgagtaaggtttagtatcatatgtcttagaattcatttacatatctaagcctaaagctttgctgcagttaactattaaaaacggttattttagctttaaactaagcatgtttatatcaatctgattgcttaatttagctggtatactctggtcctagatttttcatgtgactttgattattataaaacaaattattaaattaaaaatattaaaaccctgaaatttagggcactgatgctagagagacatcaatacaaaattactataatttgaatcatgaacattttaaattatattttctcttttctggttgtaaaaattttataagatcctatttgagtataaatcagtccaaggaaatacatgtcaaagtgaaactataattgcttttggcattgaatgtagtatactattagaaatttgtatttataggtataggtatttaaatctcatattcttatctgtgggattgtgtagggtttttcttttttttcctcattagataaaacctgggtaattcagataaagaggctttatggtggtgagtggtattcctaatacttagactgttgagat

SEQ ID NO: 3016 - DNA, 6000 bp, Homo sapiens
gaacgattgcatctggagaaagagggacaggtctttattagggcacgctctgaaatctcagtggcctaacacaaaagaatgcgtatgagctgtagcacaagtgtccctaattggcaagcaagtatcctcccagtgaagagtcaggaaactctagcacaagtgtctctaattgggaagcaagtatcctccaagtgaagattcaggaaaccaggagtcctatcttgcggctttgccatctttaacacatagtttccagtgcaaatttgctcatctgcctcaagttgatggggagtgggatatattggattgctcatgtgatgtttccataggccagagctggaataggagtgcatcacttctcacattccactggttagaacctaatcagcacacctaacccatatacctaattgcaagagaggcatggaaatatagctgtgtggccagaagaatttagcatttgcaagaatctactattctgatcactaaacatgtattttacctgtctttccacacacagaacataccctgtcccaaaggagacaatctaaagttttaaccagttactggaacaggctcaaagtctaggattttcagaaaatgtgcagttctcttcattaggtacagatgtgacctaagaactaaaaagacaaattatctttattgtcacccccatccctgcaaacccaatatatagtggtaactcagggacagataactataatacattctctcattcagaaaaaaaatgtgatactgagcaatactattcatgtataataatgatgaaatactgcataaacattttgcggcccatctccttgaaactgaagaaagttctgatgaaactccaattctagtcttcaggagaaactccctgtccagtctttagtacagctccttatacgagcttctgaaatgttctttttttgtccatcattctccatggccacatcctgtgtgggtactggggagctgttaaggttttatgctctatttttctacttatgcaagcttggggttggacagttaccctctgttttaacacccgaacaatgatatttgagccagatttagtatgattaataaaattcctctaaaaatgtagtcttctgattgatttgcttctggtaactacacccaaagttctttcttacataattatcaagcctaatttactgctttgctgccttgctcctatgccagttcctttagacctttatcgtagctatcttgaagccatctaaaataatgactttgaatggaaagaccaaacccttttcctgatctttgttgcaggacttaatctcaagggtaactatactcaagacctcttctagttttttttttttttttattagaagtcttataaaagtcaacttttccaacccttcctgagaaatattcctgtacactctcacttctgtgaagtatttcctgagtttctctctttagtaaaaccttactaaaagtaaaatgtaaaattcaacacagtattacttttgctcttttcaatcatttcctctggagctaatctaaacagataggtgatctgattttgaattatttcaggtgacagttttactaattactttgccactgcaaacatgggcctcctttttctagcctccaaatcacattctctaccacctgctgcatcataaataagctgatgtaacatattttaggttattgttttagcagtactccacttcttgtaccaatttctggactagctatggtcattctagctcctatacatataaattctcaaatctcaattttttctcttacagtaagtgcaaaaaggggtgtttctaattggggtggctgtcttccaagtactgtttcagccactcattcttctcttttctggctttggcatctccaatacatagttttgaaggtcaccatgctcaaaggcatcaagttgacgaagaaagagtaagggagaataggaggacttcattaaccctaaaaatgagcacatcatttccattcatatttaattggctagaagttaatcacggccaggctcggtggctcacgcccgtaatcccagcactttgaaagccgaggtgggggaatcacctgaggtcgggagttcgagaccagcctgaccaacatggagaaaccgtgtctctactaaaaatacaaaattagccgggtgtgatggcacatgcctgtaatcccagctacttgggaggctgaggcaggagaatcgcttgaacacgggaggcggaggttgcggtgagctgagattgtgccattgcattccagcctgagcaacaagagctaaactctgtctcaaaaaaagaagttcatcacatgactataaccaactacaaggaaagctgtgaaatttagtttagctgtgtgcccgggaagaagaaataagtttcatgggctagtcagtccctgccagaggttctaacggggggaaaaaaagataaaaataaaagaaagtgactttacatgccttgtccattttaatagttttgaaccttatcctactagtgaaacaggatcatcatttcactattatattaaagaacaaaaaactcattttcttccaaacaatgagattactttaaagagagcatttttggtagcacagcacgatagacacagagactagactgcagagggctgacaagtcaatttcagaaaacaaaaaagacactgattgtagacactttttttttgagatggagtctcgctctgtcgcccaagctagagtgcagtagcaggatctcagctcactgcaaactccgcctcgcaggttcaagcgattctcctgcttcagcctcctgagtatagaatactttttaaagaaagaaagtttgcttgtgaaggaaataattgaaagctacagaagaattagctaaggaaccagaatttgtagaaggttgacaacagaaaagataataaatgcatgagaaagaggggtattggaactagaatatgtatgaagagtttatctcatatatgaacagggagtctctcattcgttgatactggagaaaaggcaatctcaggaaatttctagcacttggaaaattgtgaagtctaagttaaaagtcatataataaaatgggctgggatttaaagattgcgaaaagtattcaagtggaaagggagaaaaagatgctgaagaatatacaaagtaggagggagggatgcagctgaaattataaaatctaaatcagtagtggtgagatacacaatgcagtgctctgttctacactggaactcagcaacgactgtaggagaggaataggcagatggttaccactccgtatatatatttactatagcacttattacactgtaaagcccctggaaacaagagactttgattccacaaattatgcgcacagtaggcacatgatgaatttttgtttgaatgaattgatttagtcattgccaattctgccttggtactctgtagagtactggcaactgcccacatttcatatggtatgccaatgctaaaaagaaaaaaaatgctaaaaaaaaaaaaaatccaggcatattcagctaaactaagcagtcttaaaatggcaactatgtcagctgagacatacttttaatcttgtgccagtacatctgtctttgatgtttgcttcattttccgtatgccactatactcctactagaccagaaagggataattctgagttcaatgggctccactatcatttcaaaagtcctgaaacttcttcagacacctaaaaatgaacccacaactcccataacagcattccttccgagagaagtatacagacaacaatcactatttatgcttgcttccaagctgaatcgaagagggccggaagagctaaatcagggtcattcagtgaatcgtctacaaagtctggcacagaccacgcatccttcccgtgtcttcctccccttggaaacttgaggtgtaagtaatgatcttagacatctcctaatcgactgccttcatattacacacgtgtaaactcaggtagaggatgtctatgagccgagcttaaactcaggtaaagaaggctcttttcccaacacgacgccatctctcatgatccaaagctctatctctcgatttggcggtggaaaaaaatgaccaggaataaaactacgtacagcagtccagaacgaggccccacctcccggatctggcggaccggcctcccgtcagcaaagtgtctggaccgcgcttccgcacctcacactgcccggggccggctcctctccagcctccccgtactccccacacgccgcagcactgcgcgcccgcggggccccagacccggcccttgaaatctcactttcgcctttcggccacccgcgcgccacggctcaggcgacggctgatggcgtcactgcacttccgcctgcggctgcgttctaatcacaagccaggaaggaagaagggagggctgcagggctgtgtgtgcgggaaatagcgaggaaagagaagaaatccgggagctcgcgggcgctctggttgcaatcgcgcccccctcatctgtccccgccgttccccttcggaagctgccccaggcacacttccccgcttctttccagtctcctctcctctggttctcccgacacccggtctccctgttacgcctcaccctccttcccttgctccctccctctccctccctccctccctcccatcgtcaggctccccgcccttagtatcgcgagacgaggtgagagctggcggagcggcggcggcggcggcggcagtagaggtgaccgaggcggtggcggcggaggcggcaccgattgctgtgtcggccccagtgcggccgaagtcgcggtagagcgtagccccacgcccctcccccgtccgcgccctccctctttccctggggatggagaaggcgacggttccggtggcggcggcgacggctgcagaaggagaagggagccccccggcggtggcggctgtggcgggcccccccgcggcggcggaggtcggcggcggcgttggcggcagcagcagagctcgctcggcctcgtctcctcgtgggatggtgcgagtctgcgacctgctcctgaagaagaagccgccgcagcagcagcaccacaaggccaagcgtaaccggacttgccgaccccccagcagcagcgaaagcagcagcgacagcgacaacagcggcggcggtggaggcggcggtggaggcggaggtggcggcggcggcaccagcagtaacaacagcgaggaagaagaggacgacgacgacgaggaagaggaggtttctgaggcaagggcctggtttcaaaggaaggagggaggaagggactgtaagggataggggccgaaggtgggaggggatttggagtgggacagattccagtgggttgatctcttaggggccaggctttcgactgccccctttcttccctcggcctaaatcgtgaggtgtgggaatgtgggggagggtagctgacacgtgggggtgggaggaccacggagttcacagagttggtgaacagcctgttatcatgggatggctcacttggttaaggatggagggaattggttagattccctgtttgcacgccggggggtgggggggtggtctgcctggggccagtagggccaccttagtctgaggcgggatcgggatcaaagcgggaggagtaaaataatgggtaaatgagtctcttggggaccaactaggaggttgatcaacttctcccagttgtgaggtggaggggagcagtttgaggggggacgtaaggttgtaatggactcagagctaagtgtttgtgtatgtgagggacacgtgagaagctgtacttttccatactgttctgcagggtttttcgtaactatcctggctgctgaagtaacttcatttcctcgatctcccagggattttcgatgaactgatgctgtatttgtataaatttatcagtaactttaaataattacaaatgaccatatacatttgtaagtggatgaaaaatatatttgatccttacacgtacatacat

SEQ ID NO: 3017 - DNA, 6000 bp, Homo sapiens
tgtaaacagatcctccctggccttgcaaatcctttcaatactaagtcagtactaatttatttaccggctccctttgtctaaaatttcttcactaggtttatctcttgatttagtcacaggttacttacaaaaacagatgaaattctgatcaactcctactgtatttatactttaagcatcttcaacaaaaatgtttctccccctttgaattctgccttagaaaatactaagattgcagtgcgcagtgtggctcagacctgtaatctcagcactctgggaggctgaggccagtggatcacctgaggtcaggagttcaagactaccctggccaacatggtgaaaccctgtctctaataaaaatacaaaaattagccaggcctggtggcggatgcctgtaattccagctactcgggaagctgaggcaggaaaatcatttgaacccgggaggtggaagttgcagtgagccgagatcagactgttgcactccagcctgggcaacaagagcgaaactccgtctccaaaaaaaaaaaaagaaagaaaaaatactaagatcattcagtcatattcaaaaatgcattcaatagaatgcaatgttatttctaaaataaagtatcaactcttgaaattataagatttttttcttgtaatagtcaaaagcaatttaattaattttgtccactaatttgaaagagcatcatggcttttatgttagaaaatatatttgtattttccatattggtcagtcactcactgaaaaccaagaaaattatgcattttcaattttaaatgtaagattttgtgtcaaatagatggggagagggaggcaagtagctcttggtcttatttgtttccaggtatacccgaagttatgcaaattatctaagacgtgattaccctattctgaaatactttaaagtaaaatcctattctcaataacctactccaatgtctagaaattatattcttattgttcaacaattaaatgaagctcttatttgaattgattctcgtttccttccatttttcctcttttggcagatacagagattattcagatagcatttctttatagcaaagctatgtatttttgttaaattaaagttatcctttcaggttaaataccacaaaaccataacctttcacattcctttttaatcttttgatgatttttactggaaggataattttaaagatcattttatctacttttttttattgtgtagcctataacagaatgaattagagaaaagacaacactgtgattttagccacaagacttcctagctccagaaagttaggcttctgctgacatgtcagtaaaatggtaattaagagaaaaacattacacaactcacccatttagcttacagttttatttgtctttactttgatcaaaagatgaagatggggcagagacaatctgtactcctttttgtctgctcatccctcatctgtatagattttttaaatgggtacacttttttttttttgagacagagtctcgttcttgttgcccaggctggactgcaatggtgcaatctcagctcactgcaacctccacctcccgggttcaagcaattctcctgcctcagcctcccaagtagctgagattacaggcatctgccaccacactcggctaatttttttgtatttttagtagagatggggtttcaccatgttggccaggctggtctcaaactcctgacctcaggtgatccgcccgcctcggtctcccaaagtgctgggattacaggcgtgagctaccacgcccggccaatgggcacactttcttacacgtatttctcctgactcatcttcataaatgacaaacccattgtttaacaccatgtaaaagacaggataaggtatgttaaaaacatagaaatactaccatagttggtgaaagtcaacataaccattcctatattacaaaaggaaaacaaacctgacccacaaaataaacatacctacaaacttacagccattcttcatgatttaaggaattactaaaagttctgcttattaggccgcattccaatggacaaaactacctaggtatgttaagtttgcagcagaatatcccagtaagtactgcattcaactatcataaccttgctctaaaccagagcttaatagtttcacgagaatttaaaattttaagtaatggtattttgcctatagctgcatgattgtgttaccttgctattcagtaactatttttctgaatgatatcaggagggtgataaaaggaaataaattattattaaaaagtgtacaggtctgagacattagaaaactttgatttgtacttttgctactacccaccacaaccactttcctctaaaccttgttttcctcctttttaaaataaagggctgaattacctgtaaaatgtttctcacctttgagaagaatcatacaattgaatgattctaagtaccataacaaattttattagggataaggaccccattacatctttctcttccttgtttcaaatgccgccagagcaacacactatcctaaacatccaagtaggccaatataagtctatcaatacaaacctattctcagaatccaacaggctaaaagggaataaaaacaaggactggcatatttttgtcatacatacttcagcacttaatatctctacctatacaacttcatccagtctgagataaaagagaatctggtcttctacaaatagacatgtgtcaaatcctttaaaaggtacttctctatttcaacagagaccaggattcaataattccaattttcggaaaaccagacttgcatcaaaataagttccatgtttgtggaagagaataaatagtaagtggtacttttagatgaatcacttggtctcctcttagaactaagtttaaaatcagcctttaaagctgttttccctctgctgataaagatttccctctccaaataaagatttttctagattctatttcaggaaggagacaagagagtggtaaaacagctaataactagtaaagctaactctcagttggttgtcagtatggtatgttttactgagcctttgggttgtaagggcttctgtgaggaataaggtcctgcaacgccgcctgtctgtggacccaggaaaaattataaagttattatgaaaccagatcactaggacaaaccgagaggccttcctattccaactcaccacaaccaggcctggctccaaagcctaccctttggctgtcccatattacgggacaacaggtcctagcttaattctaactcactaaggaaacattcgaaggcatgtatgtatgtacgtgtaaggatcaaatatatttttcatccacttacaaatgtatatggtcatttgtaattatttaaagttactgataaatttatacaaatacagcatcagttcatcgaaaatccctgggagatcgaggaaatgaagttacttcagcagccaggatagttacgaaaaaccctgcagaacagtatggaaaagtacagcttctcacgtgtccctcacatacacaaacacttagctctgagtccattacaaccttacgtcccccctcaaactgctcccctccacctcacaactgggagaagttgatcaacctcctagttggtccccaagagactcatttacccattattttactcctcccgctttgatcccgatcccgcctcagactaaggtggccctactggccccaggcagaccacccccccaccccccggcgtgcaaacagggaatctaaccaattccctccatccttaaccaagtgagccatcccatgataacaggctgttcaccaactctgtgaactccgtggtcctcccacccccacgtgtcagctaccctcccccacattcccacacctcacgatttaggccgagggaagaaagggggcagtcgaaagcctggcccctaagagatcaacccactggaatctgtcccactccaaatcccctcccaccttcggcccctatcccttacagtcccttcctccctccttcctttgaaaccaggcccttgcctcagaaacctcctcttcctcgtcgtcgtcgtcctcttcttcctcgctgttgttactgctggtgccgccgccgccacctccgcctccaccgccgcctccaccgccgccgctgttgtcgctgtcgctgctgctttcgctgctgctggggggtcggcaagtccggttacgcttggccttgtggtgctgctgctgcggcggcttcttcttcaggagcaggtcgcagactcgcaccatcccacgaggagacgaggccgagcgagctctgctgctgccgccaacgccgccgccgacctccgccgccgcgggggggcccgccacagccgccaccgccggggggctcccttctccttctgcagccgtcgccgccgccaccggaaccgtcgccttctccatccccagggaaagagggagggcgcggacgggggaggggcgtggggctacgctctaccgcgacttcggccgcactggggccgacacagcaatcggtgccgcctccgccgccaccgcctcggtcacctctactgccgccgccgccgccgccgctccgccagctctcacctcgtctcgcgatactaagggcggggagcctgacgatgggagggagggagggagggagagggagggagcaagggaaggagggtgaggcgtaacagggagaccgggtgtcgggagaaccagaggagaggagactggaaagaagcggggaagtgtgcctggggcagcttccgaaggggaacggcggggacagatgaggggggcgcgattgcaaccagagcgcccgcgagctcccggatttcttctctttcctcgctatttcccgcacacacagccctgcagccctcccttcttccttcctggcttgtgattagaacgcagccgcaggcggaagtgcagtgacgccatcagccgtcgcctgagccgtggcgcgcgggtggccgaaaggcgaaagtgagatttcaagggccgggtctggggccccgcgggcgcgcagtgctgcggcgtgtggggagtacggggaggctggagaggagccggccccgggcagtgtgaggtgcggaagcgcggtccagacactttgctgacgggaggccggtccgccagatccgggaggtggggcctcgttctggactgctgtacgtagttttattcctggtcatttttttccaccgccaaatcgagagatagagctttggatcatgagagatggcgtcgtgttgggaaaagagccttctttacctgagtttaagctcggctcatagacatcctctacctgagtttacacgtgtgtaatatgaaggcagtcgattaggagatgtctaagatcattacttacacctcaagtttccaaggggaggaagacacgggaaggatgcgtggtctgtgccagactttgtagacgattcactgaatgaccctgatttagctcttccggccctcttcgattcagcttggaagcaagcataaatagtgattgttgtctgtatacttctctcggaaggaatgctgttatgggagttgtgggttcatttttaggtgtctgaagaagtttcaggacttttgaaatgatagtggagcccattgaactcagaattatccctttctggtctagtaggagtatagtggcatacggaaaatgaagcaaacatcaaagacagatgtactggcacaagattaaaagtatgtctcagctgacatagttgccattttaagactgcttagtttagctgaatatgcctggattttttttttttttagcattttttttctttttagcattggcataccatatgaaatgtgggcagttgccagtactctacagagtaccaaggcagaattggcaatgactaaatcaattcattcaaacaaaaattcatcatgtgcctactgtgcgcataatttgtggaatcaaagtctcttgtttccaggggctttacagtgtaataagtgctatagtaaatatatatacggagtggta

SEQ ID NO: 3018 - DNA, 6000 bp, Homo sapiens
cttcattcttgaagtcagggagaccaagaacccaccaattccggacagaccagtaccagtccatggcctgttagaaactgggtgcaaagcaggaagggagcagtgggtgggcaaggaacaaagcttcatctgtatttacagctgctacccattgcctgcattcccacctgagttctgcctcagctgcaacattagattctcataggagcatgaaccctttgtgaactgcctgtgagggatctaggttacccattcctcatgagaatgtaactaatgcctgttgatctgaagtggaacagtttcatccccaaaacatctgcatcctcaactgaggaaaaattctcttccacaaacaagtccctggtgccaaaaaggttggggactgctgctttaacacatctctccctctcacttccttctccgtaattcccattttaaaggtgaaaatagaggcacagaaatgttaagtacctaatccaagttacacagctagtaaatgtcactgctaggagttaggctgcacagttcatgcactaactactacaccatgaagatgaaaaaactgaatcattctggactagtcaaatttcttaaccttaatgtgctttaaatctgcagaatggagatcagatcccattctaaaaagtaccctgcagaattccatatctagtcgacactcaggcattctcagatttaattctcttcttaagcaaccccacaggtttatgtcatgaagtaatgtgtaattttgctaggatacaaatgtcaatgacaaaagctgtgcaaggctggcccaccaaaataggacacttggttgatacaggaagggaaaccagtaaggaacccaacattgacatgagcatgtagctttattttcctcatctcctggtgcacattaaaattccagaaaaaatggtatggcatagtggtattctcaaatttggaacttgtaaaagttttaagatgtatcgctagacaaatgtcaaggacccactccatgttcctggctgacatcctctgatatggtcacctgaattatacatttttccataattaaggaaaagcagatattgtatgcatttaaacatattatctctatttaaagactgataatacacagcattgtttatgaagagaacaaaatcatataactatattaagagacaagttgctatggtaaccatttctctgcttaaaaagagaggcaaacccttgtgttattggaagattctctcagcttttaatagcaagcattatgtattattttatgtattgggcctgctttttgtcttatacgagataagtttccatgttaccttacttaacagaataagtcatattgaatatttaataattaaatggaaattgtattgggtgatgcaccctcaaaggcaaataaaaattatgattaaatatctcaccgagtatgttaacagatgatcacacataccttgaaacaactgcgtcattctatagtcaatagtttcaattgtctgtagatgttatttatttccagaaaactatttcctagattaatagaggaaagttaacatataaaactctgtattttacaccaagataattttttacccacattattttcttacgtttcattggcagatcctttcctgctttcccatacagtgatggatgtattataataaaaaaggctttcctaatcagtgccaatactttccagatttcctgcaaacaggaaagatcataaattttcttatactttaacaacacttccccaactccatttagccacttgcttgttgcactgacccagataactacaatttcagaacataataacagcaataataataatatcactcattaagttcttgcctaatatcagtattagtttggttctaagcactttgcatgagacaccaaatttacaaacttagcacaactaagggaatctagaggcagtgtgcatttaaagatctcatatttgtttataaaaaagagataatatttagcattgattttaagggtttctcttttaatccttacaataaccccatgagcttactgctaatgtatagatcaatttccatgtcctgtaagttttccctgaattgcacagattaagaaactcagtaactttccctcaggtgtcatagtttatgaaataaaataagctatgtgtggaacgtaaatgtattaataagattcaaaaataagtgttcataccaaataaagacagaaaattggctagtgaaacacgtaatgaacattcaacactccaaatcacaaatgcaaaagacaccaacatttcctgtaataatacatgaaagcatcatttttgctttttgttttttcagtatccctggcattgtgaatttatactttacataagcaatgacattatgaatactatatttatacctgaggaagcctagaacttaaatatttgcaaatacatcagatgaacatatggttgccagttgttactgctatctcattttctttctgtaagaagatggattagtgaattatagtaataaaaaagcaagcatgcttaagttaaagcctttgcctatgatttagatagtttcttataatacattggtgtatgaaaggaaatcaaattatttaactgactagattttctattcatacacaactatttccagtaagcactcccacaaactgtttatatagtattagttagaggatataatgaaagagcaataaaacaaacttctttatcactgcacttaataaacacctgaagttccccaatgcgaactttcagttataaataattgactgtatccacatttttctgaaatctgatagactgtgtcaccttgcacttagcctataatggcacttagtttttcctaattcttctctatgcttcaaatttttaaaaaatcagttctgtttaaccttgtgaagatgcaaactggtgatagaatggattttctacgcttttaagtagataaaaaaggacattcttaattattccaggtatgtgttttacctcaatcattccttatgccctgtatgtcctgagagcaaggcccattcagccaagaagatattatttgaagtcttttgtacataagtaaattgttttctgaagtcaaatcccaaagggctttgcaaaatttcatttagtcaggtgggccaagagcaactactactttctgtaagttccaataatctttctggccctatgggggcatttactctatgaattatgcctaaataccctaaggaaattgaaacgagtaatttctttatttcgctagtattggttcagaccactcattatattaattctaaaaatcctccttggaggcaggttaagtggcagcctcattagtaatgctgcccagacaaggacaagaggctctgtggcctgcccagggactgactgtcaggcggctggcatccaactcctgaccatgggcccatccattggtcctgaacaccctagccactgaaaccgctttttaattggcttaaatgggcttgtttattttccacttttctgtttattgaagtagaagtggaaactggccttcaaagaccagtctatcagcatctccttccttggctcgcctgaccttcaggcagtgcagctgcctgaactgagttaaaaatggactgtcaagctggctttaatttctgctgctctgcgtccgaatgtcctcccactgatctgtttatcacaccctctataccccttctgttgttgtttttctaagagttttatgccaggacagctgaaactgcctttcaaggttctaacctgcaaatccttctacacataatcctagagggcctgggagccaacactgggatctctactgtaggaacaaccttctccctccaggcatcccctaacgcaccccaagctgactctctgaacagatcatctcctactggcacaccaaagcgagaaaaccgtggcttaataactttggaagaaaaaaatcaggtttggcttcttgctcatgggctatgcgggcatgttgcctctttccagggctcctctgcctctctgtgtgttcctgtgcaggaccgcacggagccctcacagggattatctgctgatccccagcagaatataaaactctttatcttcagtctctgaaacctcttcaaaatatcccaaaccaaagatcctcccaacagggctcgccagaaacttctgcctccggaaatgacagttgctctcgatgcacggatagaggagtacctaagatcctactaatggtattgtgtgtttcttggcaaactcccgctcaattcaagctccccgcgctctggggcaaggtctaattagaagagtgccaggctcacccttcctgcgaagaaaacgcattagccacagatgtaagtgcacgaagaatgccagggagccacggagtgcgtggggtcattaaggcccttcttaaaatgctggcgagccttcgatgcgggaaaggaaaactagatctgaccgcttgcagcagaggaggatacagaaaccctgggaggcagagtagagttgactgggttagaggccagaaataagtgcataaatgatgctcagtggacgttgcaacagatttaagccaagtgttcaggatgacacagcaaagccccaggacaaggaaatgcacagatcgcttaaagcttcccgctgccgggagcagcctgagtgtgaaagcgcggacgctcggggaggggtcgcactgaacaatcaggttcaggctttgacgagtcgtgcacccggaattgcggtcccagtggcccgagatctaccctggaagcaacaggtgtccgctctaccacaggcttatcctcaactccctgtggctaggctcgggctccctggaagtgtagaggttgaaaggggaccagactctggaggggaggggcggggcgctggccggggaggggcggtgcaggtgggcgggcctgagcagggtggggactggacctataaagttctcgctgccccggaggctatgctactgcgaggagccggcgcagggtggcccgggaggggtgagcagggtgccgctggctgctggggtctgcaggtcaccgagtccccaggagaggggactcctaagaagccacctgcctgtgtttacccggcagcgagcgcgcaggcccccgcgaactcctggcaggtgagcgaagctgcggccttggtgggggcagcggggccggggggcgctccgcggggcaggtcgcttccaagttttgcgaactgttgagttagtttcaggttgcggctccgctcccagggctttgtcaaattgagttgcagaggccggttccacccctttggcaaaggagttcctccgctagttcgctcccgggacgccgggcattttaggagcctctgcacgactcgcctgcttttgcaaatccgtctcttctcgcctcattttttccagcgctcaggaaaggccgttgcgcctcgcgaaggaaacagagccgttgaccatggttgcaactggcagtttgagcagcaagaacccggccagcatttcagaattgctggactgtggctatcacccagagagcctgctaagtggtgagtgtccccgctgtccacccttctcccctcccaaggtcggtgcctctggatctattgggtgggcgggctttcgacttcctcccctacctctatgtaggaggtgccacaaaatccatctgaggagactcctttccaaattttctaacatcttctctccatgatagaaacaaaagtagcaaaagtagaatacccgagggctgcatctttctagtctggtgccagtaggccccttgggattaagttccttatcttacatgattgtgaagaacacagttatgtgtgttttagcaaatgtatttaccctgtaatcaatatcgcccctccccctgaattccgacgcacctatttgccaggtattcctcactctcccctgactccagggaactactgatctgatttttatcattccaagttagttttgcctttaggtaagtggaacc

SEQ ID NO: 3019 - DNA, 6000 bp, Homo sapiens
ccacaagccctggctgggttctaatttatgcattttttaaaaaatgaaaaacacaaatattttcctctatatcatcttgatacatgtttcatcttgatacatgttttagaaatatgtatcattttaatagaaataaatttgtggactttttagaatatatacaattgatatgttcttgaaaaaatggctttaaaactgttttagaaatacaatcttatttcacatttaggaccacaacaggattaaaacaatgagaaagatgtttagtattaactctttaagggacattttagttttctgataaagtcataatagtgtggcaaataattcatagtatagtgaactggccttatgttttgagtgtgtgtatttaatccctcttttgagaattaaatttaggactagattttttgtgctaccagagtctgtatatatttttcacacaaaaaatggggttgttctgtaaccaaaaactgtataatacgatctcagctaagccttatttcttttactactttactgtgcctcttaatggtacttttaaggcaggaagtgtgttataggagtaaagtctgggcagtgatggtaaaagtaggttaaatatagaaatgttttccttttctctgctgtcatggagaagagaatggtaactggtattagcaggggtggttctttccctgcttccttggaggctgtaaggaaaggatcagttccacgcctctctccttggcttgttcatagccatcttcttcctatgtctttttcacatcatcttacttctatggctgtctctgtccaaatttcaccttttgataaggacatcagtcatactggattaggggctcaccctattgcagtgtgagctcatcttaactagttatttctgcaatgactatattcccaagtaagatcatcttccgagatacaggatgttagtcaggacttcaacatagaaagttggtgggaggaacacaattcaacatataatccttaggtgagccaagcatctactcttagcttaccctgtggtcctttgcctcttctaggcatcaactactgggaagtgatcaaaacacctttctgggtcaagcaccgtggctcatacctataatcccagcactttgggaggctgaggcaggcggatcacctgaggtcaggagtttgagaccagcctggccaacgtggtgaaaccccatctctactaaaaatacaaaaattagctgggcatggtggcacgtgcctgtgatcccagctactcaggaggctgaggtaggagaatcacttgaaccctggaggcagaggttgcagtgagccgaggttgagccactacactccaaaaaaaaaaaaaacctttatgaaaaatagtaccccaaatccaatcaattgctagtttaagtgatggaatagaaagaaaagagatctaagaatcattcttagaaaacagatgtgctagaatagaatgtaaaattcagttagtggctctgattttggatgtgaataaattcactatttgcattacagtgacattaaaaaaagcaggttgtgaaaccatcttattaaattatacaaataatgcaaaattcctcaagtgaagtaaaactttagtgaacattaaaaagttgattaacttgtagtgagagattattaatgtaaataagtgactcacatctattaccattgcccctctgactagtttcggactcatagaaaagaatgaacacagtgaattgatttctaactttacctcatttataccacgccatcaacactgctatctaatgtggaaacctaattatttcattttccccggttttccactggggagataaagactaaattcctctataagctgcaggttgagtatcatcatcattaagttcctgtaatacagaactactactagttgatccccaaacaagcaaagctctctcaaaggcctttctgttttttgtttccccctgcttgacgttctccaatccacctctactcaaatgctactttcatagaagagttttcctacttccctacacagtctttaggtgactgtcttatgctctcattaatgaacaattttaactaatgttgtactgtttcctatttttgtccctctaaatttttgaggtcacaggctatgacttttcatctttgtatctcgactgccaagctcaatgcttggcatattcaatacacagttcttgaataaaggcccagtttttatataagcacagcttactttatgccataatttaaaaaaatctaaacagaaacttaaaaatacgttttaaaagtgtaatgcattagtgatctcactgctaattgctatttgaataaagtactatgaattacttggttaatttggatttttgggtgcttttataacacccttgtaactaattttgtaggtattacaacttaaggcagaaaagagaatgttataaactaaggtttttgattaacaaaattctgggacccttaaataaaaggaaatacatttttttctgtttgaaaaactgccactttatttttttgtggtaaaacatacataacataaaagttaccattttacccattcctaagtgtacaattcactggcattaagtacattcacaatgttggacaaccattatccatttcctaggaaaatacattttttttaagatcttttttattagtaaacctagataaacaactgctggttttcaaatactattatgacaaccatatacaaaccaaagagcatagtcttaacatgtgccaacgaacttactgaaaaattaagacaaaatatttaaatttcttgaaacagtcacgcaacctatattccaataatggggggaatccctcaaaactaaataccacagaaatagcacaccaggatgtcaattaaagtcctctaccttgggaaaagcagcttgtgacgctggtaagcagtaaggtaaggtagctttggcgcgctctccctatactaacacggaggttcttaacccaagcttggaggagcctgtaacgtggctgtatgccgtttggagaatatacgcaattgggagtgggatagggagcatgcattgcttttatgcgattctcaatttttaaaaactatcacactagtaggacgagacagtgaatgcccaggcgaaggccaggccagccaaagacagggcagccgccggctccgagctcccggcgcaccgctgcagggtgcggcgtgggggccgagacactcggggcttggaattccggacccggtaggagggggcggggccgggggagaaggcgccgcctccgccccttcgggacccggagggtgcccttgtttacctcccagtatttgtcacccgagacaaagagggaaggaaggaggagccttctgagggaaactccctcggcgggaagcatcttactttcagaacgttttttaacaccctacgggacgcgggaacggttccctcccggccccccgcgccctttccgaggttccctgccttgacttccccgagttctacgacaacctcagcgacagcgggaggagctgggcaatcggttttgcagggcaaactccaggctctcctcatttattattctctgggcggcgcacgggagaccctgcagggcaacagagcagagcgactacagctcccaggagccaacgctgcagggctgagccgacgcgggggacagacaggacctaaatggtggtcggaggaagggcaaggcagacctcttctgttaccttagcgccagcaaaccgagccgccgccgtcgccaagccaggagaccaacccccagtctcccgactaagtatttttaaatctggcggggctttccttcccgagccaaccactcccaccgtttacagccccaaccagtcagcgtgaggcccgccatttttcaaaccctcttcccgccgccaatcaggatcgagcagtacattcctctcctgaccggttctaacgggtctgggagttaacgacctgggcgacccaccgaacctgctaggctggggcgtggagggcgggtctggtaagacactgaccaatcgttagcctccgtggcaagggggcggggactatctgggtttgaataatcgtcagaaccaatcagattagtggggatgtggcccgtggcctagctcgtcaagttgccgtggcgcggagaactctgcaaaacaagaggctgaggattgcgttagagataaaccagttcacgccggagccccgtgagggaagcgtctccgttgggtccggccgctctgcgggactctgaggaaaagctcgcaccaggcaagaataccctccaataccctcgggttcgtggacctgcctttccccattccctcagagcctctactcggtctcggcgcagtggctctcggggtctgacccggcgagcggcatttggggtgcgggccggcgagggctgggtctgtggagggccggcgggcagtcggaggaggcggaaactgcccctgaccgggcccggttctgggagttttcaatgtcggtcacgaggtgcttagcggttaagtgaggctcgcgacgtgggagctgggggacatttctgtcaggaaaggcgttttgagggcgcttgcggagtcaccggactcggtgaagggcgggcggcggcgtctcgggccccgggagccacttgctgggctgagccgcggccgctcgggccgggaggaggaggaggaggagggtgtgcgccggggcgcgggcgggggcgcgggcggccgcccttgggaggacgccctcgggaggaggggggcgcgggcagggcgggagcggatttgggcgggaagcggagccccgccagcgcccgccctggcagctgcgggctccgcgccgaccctccggcttcccctctcccccctcggccccgtcaggtggacgcggatctgtcaacatgggtaaaggagaccccaacaagccgcggggcaaaatgtcctcgtacgccttcttcgtgcagacctgccgggaagagcacaagaagaaacacccggactcttccgtcaatttcgcggaattctccaagaagtgttcggagagatggaaggtgaggcaggagagggacggagctcagggggtgcaggtgtggttttcggctaggagggccttaggcaggtagtaggcaactcatgagcttcaactttgccaccccagtgactcacctgaatatcttaagagttccaggcagacgattttaggtttttacttatataagacttcgaaagcaaaatgctgttaaggaaaatgtggtccttaaagatgatcttgtcgtctttggatgtttataggtaacaattttgctgtatttttggctcttattttatgtccacagaccatgtctgcaaaggagaagtcgaagtttgaagatatggcaaaaagtgacaaagctcgctatgacagggagatgaaaaattacgttcctcccaaaggtgataagaaggggaagaaaaaggaccccaatgctcctaaaaggccaccgtaagtttaaaataacccaaattgctccttggatttttccttcagtttattaaactctgttgcttcctttcagatctgccttcttcctgttttgctctgaacatcgcccaaagatcaaaagtgaacaccctggcctatccattggggatactgcaaagaaattgggtgaaatgtggtctgagcagtcagccaaagataaacaaccatatgaacagaaagcagctaagctaaaggagaaatatgaaaaggtacagtgtcatcttttttaaagccgtggataagactaggtataggtaataactgtagaaaacctgggaaatttagttaatcttgtattaatggttgtcagctatgttttgaaaaggcctaatgaaaattgtacacttcaacacaaggtaattgaaaccttccttttgactgaaaccagtgtttgtagcactagtatattcctgcagacagacttgtagttacttgtagttattgtatagtctgtatagtctgttatttttttttttaa

SEQ ID NO: 3020 - DNA, 6000 bp, Homo sapiens
tcagcctcccaagtagctgggattacaggcgcgtgccaccatgcctgtctaatttctgtatttttagtagagacggggtttctccatgttggccaggctggtctcgaactctaacctcaggtggtccattcgcctcagcttcccaaagtgctggtattacagtcgtgagctactgtgcctggcttaattggcactcttatagtcaagggatttcatatgacccaagttatttattctttaaaatgtaattataatttcctgactgcccaattgcgtaagttaaaatgtaatatatattttcccacactatgatcacatattcacagaattatagaatcacatgatttaagagctgaattctaccttggagattatcccgtaaacttcaatttatagtctatcagtctgaggcctagaaaagaccaggcacggtggctcatgcctataatcccagcactttgggaagcctaggcaggtggatcacctgaggtcaggggttcgagactaacctgaccaacctgtctctactaaaaatacaaaattcgccggacatggtggcgcacgcctgtaatcccagctactttcgagcctgaggcaggagaatcgcttgaacctgggaggcagaggttgcagtgagccaagatcgtgccattgcactccagcctgggaaataagagtgaaactccatttcaaaaggcctagaaatgctaattgaaccattcaaaaccacaagccctggctgggttctaatttatgcattttttaaaaaatgaaaaacacaaatattttcctctatatcatcttgatacatgtttcatcttgatacatgttttagaaatatgtatcattttaatagaaataaatttgtggactttttagaatatatacaattgatatgttcttgaaaaaatggctttaaaactgttttagaaatacaatcttatttcacatttaggaccacaacaggattaaaacaatgagaaagatgtttagtattaactctttaagggacattttagttttctgataaagtcataatagtgtggcaaataattcatagtatagtgaactggccttatgttttgagtgtgtgtatttaatccctcttttgagaattaaatttaggactagattttttgtgctaccagagtctgtatatatttttcacacaaaaaatggggttgttctgtaaccaaaaactgtataatacgatctcagctaagccttatttcttttactactttactgtgcctcttaatggtacttttaaggcaggaagtgtgttataggagtaaagtctgggcagtgatggtaaaagtaggttaaatatagaaatgttttccttttctctgctgtcatggagaagagaatggtaactggtattagcaggggtggttctttccctgcttccttggaggctgtaaggaaaggatcagttccacgcctctctccttggcttgttcatagccatcttcttcctatgtctttttcacatcatcttacttctatggctgtctctgtccaaatttcaccttttgataaggacatcagtcatactggattaggggctcaccctattgcagtgtgagctcatcttaactagttatttctgcaatgactatattcccaagtaagatcatcttccgagatacaggatgttagtcaggacttcaacatagaaagttggtgggaggaacacaattcaacatataatccttaggtgagccaagcatctactcttagcttaccctgtggtcctttgcctcttctaggcatcaactactgggaagtgatcaaaacacctttctgggtcaagcaccgtggctcatacctataatcccagcactttgggaggctgaggcaggcggatcacctgaggtcaggagtttgagaccagcctggccaacgtggtgaaaccccatctctactaaaaatacaaaaattagctgggcatggtggcacgtgcctgtgatcccagctactcaggaggctgaggtaggagaatcacttgaaccctggaggcagaggttgcagtgagccgaggttgagccactacactccaaaaaaaaaaaaaacctttatgaaaaatagtaccccaaatccaatcaattgctagtttaagtgatggaatagaaagaaaagagatctaagaatcattcttagaaaacagatgtgctagaatagaatgtaaaattcagttagtggctctgattttggatgtgaataaattcactatttgcattacagtgacattaaaaaaagcaggttgtgaaaccatcttattaaattatacaaataatgcaaaattcctcaagtgaagtaaaactttagtgaacattaaaaagttgattaacttgtagtgagagattattaatgtaaataagtgactcacatctattaccattgcccctctgactagtttcggactcatagaaaagaatgaacacagtgaattgatttctaactttacctcatttataccacgccatcaacactgctatctaatgtggaaacctaattatttcattttccccggttttccactggggagataaagactaaattcctctataagctgcaggttgagtatcatcatcattaagttcctgtaatacagaactactactagttgatccccaaacaagcaaagctctctcaaaggcctttctgttttttgtttccccctgcttgacgttctccaatccacctctactcaaatgctactttcatagaagagttttcctacttccctacacagtctttaggtgactgtcttatgctctcattaatgaacaattttaactaatgttgtactgtttcctatttttgtccctctaaatttttgaggtcacaggctatgacttttcatctttgtatctcgactgccaagctcaatgcttggcatattcaatacacagttcttgaataaaggcccagtttttatataagcacagcttactttatgccataatttaaaaaaatctaaacagaaacttaaaaatacgttttaaaagtgtaatgcattagtgatctcactgctaattgctatttgaataaagtactatgaattacttggttaatttggatttttgggtgcttttataacacccttgtaactaattttgtaggtattacaacttaaggcagaaaagagaatgttataaactaaggtttttgattaacaaaattctgggacccttaaataaaaggaaatacatttttttctgtttgaaaaactgccactttatttttttgtggtaaaacatacataacataaaagttaccattttacccattcctaagtgtacaattcactggcattaagtacattcacaatgttggacaaccattatccatttcctaggaaaatacattttttttaagatcttttttattagtaaacctagataaacaactgctggttttcaaatactattatgacaaccatatacaaaccaaagagcatagtcttaacatgtgccaacgaacttactgaaaaattaagacaaaatatttaaatttcttgaaacagtcacgcaacctatattccaataatggggggaatccctcaaaactaaataccacagaaatagcacaccaggatgtcaattaaagtcctctaccttgggaaaagcagcttgtgacgctggtaagcagtaaggtaaggtagctttggcgcgctctccctatactaacacggaggttcttaacccaagcttggaggagcctgtaacgtggctgtatgccgtttggagaatatacgcaattgggagtgggatagggagcatgcattgcttttatgcgattctcaatttttaaaaactatcacactagtaggacgagacagtgaatgcccaggcgaaggccaggccagccaaagacagggcagccgccggctccgagctcccggcgcaccgctgcagggtgcggcgtgggggccgagacactcggggcttggaattccggacccggtaggagggggcggggccgggggagaaggcgccgcctccgccccttcgggacccggagggtgcccttgtttacctcccagtatttgtcacccgagacaaagagggaaggaaggaggagccttctgagggaaactccctcggcgggaagcatcttactttcagaacgttttttaacaccctacgggacgcgggaacggttccctcccggccccccgcgccctttccgaggttccctgccttgacttccccgagttctacgacaacctcagcgacagcgggaggagctgggcaatcggttttgcagggcaaactccaggctctcctcatttattattctctgggcggcgcacgggagaccctgcagggcaacagagcagagcgactacagctcccaggagccaacgctgcagggctgagccgacgcgggggacagacaggacctaaatggtggtcggaggaagggcaaggcagacctcttctgttaccttagcgccagcaaaccgagccgccgccgtcgccaagccaggagaccaacccccagtctcccgactaagtatttttaaatctggcggggctttccttcccgagccaaccactcccaccgtttacagccccaaccagtcagcgtgaggcccgccatttttcaaaccctcttcccgccgccaatcaggatcgagcagtacattcctctcctgaccggttctaacgggtctgggagttaacgacctgggcgacccaccgaacctgctaggctggggcgtggagggcgggtctggtaagacactgaccaatcgttagcctccgtggcaagggggcggggactatctgggtttgaataatcgtcagaaccaatcagattagtggggatgtggcccgtggcctagctcgtcaagttgccgtggcgcggagaactctgcaaaacaagaggctgaggattgcgttagagataaaccagttcacgccggagccccgtgagggaagcgtctccgttgggtccggccgctctgcgggactctgaggaaaagctcgcaccaggcaagaataccctccaataccctcgggttcgtggacctgcctttccccattccctcagagcctctactcggtctcggcgcagtggctctcggggtctgacccggcgagcggcatttggggtgcgggccggcgagggctgggtctgtggagggccggcgggcagtcggaggaggcggaaactgcccctgaccgggcccggttctgggagttttcaatgtcggtcacgaggtgcttagcggttaagtgaggctcgcgacgtgggagctgggggacatttctgtcaggaaaggcgttttgagggcgcttgcggagtcaccggactcggtgaagggcgggcggcggcgtctcgggccccgggagccacttgctgggctgagccgcggccgctcgggccgggaggaggaggaggaggagggtgtgcgccggggcgcgggcgggggcgcgggcggccgcccttgggaggacgccctcgggaggaggggggcgcgggcagggcgggagcggatttgggcgggaagcggagccccgccagcgcccgccctggcagctgcgggctccgcgccgaccctccggcttcccctctcccccctcggccccgtcaggtggacgcggatctgtcaacatgggtaaaggagaccccaacaagccgcggggcaaaatgtcctcgtacgccttcttcgtgcagacctgccgggaagagcacaagaagaaacacccggactcttccgtcaatttcgcggaattctccaagaagtgttcggagagatggaaggtgaggcaggagagggacggagctcagggggtgcaggtgtggttttcggctaggagggccttaggcaggtagtaggcaactcatgagcttcaactttgccaccccagtgactcacctgaatatcttaagagttccaggcagacgattttaggtttttacttatataagacttcgaaagcaaaatgctgttaaggaaaatgtggtccttaaagatgatcttgt

SEQ ID NO: 3021 - DNA, 6000 bp, Homo sapiens
gtcaataaataagaattatcaagacctttttcttgctttgcagaagaagggcttaacaaaaaaagtgtatattctctttccatcagtattttccagtctggtttgatgaccacagattatgaaaagtccaatttttaggaaaactaaataagtgctaggaatttcaataactggcattaacacagatcattcctgtcagattacactgctttagataaattccagtttatcaacagaatagctatttagaggtgttagaggactactttggaaacagcttcactaactcataattagtttattgcctaatgtttatattttacaattcatgagatgctgaactcagacaaagtttggcaggtaaagtaatatactgatatcatctggcggggaaaaaagctggtaaggtcattttaatgaaagaataggatgactgagcaatattatgtaatctaaagtttagtctacatagtttattatatttgggctatcaactctatcctaatgctgttttgattttaaaatttatttttatcatttgggacacagtctcgctctgtcacctaggctggagtgcagtggtgtgatcacggttcactacagtctcaacttcctggactccagcgatcctcccacctctgcctcctgagtagccgggacgaccagcgcatgccaccatgcctggctaatttttgtatttttggtagagatggggtttcgccatgttgcccaggttggtctcaaactcctgagctcagagtcttgctctgtcacccaggctggagtgccatggtgcgatcttggctcactgcaacctccgcctccctggctcaagcaattctcctgcctcagcctcccaagtagctgggattacaggcgcgtgccaccatgcctgtctaatttctgtatttttagtagagacggggtttctccatgttggccaggctggtctcgaactctaacctcaggtggtccattcgcctcagcttcccaaagtgctggtattacagtcgtgagctactgtgcctggcttaattggcactcttatagtcaagggatttcatatgacccaagttatttattctttaaaatgtaattataatttcctgactgcccaattgcgtaagttaaaatgtaatatatattttcccacactatgatcacatattcacagaattatagaatcacatgatttaagagctgaattctaccttggagattatcccgtaaacttcaatttatagtctatcagtctgaggcctagaaaagaccaggcacggtggctcatgcctataatcccagcactttgggaagcctaggcaggtggatcacctgaggtcaggggttcgagactaacctgaccaacctgtctctactaaaaatacaaaattcgccggacatggtggcgcacgcctgtaatcccagctactttcgagcctgaggcaggagaatcgcttgaacctgggaggcagaggttgcagtgagccaagatcgtgccattgcactccagcctgggaaataagagtgaaactccatttcaaaaggcctagaaatgctaattgaaccattcaaaaccacaagccctggctgggttctaatttatgcattttttaaaaaatgaaaaacacaaatattttcctctatatcatcttgatacatgtttcatcttgatacatgttttagaaatatgtatcattttaatagaaataaatttgtggactttttagaatatatacaattgatatgttcttgaaaaaatggctttaaaactgttttagaaatacaatcttatttcacatttaggaccacaacaggattaaaacaatgagaaagatgtttagtattaactctttaagggacattttagttttctgataaagtcataatagtgtggcaaataattcatagtatagtgaactggccttatgttttgagtgtgtgtatttaatccctcttttgagaattaaatttaggactagattttttgtgctaccagagtctgtatatatttttcacacaaaaaatggggttgttctgtaaccaaaaactgtataatacgatctcagctaagccttatttcttttactactttactgtgcctcttaatggtacttttaaggcaggaagtgtgttataggagtaaagtctgggcagtgatggtaaaagtaggttaaatatagaaatgttttccttttctctgctgtcatggagaagagaatggtaactggtattagcaggggtggttctttccctgcttccttggaggctgtaaggaaaggatcagttccacgcctctctccttggcttgttcatagccatcttcttcctatgtctttttcacatcatcttacttctatggctgtctctgtccaaatttcaccttttgataaggacatcagtcatactggattaggggctcaccctattgcagtgtgagctcatcttaactagttatttctgcaatgactatattcccaagtaagatcatcttccgagatacaggatgttagtcaggacttcaacatagaaagttggtgggaggaacacaattcaacatataatccttaggtgagccaagcatctactcttagcttaccctgtggtcctttgcctcttctaggcatcaactactgggaagtgatcaaaacacctttctgggtcaagcaccgtggctcatacctataatcccagcactttgggaggctgaggcaggcggatcacctgaggtcaggagtttgagaccagcctggccaacgtggtgaaaccccatctctactaaaaatacaaaaattagctgggcatggtggcacgtgcctgtgatcccagctactcaggaggctgaggtaggagaatcacttgaaccctggaggcagaggttgcagtgagccgaggttgagccactacactccaaaaaaaaaaaaaacctttatgaaaaatagtaccccaaatccaatcaattgctagtttaagtgatggaatagaaagaaaagagatctaagaatcattcttagaaaacagatgtgctagaatagaatgtaaaattcagttagtggctctgattttggatgtgaataaattcactatttgcattacagtgacattaaaaaaagcaggttgtgaaaccatcttattaaattatacaaataatgcaaaattcctcaagtgaagtaaaactttagtgaacattaaaaagttgattaacttgtagtgagagattattaatgtaaataagtgactcacatctattaccattgcccctctgactagtttcggactcatagaaaagaatgaacacagtgaattgatttctaactttacctcatttataccacgccatcaacactgctatctaatgtggaaacctaattatttcattttccccggttttccactggggagataaagactaaattcctctataagctgcaggttgagtatcatcatcattaagttcctgtaatacagaactactactagttgatccccaaacaagcaaagctctctcaaaggcctttctgttttttgtttccccctgcttgacgttctccaatccacctctactcaaatgctactttcatagaagagttttcctacttccctacacagtctttaggtgactgtcttatgctctcattaatgaacaattttaactaatgttgtactgtttcctatttttgtccctctaaatttttgaggtcacaggctatgacttttcatctttgtatctcgactgccaagctcaatgcttggcatattcaatacacagttcttgaataaaggcccagtttttatataagcacagcttactttatgccataatttaaaaaaatctaaacagaaacttaaaaatacgttttaaaagtgtaatgcattagtgatctcactgctaattgctatttgaataaagtactatgaattacttggttaatttggatttttgggtgcttttataacacccttgtaactaattttgtaggtattacaacttaaggcagaaaagagaatgttataaactaaggtttttgattaacaaaattctgggacccttaaataaaaggaaatacatttttttctgtttgaaaaactgccactttatttttttgtggtaaaacatacataacataaaagttaccattttacccattcctaagtgtacaattcactggcattaagtacattcacaatgttggacaaccattatccatttcctaggaaaatacattttttttaagatcttttttattagtaaacctagataaacaactgctggttttcaaatactattatgacaaccatatacaaaccaaagagcatagtcttaacatgtgccaacgaacttactgaaaaattaagacaaaatatttaaatttcttgaaacagtcacgcaacctatattccaataatggggggaatccctcaaaactaaataccacagaaatagcacaccaggatgtcaattaaagtcctctaccttgggaaaagcagcttgtgacgctggtaagcagtaaggtaaggtagctttggcgcgctctccctatactaacacggaggttcttaacccaagcttggaggagcctgtaacgtggctgtatgccgtttggagaatatacgcaattgggagtgggatagggagcatgcattgcttttatgcgattctcaatttttaaaaactatcacactagtaggacgagacagtgaatgcccaggcgaaggccaggccagccaaagacagggcagccgccggctccgagctcccggcgcaccgctgcagggtgcggcgtgggggccgagacactcggggcttggaattccggacccggtaggagggggcggggccgggggagaaggcgccgcctccgccccttcgggacccggagggtgcccttgtttacctcccagtatttgtcacccgagacaaagagggaaggaaggaggagccttctgagggaaactccctcggcgggaagcatcttactttcagaacgttttttaacaccctacgggacgcgggaacggttccctcccggccccccgcgccctttccgaggttccctgccttgacttccccgagttctacgacaacctcagcgacagcgggaggagctgggcaatcggttttgcagggcaaactccaggctctcctcatttattattctctgggcggcgcacgggagaccctgcagggcaacagagcagagcgactacagctcccaggagccaacgctgcagggctgagccgacgcgggggacagacaggacctaaatggtggtcggaggaagggcaaggcagacctcttctgttaccttagcgccagcaaaccgagccgccgccgtcgccaagccaggagaccaacccccagtctcccgactaagtatttttaaatctggcggggctttccttcccgagccaaccactcccaccgtttacagccccaaccagtcagcgtgaggcccgccatttttcaaaccctcttcccgccgccaatcaggatcgagcagtacattcctctcctgaccggttctaacgggtctgggagttaacgacctgggcgacccaccgaacctgctaggctggggcgtggagggcgggtctggtaagacactgaccaatcgttagcctccgtggcaagggggcggggactatctgggtttgaataatcgtcagaaccaatcagattagtggggatgtggcccgtggcctagctcgtcaagttgccgtggcgcggagaactctgcaaaacaagaggctgaggattgcgttagagataaaccagttcacgccggagccccgtgagggaagcgtctccgttgggtccggccgctctgcgggactctgaggaaaagctcgcaccaggcaagaataccctccaataccctcgggttcgtggacctgcctttccccattccctcagagcctctactcggtctcggcgcagtggctctcggggtctgacccggcgagcggcatttggggtgcgggccggcgagggctgggtctgt

SEQ ID NO: 3022 - DNA, 6000 bp, Homo sapiens
attttgctttaaaatgtaaatttatgttctgtgcttccagaggttaaaaaaaatacctaagtgtagtatcttaaacaatactttgaaaatgtaacctattcagtttgtaataccttaatagccagttccacacaaatcacttttaatactggcaaaacactttttaccatgtgggttttatatatatatatgtttaatggacttattttactttatatatgttgactgataattttttgagtacctactatggatttagcataatactagacactacagggttaaaaaatgggacataatccttctcctgaggaaatttcaatatgcttgttcagacaaaacaaacagaaatgaatgaagcactaaactgtgagagataaaaatttggaagaccagttattgaagagttaataaaatgtgtctgaatagtttttacaaaataatttttaaagtcactgaatgacttagttttgaaataagccactgttaacattttaaaaatattttgttgcaattactttccaaaattacctcgttaatcacaaatagcttatccttacgatccattttagtatctagaaaaagaaaaaaaagaaaaagcaagtaaattaaaggtgatttcaaagttatttcaatcaaaccacatatgctatccagaaaataaagtgtttttacactcttcagtttaaaggagattttattactaattttcaaaacaagagctggaaacaatcgctcaaaaatcttgactctttgtaaatgtaaagaaaataagtaaaatatagtctgtaagaattagaaattatagtgtaagcagtgtttctcaatatttaggtattctaggaatccttttcaaaaatgggaaaattctcacaaaccaaagactgtgttaaaggaaaccagtttcaatgaaaatatctttcactttttaatcttaggtgtcaaagaaaactgactttatgcccgtgtaacaaacctgcacatatactccttgaatctaaaataagttaaaattttaaaaataaaaaacaaaaaacaaaaaaaccccaaagcacctctcaacataagcacaacaacagccatatgatggcgctgccactccactgttccaaacttttttttttttttttttttttttttgagacagggtcttgctccttgcccaggctgaaatgtagtggcgcaatcacggctcatgacagccttgaactcctgggctcaagccatcctcctgcttgagactcctgagtagctgggactgcaggcaagtgaccccctcacttggctaatttactttacttttttcatttttttttttttttattttgtagagacagggtttcaccatgttgcccaggatggtctggaactcctggactcaagtgttccacccacctcggcctcccaaagtgctgggattacaggcatgagctaccatgcccggccatactgttcttgcctgtaaaataacccactgcttaaaaataaataaataacctggcatttagaaataggctctgactccaacttaaaaagtgctttgaattctatcccaggtccatttttcaataaaaacagttaaaaaaaaaaaaaaaaaggcccaaaaagcaacatgtggcagtccttagcacttaggacaaaccatcccacctatctcaggaccttcagaagcattacagtgaaggcattcctggaccttcaagaaatgtttcaataatattaggacacctgttttaaaaagtaaagaatctacctaatgaaatctaaagaatttcttacgaaatgttaactggaaaaattgtggcacttgaaaggataaaaggcattgtgtttttttcgtgagaacactgaacaaatgaagaatatataaaataagtgaaaacataaaaataggtaagtttatagatagaaatttctaaagtatatgatataaaggcacctgctttagaatgaggcatcaacattctcaagtcctgcattaaatgtcttgttctaaaatttattcctctggaagaaaagatgagaatccgttccttatttttccactttccctaaagaaaaagaaaatgttaaaagattttaaaatcttatactgaactgatcttgttttgtgacagggtctcacactgttgcccaggctgaagtgctcacggctcactgcagtttcaagttcctgggctcaagtaagtgatcctcccaccccagcatctacagtagctggagactacaggcatgtgccaccatgtccagctagttttttttttttttttttttgtagagatgggagtctccctatgttgcccaggctggtctccaacacctgggctcaagtggcttggcctcccaaagcgctgggattataggtaagaaccaccgcacctggccctgtttgttttttatgagcttccaagtagctcataaccaagtcaaaccatcctgactcctttaatttcatctctcaccaacattcactgaccacatctgccacccagaaatgccctccttggtttctttgtttttcaacttcaatctctccaattcctccttccaaccctaaaagttctttcttagccctcttatttctgtgctctccatgacagatgtctcataataatttcccacaactcttaatcctttcttattcacactgcacttacttagagtcttatattaactgcaaaactcctaaatggctaaccttcccagacatgagcacctccaatagatatggttgactagctttttcaacagtttactttttttgtttgtttgtttgagatggagtctcactctgtcacccaggctggagtgcagtggcgcgatctcggctcactgcaacctccacctcccgggttcaagcgattctcctgcctcagactcccgagtagctgggattacaggtgcccgccactgcacctggctgatttttttttttttgtagtgttagtagagacggggtttcaccatcttggccaggctggtcttgaactcctgacctagtgatccacccgcctcggcctcccaaagtgctgggattacaggcgtgagccaccacgctggaccatttttaaagtaatacttccatcacatccttacttcccagagttttctaaacaaagttcaaatgacatagctttgacactgaattttaaaatagattttcacgtctacatcattattgccccaaatgaagcctaatgcaatccaatctggctctattttttacatttttcagcatttccctacttcaaagtctttcatcggtttttttttctcccttggagtgttccctctcattttttgaatgtcaaaattctacacttcctctgatatgcagcttacgggctaaatccttcatgattctttatcttattatactagggtaaaaataatctatatctcctgcacttccatagaatgtatcgaagtatggctcagattatagatactacctagctcaagggaagagtgagaacactaacatttactggaagtgtacaagtccagcttatttttcataaaaagtaaatattccctccccctgccccccaatctgcaggtcagaaaagagcacagaatgttgctgttaataacggggctagaatttacacttatctttcattccacagagctcacttctttcttagagcttgccatcacaccacacggggtcatttacttatcacctactccgcgctagagtactatgctaagtgcggaggacgcaaaaattaatgtcaaagataatccttgttcacagtattctgtctagcttaagaagagttcttagttgaatgaaagctaattctaacaacttgtgtgcacttcttttgaataaaaaccatcaacttatttgaattcttaagtttcctcctaaactccaacatttcaggaggaagaggtcacattctagtcatctttgcaatctcaaacccaaaggaagcctaacttggtacagtgcatggcacattcaatgtctgttgaatacaagtaaagctcatactacctagtctatttttcagtatctcttgagttaatgacctggttaacaagtcagagtcacagtcccaagggcaacaactttttaaaggctcccctaacgtacttcaggatccctgactgagagtggctgactatggcagtatatgggcatactaatcactggagaaataatagcgagaaataaccaaggaaaagcactactctccaaaaacattaaaaaaaaaaaacaactgaacaactagtaagaaagaacgctggatctgagcaccctgtaagtcgcttccccgtgggccgggtaaaggttttaaaacccgccgcctccaggaagacggccacgtgcacaaggattagctgcaaactccgtgcccagtctggccgggagaattgctaaaaccgacctaccgttaacacccgggctactctgaaattaagcaaggctgtagtcaagtaagtaacccaagaaaaggcgcacagagccgccgccgcaggtgtagcccggggacatcccctcctaccttgcaaacggggcctgggatccggtccctctcttcttcctccacctcctctgctgtggcgtgccgcttagctggcggctccgcatctatttcgtttctttttggcttcttcgcctgaactgcaaagcctccacgccgtttcctcttggttgccgccatcttgcctcgccgcccgcgctcttggcctcctttccggcgctgccgctcgctcctatttccgatctctatggttcggcggctctaagcgctcagctccgcggtcgtcctccaggtctgtgccgcctccttccggtctcggtggcgcggcacgcgcggctctctaggcctccttcagctctgtggtgacggtggccgaggtggagggccggtctgaagagtggcgggactggcttcacttcctccgcggttcctcggagccgcctcgctcctcttcagggactttgctgagaagggctctcgggcgtccagaccccaccgcaaaggtagggtttccgcactcggggaccccgagactagtaagcgatgctgtcccgcgggcgggctggtgaatggggttgtctgggactcttggaggattatctggacactccgggcccgccccgccatcgcctgttttgttggaggcggggctggtggcgcgggctgcacaaaaccgactccccgcggatttgtagctcctgtttggccgggagataccgtgtcagttgcgtgtcttcattcttcacaacttttcacgttattgtcctcttacggagacgaggaaaccgtagcttagataattttcctccagaattacaaagatagttaagtgacataggtggggttcggcctggtcagccgtgttcagcctcccagcccctttccacctctcagcgcaggtggagctcgccggacctcgccagcactgatgggagttttactgtctaatcccttcaggtgtttggcgatccgccgagaagttgttggccccaggagcatccctcggggccgaatgcgcagtggacgatgccccttctgacccaacagatccaagacgaggatgatcagtacagccttgtggccagccttgacaacgttaggaatctctccactatcttgaaagctattcatttccgagaacatgccacgtgtttcgcaactaaaaatggtatcaaagtaacagtggaaaatgcaaagtgtgtgcaagcaaatgcttttattcaggtatggaagtaggcgcctttaagcctgtgccatagatactctaaatgtaatttaatgaaatcggaaggtttcagtagacaaaataacttaatagtcataataacttgtcaatagtcataataaataacttaataaataaataatagtcttaagttagagaacaaaacgtcattacttgaattttttttctctcccggtaacaaattcttttcccatcttgttttacagagataatggttagtaatgactaaagtttattaaactaggctattggctaggc

SEQ ID NO: 3023 - DNA, 6000 bp, Homo sapiens
attcttctaaagtagttacaaaaagaataccttattccttttattccatatgtatttaggggctttaatattctgaaatatttcaaaaagagaatatttagatcctctctctaaattgctagaatctctgagtctaatcctgaaaagagacttgtgttaaactatcaagaacagcttttttgacattgtactcctgctgaaaactgccctcccttgggaagccagccttgagcaatcctccctaaatccttatacagcatttcccaggtatctgtgtgtgctatcttggtacttaatggtttgctgtttcacattttcttggcttcaccttggttttaagctgttcttcccacaatgcttaataagatgaataagcacacggtaggtgatcaacagatacttagtgaatgaatgagccacgtgtagaaaacatcttcttctgcatcctgaactaacttgaaaaagataccataatacaaacaccctttccaaacacttaaacccaattttcctcatgatgtaacctgatctatgaaagtaaggagtagtacaatgaaaacaccaccagtttataaattagaggactgggcttctcatctagatgccaccaccacctaaatatgaaatagtgagttaatcttcctgggtcttaagtttcttgatccataaaattatgaggtaagagtacaagctgtctaaagttgtgaaaactctaaaaatgtggataataaaaattttgcatcctaagcaaatgtctaagtgggaagatggagtacagaccacattaactataactgcactgctctcaagtacctgaaataaggcttgtcaggagacatggtaatttgtaggacttcactcgtcatatccaattcagaaaatgcttcacggagcccctctgactgcagaataattttattaataacattggtgctgcagaaatcaaagtccagggtctcctcaggttcctgtgtattgattttgcagactgtcaccactcctccttcttccaggaacagcatcaaagggtaaccataaccttggtaacacattcgaagtgcagttaaagtccctgcaatggaaagaagtcatacttggccttagctttatagttctgggttcagcttctcctcgaaatgatacataaaatttctcaagaataatttattccgcccaatttctcacatatatgtatctcctcataaaaagggatgacatcttccctgatgacagttgtgtgtagagaattccaaaactacaagaaaattgggaaccagaacaaaatgtaacataattctttggaatcattttcaggttgtcatacacacctcagaaatagcttgttgattttatatatgtacaatttcagggtagagaatctatatggatcaacacagcaagtaactaaattgctgcagaacagggtatgctattccttgaaggttcaatgtgtgtaacagtggattgctgtcatctgtactgtaacgtcagtgtactcactatgacaaggatccttccaacttttccaactgggagatattctttatatttcctcgaatttaaaaatcaaattgagagaaaaagagggttgttaatggtggtgtaaattttaactctgcaaaccactagagggaaggaggaatatgacaggatattcaaactccttctccttactggattgagagccacagtgaggaatggaagatgacagatgcttctgtgaaaaactagctggagaacactgtattagaaaatgtataattaataatagtggaattgtctgtggaaacgtaaaatacatttttctggagaactatattgaatttttcctagctaatctccaggttgctttcctatgaaataaaatcattcttctggggattccttagttttatacccacagcaattcaatttcaccattcttaaaaattcccttaacaaataaaaaaatatatattttaaagaaaatcattcggcaaccggttgcggtggcttatgcctgtaatcccagaacttagagagactgaggcgggcagatcacctgaggtcaggagtttgagaccagcctggctaatatggtgaaaccccatctctactaaaaatacaaaaaattagccgggcgtggtggcacgtgcctgtaatcccagctactcgggaggctgaggcagaagaatcacttgaacccgggaggcagaggttgcagtgagctgagactgtgccattgtactgcagcttgggcaacaagagagaaactctgtctcaaaaacaccacaaaatcatttggcaaaatagacataacttataaaatatggcttaaaagaaacaaattttgaacatagtaaactaggagtcagaactggcttttgtttttctctgccactaactagcggagtaattctggacaagttaggaaaaagaagcaattaaaacatttcacaatgctaaaaatatttaagacatgtccaaagtattcttttggccagttcgaatttacaatccctcaaagccttgtaaattaaaaaaaaaatgcaaatacttttacaaatatgaaaagaattataaacacacttgcaattaacattgtgaaatgttagaacccatgactgtggccactgaaaaatgaattggcattagctttctgaaccaatgtttatgttccaaataacttcctgtatttttctgaccactatgtataacacttttatgtctttatactgatcatagtttacctggcataggacttgatccaaaaatagataaacagtctaaaaggacagttaaattaattcgaaaagtaacagactcttcctgaactttaaactcctgaaatattccagcctatgaaaagagtaaaaatgaaaattgttacataaaagaataaaaactaataatataaggtcctagatttcactttatacgtttaaaaaatacaatactgtgctaatcccatgagaataatttctgattagcaatcaaaacatcttagagacatcctttgaagcatccttatctccattcctggatctaaaactatccctctgtgactctcccttgtctcgtttttgtgcctatcactactgctaaggtcacttggaaaatagacgaatgacttgataatgcatgagcaacattagtttcaacttttattatgattttttattgatacgggggtctcactatgattacccaggctggtctttaatgcctgagctcaagcgatcttcgtgcttcagcctcggtctcctgagcagctggaaatacaggtgtgagccaccataccatgcccctgcatgaggacaagaaccgtgtcttatttacctctctatccctgagatcatgctgtgcacttacgtgttaaaaaacgcttagttgaacttgcaatcctatctgaaccacacaaatattactttggaagaacaaaaattctattacaaccagtaaaggaaaaaaatactctttagtaatagcatatcgcagtggaaaaaagagcatatattctggaaacaaatattcagcgttcttatcccaattcagccacttaccagctgtgggactgttggcaaatcacttaaaattgtgcctcgtttccacatatataaaacgggaataataacagaacctaccttacaggactattgttaagattaaataagttaaacaataagaagactgtagcctagccaatagcctagtttaataaactttagtcattactaaccattatctctgtaaaacaagatgggaaaagaatttgttaccgggagagaaaaaaaattcaagtaatgacgttttgttctctaacttaagactattatttatttattaagttatttattatgactattgacaagttattatgactattaagttattttgtctactgaaaccttccgatttcattaaattacatttagagtatctatggcacaggcttaaaggcgcctacttccatacctgaataaaagcatttgcttgcacacactttgcattttccactgttactttgataccatttttagttgcgaaacacgtggcatgttctcggaaatgaatagctttcaagatagtggagagattcctaacgttgtcaaggctggccacaaggctgtactgatcatcctcgtcttggatctgttgggtcagaaggggcatcgtccactgcgcattcggccccgagggatgctcctggggccaacaacttctcggcggatcgccaaacacctgaagggattagacagtaaaactcccatcagtgctggcgaggtccggcgagctccacctgcgctgagaggtggaaaggggctgggaggctgaacacggctgaccaggccgaaccccacctatgtcacttaactatctttgtaattctggaggaaaattatctaagctacggtttcctcgtctccgtaagaggacaataacgtgaaaagttgtgaagaatgaagacacgcaactgacacggtatctcccggccaaacaggagctacaaatccgcggggagtcggttttgtgcagcccgcgccaccagccccgcctccaacaaaacaggcgatggcggggcgggcccggagtgtccagataatcctccaagagtcccagacaaccccattcaccagcccgcccgcgggacagcatcgcttactagtctcggggtccccgagtgcggaaaccctacctttgcggtggggtctggacgcccgagagcccttctcagcaaagtccctgaagaggagcgaggcggctccgaggaaccgcggaggaagtgaagccagtcccgccactcttcagaccggccctccacctcggccaccgtcaccacagagctgaaggaggcctagagagccgcgcgtgccgcgccaccgagaccggaaggaggcggcacagacctggaggacgaccgcggagctgagcgcttagagccgccgaaccatagagatcggaaataggagcgagcggcagcgccggaaaggaggccaagagcgcgggcggcgaggcaagatggcggcaaccaagaggaaacggcgtggaggctttgcagttcaggcgaagaagccaaaaagaaacgaaatagatgcggagccgccagctaagcggcacgccacagcagaggaggtggaggaagaagagagggaccggatcccaggccccgtttgcaaggtaggaggggatgtccccgggctacacctgcggcggcggctctgtgcgccttttcttgggttacttacttgactacagccttgcttaatttcagagtagcccgggtgttaacggtaggtcggttttagcaattctcccggccagactgggcacggagtttgcagctaatccttgtgcacgtggccgtcttcctggaggcggcgggttttaaaacctttacccggcccacggggaagcgacttacagggtgctcagatccagcgttctttcttactagttgttcagttgttttttttttttaatgtttttggagagtagtgcttttccttggttatttctcgctattatttctccagtgattagtatgcccatatactgccatagtcagccactctcagtcagggatcctgaagtacgttaggggagcctttaaaaagttgttgcccttgggactgtgactctgacttgttaaccaggtcattaactcaagagatactgaaaaatagactaggtagtatgagctttacttgtattcaacagacattgaatgtgccatgcactgtaccaagttaggcttcctttgggtttgagattgcaaagatgactagaatgtgacctcttcctcctgaaatgttggagtttaggaggaaacttaagaattcaaataagttgatggtttttattcaaaagaagtgcacacaagttgttagaattagctttcattcaactaagaactcttcttaagctagacagaatactgtgaacaaggattatctttgacattaatttttgcgtcctccgcacttagcatagtactctagcgcggagtaggtgataagtaaa

SEQ ID NO: 3024 - DNA, 6000 bp, Homo sapiens
tcaattaaaaaaaaggtataattaaaaatcaagtaaagcttacctgaaagttccgaaaccatatcctattatccaaaatggtgaaagtaaacacgtggtccacaaatggttggcttttgggatgataccgtggtgtactaaagatctagttaaaaaagtgtatgttagttccttattccaagatatatcatgtatattttggatagctaattttaaagatatttacctgaattaagagttcttttaacaaagcataatgtggtaattcatcaaaagcctataaaaataaggtaagcatattatttaacagtagactgccttgtttaaaactgtttgctcatttgtttctataacttggctataacctcattataaatgtacctgaaagaattgataatccataaaaccaaggtgggggtgaaactaaattgaataacacaactatatctactaaaaacaaccatgccagataagaaaattagacctcatacactgaatgagaaacttacagggtcaaaagacaaaaggggccgagaacctttcaaacagtttccagtcatcttcagttcagcgagggtatgaactagaaaaattacaacaaaaacaaaaatagttgtaacttttgcacaactatttcaaaagattacttttaatttcctcatctaaaaaaatttattgagtcaacttactattttgaacaaggaatttagcagatggtccgtgaggtgaatttgaaagcctgaaagatatggagtaagctttttcaactaattagcaaatgtagtcaatgcttaccacctattcaccataaataatatgcttataatatttatacatttaattttctttaaaggtatcaagtttcgtgaaatcaaaagtttgcttcattctcaacccttaacatgaaacactaggagtctataacataaaaggtacaaagaacaaatccacttaaatgagtttaaccaaaatcttaatacattctcttaccacatatagagatcctgttttttcttagcttcaaaatagatgcatttattacagttcttcatttcacaaacctaaaggaagcaaagtataggaaaatgaagtagataatataaatgagaactaaagtaattatatgtgattaatatcatccagattatctcaaaaatacctaaccaggctaataggctacaaaggcctaaacatgtatttattcacagaaggaacctttaaagttcctcttaggtattctacccaaggtaaactagatgctctgcccatatcttgggtgaaattatctatcatatttttgggcctagcatctaaaatggtctcacttctgattactggaaacctccctccttttttttttttttttttttgcgatgcagtttcgctcttgttgcccaggctggagtgcaatggcacgatctcggctcgccgcaacctccacctcccaggttcaaatgattctcctgcttcagcctccggagtagccgggatattacaggcctgtgccatcacaccccgctaattttgtatttttagtagagatggggtttctccatgttggtctggctggtcttgaactcccaacctcaggtgatctgcctgcctcagcctcccaaagtggtgggattacaggtgtgagccacctcacctggccaggaacctcttctgcccatagtcccattgacaaactacaaagactaaaaatagatgccctacggataaagcataccacaactaatcttcttatgttaatccttcataatcaatcttcttagccaatcttatgaaaatgcagtacttatagaactaaaaacatcctttttaatgattattttgatttttaactttttagctttttgattctaagatcacaaaacttaagttgttcttcatttatactatcatttctggtgatttggttctataaaatcactaagggattgggtgaaaagcctaagtatatcaaacctatttcaaattaaacttcaatgtcttgaaggcttacaaaagtcacacttgagaagacacaaaaacattacaggagtgaaggcttgtattactgtagtattcataaactctaattaatatagtactcttaaactccacattatttaagactttaaacctaacaacttatggctggatgaggtggctcatgcctataaccccagcactttgggaggccgaggtaggtgaattgtctgagcaacctggcaaagctccatctctactaaaaatacaaaaaattagctgggcatactggcgtgtgcctgtcgtcccagctactcgggaggctgaggcaggagaattgcttaaacccaggaagcagaggctgcagtgagctgagatcataccacttcactccagcctgggtaacagagagagacttttgtctccaaaaccagttaaacaaataaacaaaccctaacaacttaaaaaaaaaaaacaaaacttttgtttcttactggtcttagaataaacacaaaaataggaagtttgtgccacttctgggcttttgtagttgccattttctctagctagatggtcttttaccatatttctccttcactacgtctctgctcaaatattaaacaccatccctttgaacaggtttttccggtgtagcctcagctgtccaaaacctataacctgctttatttctcctgtctttacttgaaattataaaccttgtttatggcctgtctccattagaatgtaagttccataatgacagggacattgctctgttgaacagtttctacagcacatagaataatgtggtattacagcagaggttcaaaaatttgtgctctaaagaaggctaatagtgaaaaaatgatcctaattcttctaagttttgaaaattttgctttaaaatgtaaatttatgttctgtgcttccagaggttaaaaaaaatacctaagtgtagtatcttaaacaatactttgaaaatgtaacctattcagtttgtaataccttaatagccagttccacacaaatcacttttaatactggcaaaacactttttaccatgtgggttttatatatatatatgtttaatggacttattttactttatatatgttgactgataattttttgagtacctactatggatttagcataatactagacactacagggttaaaaaatgggacataatccttctcctgaggaaatttcaatatgcttgttcagacaaaacaaacagaaatgaatgaagcactaaactgtgagagataaaaatttggaagaccagttattgaagagttaataaaatgtgtctgaatagtttttacaaaataatttttaaagtcactgaatgacttagttttgaaataagccactgttaacattttaaaaatattttgttgcaattactttccaaaattacctcgttaatcacaaatagcttatccttacgatccattttagtatctagaaaaagaaaaaaaagaaaaagcaagtaaattaaaggtgatttcaaagttatttcaatcaaaccacatatgctatccagaaaataaagtgtttttacactcttcagtttaaaggagattttattactaattttcaaaacaagagctggaaacaatcgctcaaaaatcttgactctttgtaaatgtaaagaaaataagtaaaatatagtctgtaagaattagaaattatagtgtaagcagtgtttctcaatatttaggtattctaggaatccttttcaaaaatgggaaaattctcacaaaccaaagactgtgttaaaggaaaccagtttcaatgaaaatatctttcactttttaatcttaggtgtcaaagaaaactgactttatgcccgtgtaacaaacctgcacatatactccttgaatctaaaataagttaaaattttaaaaataaaaaacaaaaaacaaaaaaaccccaaagcacctctcaacataagcacaacaacagccatatgatggcgctgccactccactgttccaaacttttttttttttttttttttttttttgagacagggtcttgctccttgcccaggctgaaatgtagtggcgcaatcacggctcatgacagccttgaactcctgggctcaagccatcctcctgcttgagactcctgagtagctgggactgcaggcaagtgaccccctcacttggctaatttactttacttttttcatttttttttttttttattttgtagagacagggtttcaccatgttgcccaggatggtctggaactcctggactcaagtgttccacccacctcggcctcccaaagtgctgggattacaggcatgagctaccatgcccggccatactgttcttgcctgtaaaataacccactgcttaaaaataaataaataacctggcatttagaaataggctctgactccaacttaaaaagtgctttgaattctatcccaggtccatttttcaataaaaacagttaaaaaaaaaaaaaaaaaggcccaaaaagcaacatgtggcagtccttagcacttaggacaaaccatcccacctatctcaggaccttcagaagcattacagtgaaggcattcctggaccttcaagaaatgtttcaataatattaggacacctgttttaaaaagtaaagaatctacctaatgaaatctaaagaatttcttacgaaatgttaactggaaaaattgtggcacttgaaaggataaaaggcattgtgtttttttcgtgagaacactgaacaaatgaagaatatataaaataagtgaaaacataaaaataggtaagtttatagatagaaatttctaaagtatatgatataaaggcacctgctttagaatgaggcatcaacattctcaagtcctgcattaaatgtcttgttctaaaatttattcctctggaagaaaagatgagaatccgttccttatttttccactttccctaaagaaaaagaaaatgttaaaagattttaaaatcttatactgaactgatcttgttttgtgacagggtctcacactgttgcccaggctgaagtgctcacggctcactgcagtttcaagttcctgggctcaagtaagtgatcctcccaccccagcatctacagtagctggagactacaggcatgtgccaccatgtccagctagttttttttttttttttttttgtagagatgggagtctccctatgttgcccaggctggtctccaacacctgggctcaagtggcttggcctcccaaagcgctgggattataggtaagaaccaccgcacctggccctgtttgttttttatgagcttccaagtagctcataaccaagtcaaaccatcctgactcctttaatttcatctctcaccaacattcactgaccacatctgccacccagaaatgccctccttggtttctttgtttttcaacttcaatctctccaattcctccttccaaccctaaaagttctttcttagccctcttatttctgtgctctccatgacagatgtctcataataatttcccacaactcttaatcctttcttattcacactgcacttacttagagtcttatattaactgcaaaactcctaaatggctaaccttcccagacatgagcacctccaatagatatggttgactagctttttcaacagtttactttttttgtttgtttgtttgagatggagtctcactctgtcacccaggctggagtgcagtggcgcgatctcggctcactgcaacctccacctcccgggttcaagcgattctcctgcctcagactcccgagtagctgggattacaggtgcccgccactgcacctggctgatttttttttttttgtagtgttagtagagacggggtttcaccatcttggccaggctggtcttgaactcctgacctagtgatccacccgcctcggcctcccaaagtgctgggattacaggcgtgagccaccacgctggaccatttttaaagtaatacttccatcacatccttacttcccagagttttctaaacaaagttcaaatgacatagcttt

SEQ ID NO: 3025 - DNA, 6000 bp, Homo sapiens
acttcctataagtactaatagatttcagaaaatattgatgatttgccatttaccaagtttcacccccaccttgattttatggattatcaattatttcaggcacatttataatgaggttatagccagtataccttttgggaataacgtaaccaaaccaaaatgaaatgtttcctttttattaaagatcatagaagaagatgctgctcttgtagaaataggacctcgttttgtcttaaatctcataaagattttccagggaagttttggaggaccaactttatatgaaaatcctcactaccagtcaccaaacatggtaagcggttgtgtcattcagtagtcttcaatgtaccagaaccctttggccaaaatgattctgtgaagtaattgctgttttattacctgtgaaactgaatttggtttttgctgcatagaaacttggaaattactcccttttttcatgacactggctgaaaggatatatggttcataactgaaagtctttgccttatataaaatgtttatttttatttcaaaagcatctaatcttttttttttttttttagcatcggcgtgtcataagatccatcacagctgcaaaatacagagagaaacagcaagtgaaagatgtgcaaaaactgagaaagaaagagccgaagactcttcttccacatgatcccactgcagatgtttttgtaacaccagctgaggagaaaccaatagaaatacagtgggtaaaaccagagccaaaagttgatttgaaagcaagaaagaaacggatttacaaaaggcaaagaaaaatgaaacagaggatggacagtgggaaaacaaaataagtcaatggaaacctgatttgtttttcagttactttatatttattttgtattcaatgtgtaaatacttttattatctaatactatcttacgtctaattagtgtagcatttacaagaaagaaaaattaagatcttaaaatcagtgattatctttttctaaataaaatatcaccagaattcatcagttaatttctgatttctttttgaagtttgtgttgctaaaaatgtagcacacttaatgtagcctgttctcttgggttggaatttttggtttagcaaagctgaaattcagacatttattaggtcatattatttgtaaaagcattcaacacttcaagagcatcggttgtggatggtaaagtaggagtagactggtagaaaggaaggcatctcactgaagtttactcagtcatcagttaatgaagccatggaagaaccaacccctgatctgtcacttcaaaaaagagtatattaaaatgttgaggttttgagaatcaaatgcattaatggctgtgttgaaagcactttgtaaattttttattttattatattttatttgtgagacggagtttcgctcttgttgcccaggctggagtgcaatggcgcgatctcggttcaccgcaacctccacctccctggttcaagtgattctcctgcctcagcctcccgagtagctgggattacacgcatgtgccaccacgcccaactaatttgtatttttagtagagttggggtttctccatgttggtcaggctggtctcgaactcctgacctcaggtgatctgcccacctcggcctcccaaagtgcttggattacaggcatgagccaccatgcccggccaaatgacatacttattttagaagcagtgtgtatagattacttatttagaaaactaatagtaaaaggagagaaaaataggacagttgttaaaggggataccagaacatttgaatttttccccacatgaaagagaaactgcctattgtgtaagggggcactaggcttaagatcttatgggtaaattagtaacggaaagaaaagattctgagtaccagtgaccatggaggtaggtggctgctgacatggacagatagaaatacaataaaatatatatctaatgaaatgacacatgctgtttcatcacctgcttttttgacttcacactgattgtttttctatgtgtttgttccacatgtttacttgctaactgttaactgtagtattctgtgtaccatagctatgtaatcagtattttcagtttttcctcttttttttgctggtatcgatgcttgtagtgaatacttatatagatgtgttacatgtctttttacacaacacttggtttcctagaagtgcaacttaggttaaagattatgaactctaggctttttgcttgttccctccaccaccataacctcactagaggctattagagggttcatttccttgtccccttaccagtttcactatgcatgaaagaatctgtcaattcaataggttaaaaaaaaaaaaccacctttttttttttttagttactggtttatcctttttgactggactaatcatgtttgtttttctgtggtaggattgtcttttactgattctataagtgcttttatatagtaagtttattatagagatctttcctagttcacttacattttaattttatgtctttattattttaagtatttaggcagaatgatcaatattgatggtttttttttccttaaattttttgctaagaacggccttcctgagtgcttaattggccttgaaatagtctaaattaggaaacttgaaatcttgaagtcatctaaattatgcaggtaattcaggtgagaggatcacttgaaatacttgtatgtgactagggccaaatctagttaaatggaaaaaaaccaaagtggccgttattttatttaggcagttgaatatagtcttggataaaaataagacagccgtattcagaatttgtttttaaacacccacatctcaggaacaagttaattataggttataaactagatcaacaaattgtaagttttagtagagatacaaacttgtacttttgatgtgtgcattgtggagttttggtgtaatttccaatttcacaattttcaattaacagtttccataatagagatatccttatatctcaaattccctttcacaattatatggatatcttatttgagaattcttctggaatggatcatctctaaagtctggtcatttaaagggcaccagtttaataaaagatgttcctttatttattagcggcagggtcttgctctgtcacccagggctgtagtgtggtggtgtggtcatagctcactgcaggctctaactcctgggctcaagtattcctgcctcagcctcctgagtaactaggactacaggcccacgccaccatgcctggcttttttttttttttgtagagacaagttctcgctatgttgcccaggctcgtcttgaactcttgggctgaagggatcctcctgcctcggcttcccaaagtgctgggattacaggcatgagccaccacgcctggtcaagatgttcctttagactgaaatttatatccagcatagttacctttaattatacaatgttacaggcaaaaatccttcttacttcagaaggtaaaagaagtaagtgattcctacaggctgtatccaaaaccaaatcaagttggagggagaaaatactccaaattaagttggagggaaaaaaatactttccctttccgtttttttttttttttttgtccctcccttccccccgcccaccatcccaattctgttctcaggaggggaaaggtttcattctcccccaaactcagacttctcaatccttatccattaccaatttaccaactaactgagactgtgtagaatcttcctctggaaaaaagggaagtgtatgaattctgagtagtgagttggttggtcagtggcgtgtgaagtaacctgatgaagcttagcgtgggttttttattttactgggggcagcatattggggaagagaaggataaccttactaaaccgcttgggtacgccaaccctgtgcaatagatattagcaacatagctaaccatacatggttagtaaatacaacccacacctaactgatgcatgtaaacattccacattacagtgaaatatattggtgtattaatgcattttaataattatggtattattttgatacctttcaaagtgtttggaataattgtgcagatagtcagatcaaccaaaacctaccagttaaatactatcctttaactgctttcttaacctaaaccaatcttggaaaggtaggattagaggccagaaagttaggattaaagtgtgttggatggatagatcagcacaatttcatccatgttggtggtaaggcttttcattaagtgtgttgatgcttcccttttaaattgtttccgcttaaataatctaactgtcctttctcaagcatattggtcaagatgatcaataccagatatcttaagtggcagctgaagagaattaaagagattaaaaaaaaaacctgatattcagtccaaccgaattctgctactgtattagctgaggaggcttgagccaaccacttgaccacttggagtctgaatcgccttatctataaaaacggggatccattgagaaattataatcagatattttccagaatcctctcccatcccagctcctatctcccccttcagccctcaggtcggctgccactcacactgaccgccatctgtgcccctcacaatgacaccagcgtggccctgcctcccttccgcgcggccccgcctctcgccccgccgaggccccgcctctcacaccaaggtcccgccttcctcctgttcttcccggccaaggcctaccttcctcccacgcggcccgcctctttccccgccaagctcccgcctttctcctgcgcggcccgcctctctcctcgccaaggccccgccttccttcctcggggcctcgcctctcaccccgccgaggccccaccccctcccgcgcggccctttccggcacagagcccacccctagcccatgcgaagcggcggccgccggcaccgcccccgccgcgctcccgcttgccgcagcctgcgtcgtctgccgccaccgcgcgccttcactgacctacaccaccgccgccgccgccgccgccgccgggctcgctggctggcccggtgcgggcggcggactcccgccggagaggactgccagcgccgccgccgccgccgcttcggcccgggcccgggccccgaccccgtcccgggccccagcgccggccgcccgcccggtcgggcgatgaagtgtcactatgaggcgctgggggtgcggcgcgacgccagcgaggaggagctcaagaaggcctatcggaagctggccctgaaatggcacccgggtaagtacctgtcccgcagcccccgcggccactcggagaagcccggccctccccgaccttcccttcccccgggcggactccgcggagccagcagagagggacctggcggcctaggagctccttgccccgcccggccagtgcccggagccgccctgcccgtctcggtgggcgaagcgctctgccctggcgcaccccggctcacaccccatctcctcatacccgcgaccccggccccgcatcgccactgtagggggaaaactgcagtccaacaacctcacttgctcccgctaccgggtcgcagacaccacgagggagcagtcgggaactcggaactcagacctgccccaggcttgcttttccctgcgtcccttgcagcgcagcctctcggtgtttttcctccgctgccctccacctcgtccgggaatcccagatacttcaacctgatgtatggctcttttcgtttcttagttaagaagttaagacacgggagctagtaaaatatcttttcaatagggatgcgcttttttcgctgttttttttttcttttaataagctgtttaagcagaccttgtacttcactttggacatgattctgccggggaaggttttaatcaggcggcttccccagtaaagtttgtatgtttacttagaagtatccttcctttggatgtttcattggtctgtaatccaggcctgtgtgacttttatgaagtaatctgatcttccaggctgggaaactaagagag

SEQ ID NO: 3026 - DNA, 6000 bp, Homo sapiens
caaaaagttaattgagaatctgaaaactcagaacttcaacatagtaattttcatctggaaattattttaaatgatcacaccatcattagtaatatctgtcacagatgcagaagcttaattcaatttcttcatataaagtagttttgaggattaccattcttgtattaaaacactgtattggttgagcacagtggctcatacttgtaatcctagcactttgggaggtcaaggcaggtggattgcttgaggtcaggagtttgagaccagcctggccaacatgctgaaaccccgtctctactaaaaaaaaaaaaaaaatacaggtgtgtggtggcacacacctgtagtcccagctactcaggaggctgaagcaggagaatcgcttgaacctgggaggcagaggttgcagtgagctgagattgcgccactgcactccagcctgggtgacagagcaaaactgcgtctcaaaaaaaaacaaaaaacgaaaaccttctacctgtctgatatcagtaaatctatcatacaccaaagggtatttaatgagaagtcacctaaagtatcaaaattaaaactatataatatcaccaaactttgtttcaccccctatgatatcagataattggagcaatcatttccaagcttccttctgacccaaacgttagattttatgtgatgactaggtgacagatgtttcagaacacaccaaaaaccatttaatgtactaaatttgaaaaaacaaccacctatattgataactgctcccaacatcataaactaggatgggaaggacagcgtgatgctcaccatgctctttcctgagggtcactcaacacatcatatgctgcttggattaatttaaattgttcagctgcttctgcggcattatccagatttttatctgttaaagtcacagaaatttaagtcaatcaaaaacgtacaggacagaatctaaataagacattttccatcagaaatgccacaaacagatgagacgtgcacaaaacaagaaacaaccagggccaagcagaaagactccacgtaacagtcaataatcaggatttgttaaaagcaacaatctaagcagaaatttcaggcttttccctaagccttggtacatcactaaacagtcaactgggctgggcgtgatggctcacgcccactgtaatcccagcactttaggaggccgaagcaggtggattacttgaggtcaggagtttgagaccagcctggtggtcaacatggtgaaaccccgtttctgctaaaaatacaaaagattagcccagtgtggtggcgcatgcctgtagtcccaactactcgggaggctgaagtgggagaatcacttgaacccaagaagcagaggttgtagtgagcctagattgcaccactgtgctccagcaagactccatctctaaaatgaataaaataaaataaaataaaagtaaaacaagtcaactggatatccacaaaaggaaaaacctgagtagtataaattttacttttaaaaggagtaaaataaataaaatcagttctagaaagacttattttgtactagattatgtttagtgctgacattgtttttttctttctcatcaatgtatatcaaaagaaatctcataaagtttaaaaaatatacactaattagttattatttccttagctgtgcttcctgaaccatggaattcagaaagcgtccttgcctcagggtggtacccagcttgcaagacagcaccccgcctcctggcattcacaccttgtgcagtcccttctgtgtcagcaagggtagtctgtgtgaccaacaggagatggcagaagtaatggtacctcacttccgagatgaggttataaaagactgcagtttctaccttgggctttccctctctcttgatcactctgggagtggccagctgccatagcatgagcaactcaggctgcctatggagaagctggagaagctcatggggtgaaggaggccaatagccggcagagcactgaggcctgccacaaccacatgagttggtggttggtgagctggtgagttggtgagctggaagcaggttctttcagacaatgagaaagccaaaaccacctagcaaagccgctcccagattctcatccttagaaactgtgggagtccatatagtcaacataggcttgctgtttttgttgtttgttgtcttaagccctgaggtattggtaatttgttacacagcaatagacaactaatatattcagaacgtaaagcattttgaattgactatggagaacactaaagttcgtttttttttttttttttgagatggagtctcgctctgtcaccaggctggagtgcagtggcgcgatcttggctcactgcaacctctgcctcctgggttcaagcgattctcctgcctcagcctcccaagtggctgggaccacaggcgtgcgccaccacgcccagctaatttttgtgtttttagtagagacagggtttcaccatgttggccaggatggtctccatctcctgacctcaggtgatccgcccacctcagcccctcaaagtgctgggattacaggtgtgagtcaccgcacctggccggagcacactaaagttctttaagctacagctcaatacttcccttctaagaagttacaagaaaacatgacagcaatgtcttatctacaaatagttttgccgccctagaacatggctcttcagggcttcctgctgcccattctcagataccatcacactgatgccataaattatgatgatatttagagaagatatttgcattcagttcctaacaggtttggtttcaaaggagttaactgatactttagtcatatttgcatgcttcttcctagcactgatttctaattaatcaccaaatctggtcatttttccttcccaacatctcctccccttgcgctttccccctcccgctgaccccaagcctggcttgggcccttacctgtctgtccactgcggactctccctaacttctgtctccagccctcttcaatccactaagttgccttcatagtactctcccatggcagcttaataaaaccagccacaactctcccttatttagcgaagcaaatttcacagtccttgggctaatattcaagattacaagaaatacaatctgatttcaaactactcttgtactcaagaaatacaatctgatttaaaatcactcttcagaaaattacatacgcttttggtcacagcattcgctacttcatttaccctttcccacctagaaagtcaaggaattccgaacttccttctaattcctaacttgatttctaacagtaacaacccaaactcctaagaatatgcttctacactaacccaaactctaagaatatacttctacactatttttacatttattaattttggctgtatcttctgacttactgctatgatgaacatcagttcatttacttctgctcttctaatatatttataatcacattttttcacgcctctgttggtaagcataactttaagtaacagacccacacctctatctctcactccatcaccatagccattcccttttgactttgggtccctgacctttccttccactcctctcataatccctatttttcagacctgcaatacacaccaccttcagtcaaactgtcccccggaacatcttttgtcctccaccatgctatcctccatactgttgagttcacttttccaaattgcattcctctacgatccagtccaaactcctctgagaaggggaagactcaatacaaaatggtaactccctccctgaattcctggagcatatattagttgttccattaatctaaccaccaattatgtatgttgcgatttttttctggcagttgtatttaacttttcatttgtgtaaggcagaaagttgttttcctaacaagactctaagacccctgtctcagcatttccaaatctacttagtagagtgcagtgacttgcatatattggatactctgtaaccgtgtttactgatgaatgctaatatgaaagcctcttcatatgaacctcaaaaagctgaaagtcaactactctcttagtttcccagcctggaagatcagattacttcataaaagtcacacaggcctggattacagaccaatgaaacatccaaaggaaggatacttctaagtaaacatacaaactttactggggaagccgcctgattaaaaccttccccggcagaatcatgtccaaagtgaagtacaaggtctgcttaaacagcttattaaaagaaaaaaaaaacagcgaaaaaagcgcatccctattgaaaagatattttactagctcccgtgtcttaacttcttaactaagaaacgaaaagagccatacatcaggttgaagtatctgggattcccggacgaggtggagggcagcggaggaaaaacaccgagaggctgcgctgcaagggacgcagggaaaagcaagcctggggcaggtctgagttccgagttcccgactgctccctcgtggtgtctgcgacccggtagcgggagcaagtgaggttgttggactgcagttttccccctacagtggcgatgcggggccggggtcgcgggtatgaggagatggggtgtgagccggggtgcgccagggcagagcgcttcgcccaccgagacgggcagggcggctccgggcactggccgggcggggcaaggagctcctaggccgccaggtccctctctgctggctccgcggagtccgcccgggggaagggaaggtcggggagggccgggcttctccgagtggccgcgggggctgcgggacaggtacttacccgggtgccatttcagggccagcttccgataggccttcttgagctcctcctcgctggcgtcgcgccgcacccccagcgcctcatagtgacacttcatcgcccgaccgggcgggcggccggcgctggggcccgggacggggtcggggcccgggcccgggccgaagcggcggcggcggcggcgctggcagtcctctccggcgggagtccgccgcccgcaccgggccagccagcgagcccggcggcggcggcggcggcggcggtggtgtaggtcagtgaaggcgcgcggtggcggcagacgacgcaggctgcggcaagcgggagcgcggcgggggcggtgccggcggccgccgcttcgcatgggctaggggtgggctctgtgccggaaagggccgcgcgggagggggtggggcctcggcggggtgagaggcgaggccccgaggaaggaaggcggggccttggcgaggagagaggcgggccgcgcaggagaaaggcgggagcttggcggggaaagaggcgggccgcgtgggaggaaggtaggccttggccgggaagaacaggaggaaggcgggaccttggtgtgagaggcggggcctcggcggggcgagaggcggggccgcgcggaagggaggcagggccacgctggtgtcattgtgaggggcacagatggcggtcagtgtgagtggcagccgacctgagggctgaagggggagataggagctgggatgggagaggattctggaaaatatctgattataatttctcaatggatccccgtttttatagataaggcgattcagactccaagtggtcaagtggttggctcaagcctcctcagctaatacagtagcagaattcggttggactgaatatcaggttttttttttaatctctttaattctcttcagctgccacttaagatatctggtattgatcatcttgaccaatatgcttgagaaaggacagttagattatttaagcggaaacaatttaaaagggaagcatcaacacacttaatgaaaagccttaccaccaacatggatgaaattgtgctgatctatccatccaacacactttaatcctaactttctggcctctaatcctacctttccaagattggtttaggttaagaaagcagttaaaggatagtatttaactggtaggttttggttgatctgactatctgcacaattattccaaacactttgaa

SEQ ID NO: 3027 - DNA, 6000 bp, Homo sapiens
actgtctctatccacagttgatataattacctacagagaatgtccaaaggatctgcaaaaggcttcattcaagaactagtaggtgagtaaaacaggttgcaagatacatgctcaacatggaaaaatctattgtacttcaatataatagtaacaaagaattagaaattacgttttttaaagcatcatttataataacaatacaatataatatactttataataaatttaacaaaacatatcatgatctctatgctgaaaactacaaatcagtgataaatttttaaaaatgaccaagtaaaaggtctctgtgaattaagtcaaactgatttcgacattaaatcccattctcttaaatgctacgttatccaatttgtctctcttgagtagcaaaaatactttgtgaggctaagtaggtactgttatttccgttttacagagtaagctggagctgctatggccaagcactcacactcttaggtatgtactcatggaaaatgaaaacttatgttcacacgaaacccatatgtgaatgtttcttgcagctgtattcataatcaccaaaaactgcaagtaactaaactcaaatgccctttaatgagtaaatgaacaaactggtacatccattaacatggaatactaatcagcagtaaaaaggagcaaactactgatatacgtaatgaatctcaaaggcattatgctgaatagaagaagccaggttcaaaaggttacatatggtataagtatacatgtgggacagtctcaaatggaaaaaagtataatggcagagaacaaatcagtggttgctgaggttagggatgaggagagattgtaactacaaaaaggtagcatgagggagttattcagggtgacggaactgttctgtatcctgattttggtgttggttacatgaatcacatgtgttcaaatttatagaactatacaccaattttaaaagttaattttactgtattttaaaaatagaatctaaaaaaaccaactaatagcaaacagaaaactaaagaaaaaaaatgagataccacaacacacctactagaagagctaaaattaaaaagactgaccataccaagtgttgataaggatataggacaactggaaatctcatacactcctggtgggaaggtaaaacggtaccaccacttaggcagtttcttaagaagttaaacatacacctaacaagttgactcagccattccatttctaaatattacatcaagagaaataaaaacataagtccatacaaagacttacacatgaatgttcataatttatttgtaataacccctaactagaaacaacccaaatatctatgaacaggtgaatggataaacaaattatggtatatacatacaatggaatattactcagcattaaaaagaaataaactactgataaacacaaaaacatggatgaatctcaaaataattatgctgagtgaagaacctaaaaaacaaaaaaaaaaaaaagcagaatatgtgctgtatgcttccacttaaataaaattctagccaggcgcactgtctcacatctgtaatcccagcactttgggaggccgaggcaggcagatcacaaagccaggagttcaagaccagcctaaccaacatggtgaaaccccgtctctactaaagatacaaaaagttaactgggcagggtggcacacatctcagttacttgggaggctgacgcaggagaatcacttgaacctgggaggcagaggttgcagtaagccgagatagcgccactgcactccagcctgggcgacagggcgagactccatctcaaaataaacaaataaaaataactaaataaaaattataaaaaatacaaactaatgtatagtgtcagaaatcagatgagtgcctatccatggaagcagaagcataaggcaagactagaaaggagcacaacaaattgttgtggatattgaatatgttaattttcttgactgtgttgatggtttcacagatatatacatatgtcaaaacttaccaaattatacattttaagcatgggcaattttttttgtcaattatacttcaataaaactctcaaaatgcaattacaattatgtaagaaaatatacaaattagtgagaatatgtaaaaataaaatattcatgttattgtagaatagacatgactgttaatttgaaactttaatggtattgtatctctatataaatgaatgatacaaaaactggtataaatatatttgtttgttgttttttgggcttgttttttttttttttttttgaggtggagtctcactctgtcacccaggctggagtgcagtggtgtgatctcggctcactgcaacatccgcctcccaggttcaagtgattttcctgccttagcctcccgactagctgggattacaggcgcgtgccaccatgcccagctaatttttgtatttttagtagagatggggtttcaccatgttggccaggctggtctggaactcctgatctcaggtgatccacccacctcggcctcccaaagtggtgggattacaggcatgagccaccggacccagccataaatggattttttaatgggcaaaaggtttgaacaatacttcaccgaagatctgtagatagtaaataagcacatgaaaagactgtcaacatcctcaggcattaggaaaatgaaacttaaaatcacaatgagataccactatatacctatcaaaatggctaaaataaaaataaaaacacacccaaaaatcagataatactaagtgctggtgagggtgtggaaacaactagaattttaatgcattgctggcaggaatacaaaatggtacagccactttgaaaaacagtttggtagtttctcataaagttaaacacacattgatcacacaacttagtaatcccactactagatatttacccaagagatatgaaaacttacgttcacacaaatcctgtatgggaatgtttgtagagcttttgtcacaatcacagaaactggaaacatcctaatgtccttcagcttgtgaacagataaactggcaaacccatacaatggaatactactgagcaataaaaaggaacaactactgacacatggatgaatctcagctacattatgctatgtgaagcaagccagactcaaaagtctaaatcctgtataattccatttatatgatattctagaaaagacaaaactataggcccataaaacacatcagtagttgccaaagggtgtgggaatgaactactaaggagttggaggaaattctgatggtgatggaattattctattacttgaatccagtgaggttactctactcatttgtcaaaaacaataaaactgtacaccataaagggtgaatgttactgtatgtaaattatatttcaatttaaaaaaactcagtctgacagtttgcatatttttaattttactgacaacttatggaaaagaaacatctctctgcttgcaacctgtcaagaaatacttaacaccatgctatgttctttgcaggcttttttctttttttgtgagacatattccctgcctgacagaggagctcattagggaaacaagtctaaatattaaaataagttacagaaaaaggccaggcaaaaataaattaattgagtgataaatcacagaatacattttatatgtgtgggaaatgaatggcacataatcttggaaaggtcttagtgcttctcaacattgctgatcttatattatctctaactttcaagtgaggatgttgagacttggagaggacaagtactttttccgtgattcccgagctatcaggtgtcaaagctgagattctaacccacgcctcttcgcccaaaacctgacattttctgcatgcggcgatggaacaacacagaagaggttacgacggcggctacacagtgtgatttcaatggacagcaacgcctccttactccccaaacaacccgctcaactacttggcacgaatcctacacagtaacaccatgattattgccacgtttcttaaattgagctcaacggggtcttggaatgtcaactcccgagaaaggaatcagcgagccttgtggggatatggacctacttctgacaagtcttggtagtaaggaaggcgcatggggccagcgccggagccagggtgccaccgaaaagggtaaacaccaagaaagaagacagccgaggcgctgaagatactcctcttcaattacaccactcagctctgggtcacaaggcggggaacagcgtacgaaaaacccctcccctggcccttctagcccctttggtgaaagatttccgtggacttttccctgcctccgtcgccagtccagggctaaaactgaggctcctctacaggcgtggctgggaggaaagtggtggtgcgccttaacagcgcaagcagcccggggcacgccgggggaaggcgctgggtagtagggaccgcggacgcacgaggccgggccaaggcgcccagagccgggccgggtagggctccgatgccagagtgaaggggtcgacaggggagaacgaactcgggaaattctctccggtgacaccctaagtgtcgcatgatgcgttagttgactaggggctctcacttttccctcctttactgacctcgcaatcactgaccacgcaatcgctgcccacgccgccacctcacctctccagttcttgtactgcgggatgtagtagtatttgttcccgaattggtccgtgcccacgtgctccttcacttcccttgacagcgatctccacaaggcgcggaacaaatcctgagaccaacccatgccgtccacccagtttccagcgctgccagcagcgggacccgcagtaggggtaatgctccagccgccgacccagcccaccgaggcggagaagtcaggtcggcctccatcctggagcccttctagtaacggcgctcaccattggccggatatatcaccgactgaccaatgggagactctgctgttccagtcccgcccctgagctctgtcatggcgacgtccagtgctccagccggtgtgaggacacgatatgctggggtttttgtccgcacgccaaacgggtttggaggaccctcttcgccttcggagagcagagtcaacacggaggtaaagaaaaccttactttttggctaacaggccagttagaatctggaccaatgactgtaagctttgccccacactttcccgtctcatcgctctcctgccaccaaactattatttgccctctaatgctgtgtggcttgctaaaataggatcccttttatttactggtaacaacttgcaggcggggggcggcgggggtggggggggttccccgggggtggggggggggttcccccgcgggctcaggtgaagacactataaacctaaataagaatacttcgttgtactgtattccttctctcttaagttactccaaagaataactgccctccacggactcgttcattcattcagtctgcatatttagtgaattcctacagtgtgccaggcagcctattaaaggcagaggacacaggccaggaattgaacaaagttcagaatgactagagcggagaattggggtagggaccattgacaagagatgaagtagacagaaactagatgaggaagagccttgtgtacttgagtagaggtgtgaagatgagaataaggtaacagctattgcattttgttttctgcttggagaatgggttgcaactgagaacaagagtgggagccaagttaggtaactgttgtgattacacttgtccgggagagagttgttggaagcctgggccacagagttgccaagtagaataaagatagtggagagatttgaacaacgtctgagaaatagaatcaacaggccatggaaattgagtggatacgtgaatgacaaaaagagaagaatgaataatgattcccagatctatgccttgtataagaagttgaatgttggtaatatactctgagagagggttttccaaagggaagaagcaagttgtacttttaattttgcc

SEQ ID NO: 3028 - DNA, 6000 bp, Homo sapiens
cgcatagtggcctgcagaagccagaactctgaggaagggaaattgttttctctgttcatcagagtcccgatcccaagagggtagggacaatccctgttgtttattgcctctcttctcacttctgagcccagacttgggcctaaacttggaagcgtatggcagaacagggtaactgaaccctaaagtttctggctagatggccaaaacagggagtcccagagaactgggaagcatccaggagatcacagagaagaaggagctcaggaaagtgatcccataaagttgtttataaactccagaactcatccctgagtgaggcatgcatagatctaaccctgagtcgtatacaaaggattttgaaaattgagctaatcactcaggtcacagtctgaccattgaatggcatacacctggggaagatctgaagagactttgaaaactgagctaacattaaaactacagtccataagtaggtaggttcttgtagcctgaacctaatcttgctaattaaatgttaaaacaaaaatatcaacattcttcataggatcaaaacaagacccagagtattcaaaatgtccaggatgcaaatccaaaatttccctgcatataaagaaccgtgaaaatttcaacttgcatgggaaaagacaaacaaaacaagccaaagctgagatgacacaagtgttgagattatctgataaagacttcaaggcaaccattgtaaaatgcttgaacttgagcaacactggcatggtggcccgagcctgtaatcccagtgactcttgtgaagctgaggcagggggactgcttcagcctaggagttcaggaccagcctgggcaaaacagtgaggcctcatctctaaaaataaaaaaaaagcttgagtaagccattgtgcacacacttgaaacagatgttaaaacagaaagtctcagcaaagaaatagaagacataaataaaagccaaatggaaattttagttttcaatataaaattattttaacttaatgtattcactaacagattggagatggcagaggaaaaaatctgtgaacttgaagatagatccattaaaattatacaatctaacaatatagaggaaaaaagatcgaagggaaaaagaacaaagccttagggatcagaggaacaattataaaaggactaacatttttgtcattggaggtctagaaggagaagagaaagagtgtagtgttgaaaaaacattggaaaaaatggctggaaagttcccaagtttatggaaagatataagtctacaagttcaagaagcagaatgaaccctaactaggataaatccaaagagatctgcaaccagacacatcataattaaactgctgaaaactaaagacgaagtcttcaaagcaaccagagaaaaatgataaattacctataggaaaacaatgatttgaatggctgcagattccttttcagaaaccattagacctactctaaaaaaattgataaactatattcttcagagacaagaaaaagatataagaaggaaatttgaggcatcaggaataaagagacagcaacagaaataactatctggttaaatataatggctacttttttccttaaaatatgattgatggttggaaaaaattataatgtctgatagagtatataatgtatgtaaatataaaatataagacaacaatatatatatggtgcaggggaaagggtgataaggtttctatatgccaaatgaagcagtaaaacaatgaaatgatccgaagtagacaacgaaaagtaagtattttataattcctagagcagccactaaagaattatacaaaaagatatagtcaaaaccatagtatataaaatagaatactaaataatgttcaaacagtcaaatgaaagcaggaaaggggaaacataaatatggagcagctagcactctcacctattagtggtgggactggaaaatgcttttggaaaactgtcagtttcttaaaaagtaaaggatttatctagtagctccactgttatgcattaacttcagagaaataaaagcatatgttcatacaatgactcatacatgaattttcagagcagctgtaaatgtattagtcctgaactggaaacaactcagatgtccatcgacaagtgactagataaactgtggtatatctgcacagtgggatactccacagcaaaaaaaaggaattgatacatgcaataacatggagaaatttcaaaataatgtaattatgctgagtgaaagaagccagacaaaaaagattccatttatataaaatactagatatgcaaactaatctatagtgacctaaagcagattagtagtttctagagaaggaagagggtaaagcagagaaagaagggagacagggattataaatgaccgtcaaaaattttttagggttatggatgttctcttgattatggtaatggtttcaaaagtaaatatatgtcaaaattcatcaaattgtatattctcatttaatgtgcagggtattgcatgtcaattatacctcaataaagttgtaaaatgtttttttagagggtgtaaactgtgaacactgcatatcagtgttcatccttttgctcttacatgatgacaaggaagaacagtagacatctcctatgaataaaatggaactatataattgtttaagcaaaaacatcacttaatgatggaaatatttttaaaaaaattttaggctgtgtggtagctcgcacatataatcccggcactttaggaggcaaaggcaggaggatcacttcagcccaggagttcaagaccagaatgggaaacatagggagaccccatctctacgaaaaatttaaaaattagctaggtgtgtgggcacatgtctgtggtcccagctacttaggaggatgagatgggaggatcatttgagcctggaaagtcgaggctgcagtgagctgtaactgcaccactgcattccagcctgggtgacagagcaagaccctgcctcaaaaaaaaaatatttttttaatttttaaatactttatttgtcttaaacgtataagcaatcctcacttggcacagtctgatatgaatttcagttaccacagtttattaaccgtgagaaatagcataaaagtttgctactagcttttcagttcacaaatcattacataaataacatatgaatcaaaattgaccaatttgcaattttacttctttcaaagtctatgggtgattggtcactgtgcatctgttattcagttcacacacaggctgcaaagcatggaggtttgttattaatatttctgtgcccttgagataaacccacatggaattttacagattaaaagaggaaattggccaaaagaatgaaagtgcactaaagaagagtgataatactagaagtgaaacttgcattaaacataaatggagcaaatgaaaaaaaagctgcctgtgggaacatgctgattgtggcaacaatgacactgccgccatttgagacattctagatatgcagactgaggaaatcagtgaaggtgaacttatagacataaatgaggaaaagtgattgtgatgaaaggctgatgatgtgtcagaggaagtgacactggcaaaaaaaacacattaaaggaactctcagagatatttcacaacattgaaaacgtaatggataaaatgttggaaactaatatttaaatttctccagaacgcagaactcataagcaactgtgttctccaagtaaatatcttcacaggttcctcaattaatgtgggcaaaattaaaagtacaacttgcttcttccctttggaaaaccctctctcagagtatattaccaacattcaacttcttatacaaggcatagatctgggaatcattattcattcttctctttttgtcattcacgtatccactcaatttccatggcctgttgattctatttctcagacgttgttcaaatctctccactatctttattctacttggcaactctgtggcccaggcttccaacaactctctcccggacaagtgtaatcacaacagttacctaacttggctcccactcttgttctcagttgcaacccattctccaagcagaaaacaaaatgcaatagctgttaccttattctcatcttcacacctctactcaagtacacaaggctcttcctcatctagtttctgtctacttcatctcttgtcaatggtccctaccccaattctccgctctagtcattctgaactttgttcaattcctggcctgtgtcctctgcctttaataggctgcctggcacactgtaggaattcactaaatatgcagactgaatgaatgaacgagtccgtggagggcagttattctttggagtaacttaagagagaaggaatacagtacaacgaagtattcttatttaggtttatagtgtcttcacctgagcccgcgggggaaccccccccccacccccggggaaccccccccacccccgccgccccccgcctgcaagttgttaccagtaaataaaagggatcctattttagcaagccacacagcattagagggcaaataatagtttggtggcaggagagcgatgagacgggaaagtgtggggcaaagcttacagtcattggtccagattctaactggcctgttagccaaaaagtaaggttttctttacctccgtgttgactctgctctccgaaggcgaagagggtcctccaaacccgtttggcgtgcggacaaaaaccccagcatatcgtgtcctcacaccggctggagcactggacgtcgccatgacagagctcaggggcgggactggaacagcagagtctcccattggtcagtcggtgatatatccggccaatggtgagcgccgttactagaagggctccaggatggaggccgacctgacttctccgcctcggtgggctgggtcggcggctggagcattacccctactgcgggtcccgctgctggcagcgctggaaactgggtggacggcatgggttggtctcaggatttgttccgcgccttgtggagatcgctgtcaagggaagtgaaggagcacgtgggcacggaccaattcgggaacaaatactactacatcccgcagtacaagaactggagaggtgaggtggcggcgtgggcagcgattgcgtggtcagtgattgcgaggtcagtaaaggagggaaaagtgagagcccctagtcaactaacgcatcatgcgacacttagggtgtcaccggagagaatttcccgagttcgttctcccctgtcgaccccttcactctggcatcggagccctacccggcccggctctgggcgccttggcccggcctcgtgcgtccgcggtccctactacccagcgccttcccccggcgtgccccgggctgcttgcgctgttaaggcgcaccaccactttcctcccagccacgcctgtagaggagcctcagttttagccctggactggcgacggaggcagggaaaagtccacggaaatctttcaccaaaggggctagaagggccaggggaggggtttttcgtacgctgttccccgccttgtgacccagagctgagtggtgtaattgaagaggagtatcttcagcgcctcggctgtcttctttcttggtgtttacccttttcggtggcaccctggctccggcgctggccccatgcgccttccttactaccaagacttgtcagaagtaggtccatatccccacaaggctcgctgattcctttctcgggagttgacattccaagaccccgttgagctcaatttaagaaacgtggcaataatcatggtgttactgtgtaggattcgtgccaagtagttgagcgggttgtttggggagtaaggaggcgttgctgtccattgaaatcacactgtgtagccgccgtcgtaacctcttctgtgttgttccatcgccgcatgcagaaaatgtcaggttttgggcgaagaggcgtgggttagaatctcagctttgacacctgatagctcgggaatcacggaaaaagtacttgtcctctccaagtctc

SEQ ID NO: 3029 - DNA, 6000 bp, Homo sapiens
ggtttattttactgttttgtgatcttgtatgcaaatcctgataaccattaaccttctcaaacttaatgtctgagagcctcataaaatcaacatatttacttattaagcagtttatgaaactttaatggggcccctcctgtgccaagggtacgtatattgtgaagtaaagcctcacaaagctaaataaattctcttccatacctttaatgatttctagaatatgctttaaagaagtcctccctgagagttaagggtaggtcatgagcaagaaatagaattggctttgagtatgcttctgtatttactcagttgactgtgggttaatttttacttatttctactactccacagagttgatctacttctcttataaattttttgctgtggcctagtgtaaatgttgttcagcacaaatatgagagtttgatgctggcaataagctgttcaggtgactcattgaaaaacatgattcaggccaggtgcagtggctcatgctttgttaataccagcactttggggagccaaggcaggttgatcacctgaggtcaggagttcaagaccagcctggccggcaggtgaaaccccgcctctactaaaaatacaaaaattagccaggcaatgtgacacacacctataatctcagctacagggaagctgaggccagagaatcacttgaacccaggaggcagaggttgcagtgagccaacattgtgccactgcattctagcctggtcaacggagtgagactccatccaaaaaaaaagaaaaacataattcatttcttttttttattatttaaaaatttattgccaggcacagtggctcacgcctgtaatcccagcactttgggaggccaaggcaggtggaccacctgatgtcaggagttcaagaccagcctggccaacatggtgaaaccccatctctactaaaaatacaaaaattagctgggcatggtggcaggcgcctgtaatcccagctactcaggaggctgaggcaggagaattgcttgaacccaggaagtggaggttgcagtgagtggaggtcacaccactgcactccagcctaggcgacagagcaagactctgtctaaaaaaaaaacaattatttgggaaaattactttagcaaaagaaagcccagggccaggccgggtgtggtggcttatgtctgtaatcccagcactttgggaggccgaggcgggcagatcacctgagatcaggagttcaagaccagcctagccaacatggtgaaaccccatctctactaaaaatacaaaaaatcagctgggcgtggtggcgggcgcatgtaatcccagctactcaggaggctgaggcaggagaattgcttgaacctgggagccagaggttgcggtgagctgagattgcaccattgcactccagcctttccagcctggacaataagagaaaaactccgtctcaaaaaaaaaagcccaggaccattattttgctttcagaaatacattcggattcaggtagtgaagagtggtatgagtaatactgtgagccaacagttagaaatcctaataccgaactgtggatgtatatctgagggcaatctttactacagctgctgccgtgaaagtcagaatgaagaaaatctgtcactgttacagaatttgtgagtataggtatggcaaaaggtacgccagtgggaattgctgtcacaggatgagctcccaaggagagtattatagacttctggtgaggcttacagttaaatagcctgtattttcatttagaggttaggcacttaaatatatgtaatcagcaaattgcttaatttgtccaagtttccgtttttctttccagtactacacagtgggatagtcaggatcaaattagtgtattatctattactttgtaacaaatgaccccaaaattaagtggctaaactcttaatttctctggtttctctgggtcaggaattcagaagcagcttcactgggcagttttgatttagtgcctaatgcggttgcaattagaagccactgaggctacagtcatctgaaggcttggctgaggctggctgattcacctccaagatggctcactcacagagctgacaagccgatgctggctgttggcaagaggccttagtttctctccacatggttgcctgagtgaattcatgacatggctggctttcaccagagcaaataatccaagcatgccagtcaacagcatccttttatgttctagcctcataaatcacacttcagccatattctattggtcacacagaacaacctgtttcattgtgggagaagaccacacaacaggattaataccggaaggcaaggatcatcatggccatcttacaagctggctaatacagatgcatggaagtgctttaaactgaaaaatgctttgcaaatgtgtaatgctattttctttttttttcttttggttcaaagtgctcaaatgatattttatatatacagtatctcactgtctcagaatatcatctaaacgctgtcttcattatcctattttaaatgtcccagaatgggaatttacttgtcagcagcacgctgtaatacactgattatcaactcatacgccatggcacacttggggacctcaagtctcacaacggcatcatcagatttagctcactagcttctctctctctcttttcttcctttcttcccttctttctttcttttgacggagttttcactcttgttgcccaggctggagtccaatggtgctatctctgctcactgcaacctccgcctcgcgggttcaagtgattcttctgcctcagcctccctagtagctgggattacaggtgcctgccaccacacccaactaatttttgtatttttagtggagatggggtttcaccatgttggccaggctggtttggaactcctgacttaaggtgatccacctgcctcggcatcccaaagtgctggattacaggtgtgagccactgcacctgccgctcactagcttatttctacaagtgaggttaaattattatttcaatgatacctgtcagaagaaactatgacaacagcatcactaggtatgacttgcctcaagagagatggtgtcttttctgcaatgtgtgagttttgcctagacccaagtaatgacaagggactgaaagataatggctaacatatagtaaacacttaactgtcaaacattattctaagggctttgcaggtgtgaggtcatttaagccttggaacaatcctttgagtagatcctattagggatgaagaaactggaaacaaagtaagtaatttgccctagttgtatctagtggctgaatactgatagggccactattcaaatgcaagcagtctgattccagagttaaaaaaaataactaaattattggccttggtattttgctactttcttcaacatatctctgaaacttaggattttcaactcttagaaataacaaatataggctgggcgcagtggcttacacttacaaataccagcactttgggaggccgaggagggtggatcacctgaggtcaggagattgagaccagcctggccaacaaggtgaaaccccgtctctactaaaaatacaaaaattagctgggtgtggtggagcaggccagtaatcccagctaatcgggaagctgaggcaggagaatcgcttgaacccaggaggcagaggttgcagtgagctcagatcgggccagcgtactccagcctgagcaacagagtgagactgtctcaaaaacaaacaaacaaacaaaggcagggggaggggggcacatttccatgttgacagctgctctggctcagaaacttttaattatccactagtagagccatctggattactgcaatagttctctaataggccttctttctttttcttgtccctcaaaatctataatatagtctcccaacagcaagagtgaaccttttaaaagtgagtcaggtcatatcacttgtctgctccaatccctccagtgggttttcagtgatgactttcttgtaccaccctatttaaaacctccatccctgcccctgccctgatttgttatcctttatctgctttattatctctatagcacttatcacctatgtatcataacacatatttgacttgtttttttatctcctcccattggaaggcagggatctttgctccctgctatctcagattctacaatggtgcttggcacatagataacactcaatatcagcatcctaagagagagaaaaatgaaaaaggaaaagcactcaatatgtttttgaataaatgaattagtgtgtttgttatgacaatttatgataatcaaggggttgggtactcattactgctaagttaattgagcactgtctcaattaattgagttaatgtctaagctttctgcatgtttcatttaatacccacaatctcctgtgatgtagttcattattttttccattttaccgagtagaaaactgaggactagaagctgattcccacagcacgtttcagttgagttggattttgttttcctgggcctgcttcttcataaagggactggactaagaatactcttgaccagcccgtaagaacttggcactcgtctcagtaatctgagatagcagggtttggcgtccatagcaaccacggcgacaggacgcgctcgagcaagaaccaaaaagcgagaacaggtacaaggccaaactttctacattcacagacacctaccaaaccccgaacatggaacaccaaattagaacgctgaccagttcctggtaatgtagaaaacacccaagttaaaacggcaacagagtgacacagcagccattgaagatgccccacttcaggcaccgacaggcgtcacgtgacgggtggggaacgccaaccgcctgggcctagcgcagcttcctccgcccaccacggaagtgaggcggggatactaaagcgacggagcccggtggacggaagtgggtgttggaggctttaaggtagctttaaattcgtgttgtcctgggagctcgcccttttcggctggagtcgggctttacggcgccggatggctctggacgtgaagtctcgggcaaagcgttatgagaagctggacttccttggggagggacaggtgaggctctctggaaggacggggagggccccaagcggacagccccgcgccgcctccacctttgcgggttttcccgtggaggccagaggtctggcttggctgctcgttctcgttgggggaaaccgtccagacgcacttgctgcccattctttacatcctgggggtgaatccctgaggggcctctccttgctgaagagtagcctggagctggacggagactgacccgccacgtttccagccgccgcgagtctgctcaggaactctgggctctttgcttcgcgaaatgtaaaaatgcaaaaaggcaaacacaaaaactcccataaacttatgttatttctatttttctttctagtttgccaccgtttacaaggccagagataagaacaccaaccaaattgtcgccattaagaaagtgagttacctttttatgttgtttttaagtctccttgaagatgtctgtattattaattgactgatagccattttattagtcttgaccatactctgataatgagttactcatgtcattttcagagacaaaataattaattagtgctttgtgttcccaaacggaactctagggttgaacccgttttaatttctattgaaatgaagaagaagctgtatgttatttttactgcataaattcatatgttgtgggcaagtactgcccatcttttcggtcctcagaactattggataccatgatctttctaggtcactgtttatacctcacctgcatccactcagtgtgtcgtatctgtattttctgtgtacggatttaccatgaaagactttcactagcatgaacaacattgatgtgaggtctaaaatgagttcagtagcttcttatattcattcaaaagacctgggtcggattcagtagcttcttatattcattcaaaagact

SEQ ID NO: 3030 - DNA, 6000 bp, Homo sapiens
acaccattctcctgcctcagcctcctgagtagctgggactacaggtgtccgccaccacgcccggctaattttttgtatttttagtagagatggagtttcaccgtgttaagcaggatggtctcaatctcctgacctcatgatccgctggcctcggcctcccaaagtgctgggattagaggcgtgagccaccacgcccggcctacctttgacttttaaaagacgacttgaaccaacatatcaatatatgctgtctaaaatagatgtgtcaacgtttaggattaaagtatttatttttatatggacagagtctcagtctgttgaccaggctggagtgcagtgacagctcactgcagcctcgacctctgggctcaagtgaccctcccatctcagcctcccgagtagctgggactacaggcatgtgccaccacacctggctaatttttttgttcttgtagaagctaatttttgtattttttgtagagacgaggtctccttatattgcccaggctggtctcaaactcctgggctcaagcaatccttctgcctcggcctcccaaagtgctgagattacaggtgtgagccaccatgcccagccaggattcaagtctttttttttttttttttttttgagacggaattttgctcttgtcaccaaggctggagtgcaatggcgtgatcacggctcactgcaacctctgcctcctgggtcaagtgattctcccacctcagcctcctgagtagctgggattacaggtgcctgccaccacacccagctaatttttgtatttttagtagagatgggatttcaccatgttagccaggctggtctcggactcctgacctcagatgatccacctgtctcggcctcccaaagtgctgggattacaggcatgagccaccgagcccagctcggatgtatttttttctattccagcccaggcatacgtgacttgccccaaatacaatggtaattagcagcagagccaggactagaaacaatatttctggctctttgtccagtcctctggccacttgggaaaggctgtaggatgaatagattacagtctgttagcagtcgtctcacttttccactaaaacaactctttaaaagatgaccagtgacttcctcatagataaatccaagatcaagtttcattcctcagtctcctctacctttgcaggagctgtgacactactgactcactaagtccaggtccacctgactcctgaagcccctagaaatagaaatctgatcctcctccttccctgactcatatcttctcatatctgtcctctaaggctctttttctttttcctgtcccttttgtaaatgtttggcttcttttactaatcttaaatacacatctccaactggatattccaccagcaatccaagcacatcttgctcaaaaacaaattcaccgccgggcacggtggctcatgcctgtaatcccagcactttggaggctgaggcgggcggatcatgaggtcaggagttcgagaccagcctggccaacatagtgaaaccctgtctctgctaaaaatacaaaaattagctgggcacggtggtgtgcacctgtagtcccagctactcgggaggctgaggcaggagaatcgcttgaacccgggaggcagacattgcagtgagccgagattgcaccactgcactccagcctgggtgacagagcaagactccatctaaaaaaaaaaaattcactatcctcccagcccccattccaggtctccctctgagtcctctatttctgcaaatgcatcaactatgctccaaaacactcaggagcaaaactttggaattgttttttcctctttggtcttcacatgccttcagttgctaggtcttctagacccaaaaaaatctccccaaactatgtcattctttgcacattaatttcactgccctggtggaacgtctctttaattccccaaggctagcctgataatttcctaattggtctacttcaagccaacctacatactgctgccaagtcaataatatccaagtgcaaaccgaatgatgtctctctcttgctgtaaaacattccatggctcccatggcatgtataattgtagtcaatgtcaccctgttttcctttttaaaaaaaatgtaggctgggcacagtggctcacacatgtaatccgagcactttgggaggctgaggcgggcagatcacctgaggtcaggagtttgtgaccagcctggccaacatggtgaaaccccgtctctactaaaaatacaaaaattagccaggtatggtggcgggcgcctttaatcccaactacttgggaggctaagcaggagaatcgcttgaacttgggaggtggaggttccagtgagctgagacagcactattgtctgtcacccacgctggagtgcaatggtgcgatctcggctcactgcaacctagacctcctgggttcaagcgattctcctgcctcagcctccccagtagcggagattacaggcgcccaccaccatgcccggctaatatttgtatttttgtagagacggggtttcaccatgttggccaggctggtctagacctccagacctcaggagatctgctcaccggtctcccaaagtgctggaattacaggcgtgagccactgcgcccagccgaaactccgtttcaaaaaaataaaaataaaaataatgtatccaactgaagtgtcaccctgttttctacaacaaagctacagttttcacctccagtttcatctggcagtactccctggatgtactctgcgcttccacgtaagaggaactgcacttgctcccagggctcctccctcagctcagcttggtcacctgcaagcctctattggtgccattcttcaccccaggaatgctgtttcttctcagagccccctcagttcaggacagcactccctccagtagccttcctgactcccttggaccagatgtgatttcttccacatctgagtcttcccagttctgggaggttttactgaatctttttaatagtgcttacttcctacctgacctagactgactgtatattcccttatgcagagactttgtgtgtctcgtttgcttatgcacaacatgtgttccaaagatatttgacagaatcgaaagagaaaaccgattcctgcccggaaacctttggacagaagaatctacattcagtagcctgacaactctgccttagcaaacaagttggtcaaacatgcctaactccatgacaaagaggaactaacttgagccctccctggtgaacaatggcctgctgcactttgctttaggattttgtttcttaacttttcattttagaataattttagatgtacagtaaattgcaaagatagtactaagaattcctgtgtaccttttacccaaattcctctaatgtcaacatttgtgtacaatttgtcgaaattaagaaattaacatgggtacgtgctattaactaaaccacagcctttattattttttccactaatgtctttttctgtttcaggatccaaaccaggatactggcgctatagttttataaggctcaaaattaacagaagagaaaaaaagtaaagcaggtggagaggcagagagagaaatagggtctctgaaatctatttcttatttttttcttatcagacgaggccattaaactggcattcagggaaaaggatttgggcagtttgtccacaacctgcagagtttccacgaatctgcgcatcccgcccctgccctgggtcctccccactcccggttcccacctgccaggtctgaccccgggtaccctctcaaggtccgtggcggggaccggagcccggactccagctcagcgaacagcaccctcctaccgccccggcgccccactcagctcgctcacctggcaagtagcctcctctccgtgcgcgtgcgccgctgccgccgcgcgtcctccgggccaccacgtgaccgcgtgggcgcagtcccagacaggaaacgccggtgaggtcgccctgggccatggaggcagctcgcgctactttttcgcgacctcactgtgttcctgtgtgcaacctgatgttagctctgtccaccttcagctccaaagccaaccacgggtaaccaatatgcaaacaatgacatgagatttagaaaaacaacaagacggggcctgtgtcaatacaggtaaaatttggtggttcaaacattgaggttcagaccggcgcggggtttcacacctgtaatcccagcttttgggaggccaaggcgggaggatcgcttgaggccaggaattcgagaccagcatggccaacatagtgagaccccgctctacaaaaaatttaaaaagtagggctgggcgcggtggctcacgcctgtaatcccagcactttaggtggccgaggcgggtggatcacgaggtcaggagattgagaccatcctggctaacacagtgaaaacccttctctactaaaaatacaagaaattagccgggcgtggtggcgggtgcctgtagtcccagctgcgcaggaggctgaggcagaatggcgtgaacccgggaggcggagcttgcagtgagccaagatcgtgccactgcactccagcctgggcaacagaacgagtctccgtctcaaaaaaaaaaaataattaaaaagtagcgggtgtggtggtgcgtacctgtagtcccagctactcaggaggccgggaggccgtcaggtgggaggatcccgtgagcctgggagatccaggctacagtgaccactgcactccagcctgggcgacggagtggagaccctgtctcaaaaaagaaacaaaccaaaaccaaaatattaagtctctaggaatcctgtaagagaagggtagatcgggccaggtgcggtggctcacgcctgttaacccagcactttgggaggccaaggtgggtggatcacctgaggtcagaagtttgagaccagcctggccaacatggtgaaaccccatctccactaaaatacaaaatttagccggtcgtcacacgtccggaggccgagccgtcgcgtacctaggatgccgcgtggaagccgaagccgcacctcccgcatggcccctccggccagccaggccccctcagatgagagctgcacccaggccagtaccagtcgttcagccaccagcagcggcacccccatctgtagttggctcttctgctgctgcgccccggcagccaggtctgatggcccagatggcaaccactgcagctggcgtggctgtgggctctgctgtgggtcacgccattactggggctttcaggggaggaagtaatgctgagcctgcgaggcctgacatcacttaccaggagcctcagggaacccagccggcacagcagcagcagccttgcttctatgagatcagtttctggagtgtgcccagaaccagggtgacatcaagctctgtgagggtttcaatgaggtgctgaaacagtgccgacttgcaaacggattggcctaatcaagaagttcaacctggagagatggaaaatcagctctcataactaagttaatttagtataaaaatagaattgatagtgagggtataaagtgtaaccatgagttaaacctctcctgtcattcctagcttccttgcttcagaattgaaatggaaggggggtgttcctactctgtagaatctgtgacagggcaaatgtttgtgtggcctccttaaactagctgttatgattttattctttgtgagttaattagaataaagtcattttcttccaaaaaaaaaattagccggtcgtggtggcaggtgcctgtattcccagctgcttggctgaggcaggagaatctcttgaacccggcaagcggagtttgccgtgagccgagatcgcgccactgcactccagcctgggtgacagagcaagactttgtcttaaaaagaggaggtgggggtgggagagagagagagagagagagagagagggagagggagggagagagagagagagagaaatctaagctgaggttcagaggtagaggcagtcattgaaaaac

SEQ ID NO: 3031 - DNA, 6000 bp, Homo sapiens
atatgaaaaacaaagatgctcaaaattaacctgcaaaaagagacacttataaatttttttttaaaaagtggagacatactgggagacactaagggtccttaatataaccaaaaggacagaaaaatgggacctaggaagttgggcaattgaggaagataatcaaagcaggttaagaattcactatgaataaaaatcctgaccaactggtctctccaaaggggagtcatggttatacttcagcaatctgagagaacagatcacaagagtgacgtacacaccagagatcatactatgatctatgtatctgaagacgtttaaggtgacactctagtggtcaaaaatagactgcagtactgcaaattgctgcaactgccaactgttactcctcttggtgacaacaaggagaaaattgcttttaaaaacataactgccaaagcaccaacaatcgaatgaatgacaactttatttttcttacacttttaaggctgatgaaaaaccttcatttcaattgaaaagtatggtaactgtgtttactcattattattagttttctaaaacacaacttgaaaacatccagcatgcatgtttaatatcagtacaatgaattcaagaccaagtatacatgttacattcagcaaggctagattacagattatcatagtcatcatcatcatcatcgtcatcatcatcatcttcacgttttcttttcaatgcatttgatgattcattggcagtattttgtgatgacatcatattagtggtaataagaatgtttttggacccgattaatgatggattaatcagaacattctgaactgctgaggttgcaggaattgaagcttttacagctggagactgagaagtaggcatctgtactgtaaacctttgacctgtgagggacatgggagtccctactttagttgaaacagacatggtctgtggggttggtgtgcctagtgtgggagtacttggtctgctagtaactgaaccaacacttaaccgcgggactgttattcttcccgcagaagttgatgcctttttctgtaaagatttcagcctatagtttggagctgttaagcagtatctatcaggtggcaacctaggacctgaatatggcttgatcaatggcaaaggggtttgatttctttgccttgcaatatctaataaaaaatctcttgggggaggagaggtaaaagactgatcagcgcggcactggattgccaatcgcacatcatctgcatcaacagtagctttcttagcatggcttgaataaatttttgcatcatctagaattgtggtcacatatcggaaggcaaactccaacatctgatttataactcttggctcatattctgtaatccccatatccttcaggatttgtgccatcatctgtgcatctttcggcatgctcttgggagaagccgtcttgccagactccatgatatccgatgatcagactttagatcatttgaaaaaaatatgtacattagatcaatctgaaatagttactttagtagcaactgtcaggaacttaaaaaaattttaaatctatgttaaactgtaaaaaaatttttaaaatttaaaccatatgttttcttaattttaatgaggcaacttaaggtcgctttaatttattgagttcctaccatgtacaaatcattgtcgactataaaaagatgaagacacaaataagggagcgatgaaagattaggggaaaacagggtaaaataaataaaaacaatgatcatcttagaatatatgcagttgcatgcaaatctcacactaatctaagataccatagcatagtcaggtcccacacctgagctcaaaacagtctctttccagtgagaccaatatactcactgtgctcatatatatgtttagcagtaccaaacctttgtttgttcaacttaaaaacattctccttattcacattctacctatccgaaatccagtctctttataggagccttcccaactattcacaagaattgccagccattttgaaggcggaagggaaaatggtcaaaataaccaggacatagcattagacacttaatatttctgtggattccctaacagagtatatattctttaatggcaatctctgttttttgtaccctatgacaatacccagcactaacactccacttaccagaccttaaaaaaaaaacaaaacaaatctaacaccaaagtgtcccttaccttctcgagctaaatcacccacattaatgtatttcagtcctgattttgacgcaagttctttgcctagtgtggtttttccaacccctggtgtacctgtaagacaagccacagaaaaatactgtttgtgaaatactacttatcacactgcggtccaccttctgcctttccttttatttttgagacagagtctcacctggcctctgcccttaaaagttcttgacgactgaaatgaaaaatttcctaattagcaatcatatgtaaaattttttttttgagacagagtttcactcttgtcgcccaggctggagtgcagtggcacaatcttggctcactgcaacctccacctcccaggttcaagcgattctcctgcctcagtctcctcagtagctggaattacaggtgcccaccaccatacccagctaatttttgtattttcagtagagaccgggtttcaccatattggccaggctggtctcaaactcctaacctcaggtgatctgccagcctcggcctcctaaagtgctgggattacaggcgtgagccaccatgcctggccatatgtaaattagcatgtactacgatctaataaaaattttccaaagctaactgaatgtcagaatattacccagtgtattgattctccaggggtggggctcagcagattctgacgccaattcaaactgcctgctgctaccggggaactgctgagaataaaattagccatctcgtgctgggcgcagtggctcatgcctgtaatcaccgcactttgggaggccgaggcgggcagatcacaaggtcaggagattgagacaatcctggccaacatagtgaaactacatctctattaaaatacaaaaattagccgggcgtggtggcgcgtgcctgtaatcccagctactcaggaggctgaggcaggagaatcccttgaaccaggtagttgtaggatgcagtgagccaagatcgcgccacagcactccagcctggcgacagagactccatctcaaaaaaaaaaaaaaaaaaattagccacctcgaatcaattacaataatttatttacctttttctttttttaaagacaagatatctctttgttacctaggctggagtgcagtggaacttggctcactagagcctttacctcctgggctcaagcaatcctcccatctcagcctgtccggtagctaggaccacaggtatgcaccaccatgccctggttaatttttgtagagacggggtttggctatgttgcttaggctaagctcaaactcctgagctcaagcgatctccccacctccacctcccaaagtgctgggatttacaggcatgagccacccacctggcctatttgctttaacttataaagatttaaaaactgttcatggccacgtgtggtggctcgcgcgtgtaatcccagcaatttgggaggagaaggcgggaggatcgcttaagcgcaggagttcgagaccagcctggccaacataatgagactctgtctcaaacaaaaacaaaaacaagaacaaaaacaaaactgttcatgttaaaattaagcagtctgaaaattacctctactgaccccttgcgcccttccctagagataaccactgtaaaccagtttcctttcccaaagaaaccctatttatgtttgcatgtaaatgtacatatatgtacatactctttgttatataaatacaacacatattcccttttacataaatgacaatactatatacattgttctttaccttccccttctgatacctattaaaattacatttcaagatcatcaaattcataattttcagctattcagatttaacatccctgaaattaaacttaagcataaagataacagggataatccagttcccatacccaggagaataacggtcacctcaagtccactataatacaccaagtctgaaccctggactcaacatgttttcaataaaatgttcactttaaagttttgacaatgacttaataaccagggcactatgtttgatccatgcaaaaagatgtaaaatcttccgcttaaggaatctaaaattctaaacgttatttgtggggtggttaatctgcacctctcagaaacagacatgtcttgtgcgctgccaacaattttacctttgggtgaatgatgtaactttactgttcccacaaagagtcttaatttttctgtaccttgcaataaaatctacatgcattagatttttccacgaatggcctacaatttgataaacactttcaggactaaacggctagcaaaaatattcgttaaagtcgttatgcagcattttaattcccttcactgataacatgcaccctgagtatggcttcaaagacccactcctacgcgagaaacgacccgaaatgctctatatgccttccttttaaggggcggggggatcctttgatgtaactcaacaaaagcatacagcaatttcgtcacgtcacaaacatctgaactcgtttaccgaaatctaatctgaggcgtttatcagaagcaaagaaaaaataaaatacggcccacggaggcctaaggagtgaggcatccaccattaatgactctaccgggaagcagatatggccttacgttatttcgctaaaaatcccaaggccaaccctgccaaagaatcaacaacccattttacaaacgaaataccagattcagaaagactaagcaggttgccaagctggagagctggatctgccgacctctctccacccccccccgcccccccccggagcctcaggccaacggaattaacgttccgcgtcccctccctcgcctcccgcaacgcccgcgagggtcggctcccggggcgctgacaaccgcctcgtggccctcggccggcctctgaagagggcagtgaggggcccccacctgggcgcccgatgcccagagcactctgcgcccccagcctgccccagcccagtccctcccggccgcgcgccctgaccggtgagcaggatgttcggaagcaacatggtccccgccgcgacggcttcgggcgcctcgctcacgtgccctttgctctacagggaggagccggaaggggcgggcggcagcaaaagcccacggccccaaaggccccgaagcccaccgcggcgcccctagcctgccccggcggcccagccgcggcccactggttacctggctttcgatgacacatttccgtcgcaaagttggagggtgggcataactcgggtcggtacttcgggtcaggcagtgcgctggatgcctaagtcacacactccttcggtggtccccgcccttcgcttgcgccgaccagtctggaaggtccccgggaggccgtacctccgagaggctcggcgttgagcccgggtagggccaggtggctgccctttcacctagggtagtccctggtcgcctccgctcttcgcctaaaaggggatgcagctccgggaaagtaaggccgccgcggttgcggctatattatgtatatgtcttagagacgtgagtctatctctgccttcaagctttcctgggctctcgtcgctcctcctcccgacccgcccatcccatctggggatgagaagattgagggtgcagagccctgtcctgcagcggggatttgcgagctcaacccggcaccccactgattacaggattacgttggacgaatatttgagcttagtattccctgttcactgtgtggggtggtggtgggtcggctaggaatagtcttgaaggtctacctctgacatctcatttcagtaacctcgcatcttcagggacagttatctgctttttaaaggaggtaattgtcaatc

SEQ ID NO: 3032 - DNA, 6000 bp, Homo sapiens
tttctaacacttagaaagattcttatgagtaaaaaatctgaaaatgtaaatccctctgcttcccatctacccttatgcaccctgaaattaaattatgtagatatgtctgcatgcttttcagtacctgagtttctggtttatatttatccacccatggttcattttcagacagatattcttttgaattttctaaaccataaatctgttctaaggaagatagatttcctctttttctcgctggaaatctgctgctttctaatgtagaaggcccattttttcttctatgacttgagttattcacacctaatgatgtggcagtaatagtagagacgccactacactctagaaaatcatcaaatgatgggtcaacccagtctgttacctgaaaaaaaaagaaatcatgtaaatataatcacattttctcccatctattcccccaaataactgaactactctggaaacaacatattcatatatttataacctttaaaacttaaaaaaaaaaaaaaaaaaaaaaaaaaaaaatttttttgagaccgggtctcactctgtcacccaggctggactgcagtggtataatctcagctcaagcaatcctccagcctcagcctcttgagtaactgggactacaggcatgcaccaccatgcccaactaatttttttgtattttttgtagagatgggtttttgccatgttgcccaggctggtctcaaacaattcttgggctcaagtgatcctctcacatcagcctcccaaagagctgggattaaaggtataagccaccatacccggcctaaaaatcttacaaattaactctttttaaataaaactctgtctgtaatagttgtttttctactttacagtaagtgcaagtgcatacttgtctacttgaccttaaaggagtaaagaacacaaacttatttttattaattgtaaccttcccagcataaacactagaatgatttttttaaactctctgtaggattgaaacataaatattaaaattacctattaaaaaaagcaaaacaaaataaacaaatgataatattttaacagaaacagcaataagagtaatatatctgccttggccaggttaatacattcacaaactaagaaccatttcatacatccaaataatccgtatcagcttgaagacttagtgaagatataggccaaagatcataacgtaatctgtaattatgactggattatatttttcttcagtgtatgaagcaactaatatttttataattgaggcaggctttccagagggggaactgtcactcagaaatgcctgggaatggttgggtgtggtagctcacacctataattccagcacattcagaggcagaggcagtaggattgctgagcccaggagtttgagaacagctagcataacatagggagaccccaactctacaaaaaataaaaaattagccaggcatggtggcgcacgcctgtattcccagctacttggggggctaaggtgggagaatcacttgagcgcgggaggtcaaggttgcagtgaaccatgatcaccccactgcactccagcccgggcaacagagtgagaccctgtctcaaaaaaaaaattttgctaataattagaaattattagctaataattacaaataattagaaattagaaatttttactagattttttaacactctaatagcataaatctagaaaaatatagcttcagatctggttgtagaatctactgcctggctaacaaaaagaaaccaagttatatatttctttcaagaatactcagccacagttgagctatttattagacaatgttcctctcttgaagaaaatgaaccagaagttggagctgaaagtaggcttaggggagacaatttggggcttataaatactttacgaatgctaagtcacacttcactcttcttttaagacagagttaggaatattatcggcagtggattaaaaaaggaagaccactggaaaaaattttagtcatagctacctgattcatttcgtcctcatcaaaagattgtgactggtactataatcttggcccctttcctctatatttttgagagtatgaaaatatctttcattatagtaaaactttcgacagcaattctgatttgcaaattatttatacattttatagtttcatttcttacataaatgtggactcccatatactgaaaaaaagagaaagataaacagcaaagttaagtaacttacttaacatcaaagaaaatttagagctaccacttagggaaatagctaccctgcatgcatgaaactgtctgacccccatcccaccttaacccctatcttgctgagaactcacacactgaattacattacttctaagaagcagtgcttttggttaagctataacaccaactaccactcatatttctctcttctatgttctttcattcaaatgttttcagcctttgtgactgggactgtaaaacactttttcaaaattaaggttgtgcttttagagaacacttgtttcacaacttattaccagacttgcttaaatcattaattacaatagatactcggctctattactttgatagcagtaataagttattaagaatatatataaaaatttataattattttaaggcaattattacatggccattccagtgtatcatacctttgtggaagatacctttggtctaagaaaagtttttgacattataaactgtaatagttcccatccgtagtttaggacttgcagtacattaaactataattcacctgggggggggggggggaagaagccctcaaatgaagaaaaactgtaaatgcccaattatagtaataaatgtatactgatataatcaacaatacaataaaggctcaagaactagtgaaaaagaacagtaaatttaagtgatacaagaaatcaaaattctaaaataattttaatgactataactgtatcaaataatctacttgtggtgttaagagtttttcacatgaactcaatgatgtattagaaaaaaaaaaacaaaaaaaccacacatactatgtacttaccttttgtcattaaaatcaggcaattctatttgagcaatttttatactgaaaattaaagttttccttatttcaaattacagttgcaggtcttcatttccagtatttcccaaaaaagtaaaataccatgaattcacttgctgtggacgaagaatttaagtcttaaactgtaaaatttttgtcttcatttgaacatgttattacaaaatttcttggtaacactgtttttcaaccgtgttttcaaattcttaaatgtttatgcaaactagtgaattcaacgattttaagttagccagaagaaaagtttaaggtctacaaacttatacattggaaagtatactggactactttacagtttggaggcacacatagcctataaacacctcgacacactagaaaacacattgttcagccctccgccccaaatcgttcacgattagagactgtgacgtttcaaaaggtatacaggtggaaaaaaaacacctatttgagtaaatatagtttgtagctcgaaataaaagatgcagaccaggggccggacgcggtggctcatgcctgtaatcccagcaccgtgggaggacgaggcgggcggatcatctgaggtcaggagtttgagaccagcctggccaaaacatggtgaaaccccgtctctattaaaaatgcaaaaattagccgggcgtggtggtgggcgcctgtaatcccagctactctggaggctaaggcaggagaatcacttgaacccaggaggcggaggttgcactccagcctgggcgacaagagtgagactccgtctcaaaacaaaacaaaaacaaacaaacaaacaaaaaaaggtgcagactgttgtcacggtcaggtctctattcactcttgaaaacaagattgacaattacctcctttaaaaagcagataactgtccctgaagatgcgaggttactgaaatgagatgtcagaggtagaccttcaagactattcctagccgacccaccaccaccccacacagtgaacagggaatactaagctcaaatattcgtccaacgtaatcctgtaatcagtggggtgccgggttgagctcgcaaatccccgctgcaggacagggctctgcaccctcaatcttctcatccccagatgggatgggcgggtcgggaggaggagcgacgagagcccaggaaagcttgaaggcagagatagactcacgtctctaagacatatacataatatagccgcaaccgcggcggccttactttcccggagctgcatccccttttaggcgaagagcggaggcgaccagggactaccctaggtgaaagggcagccacctggccctacccgggctcaacgccgagcctctcggaggtacggcctcccggggaccttccagactggtcggcgcaagcgaagggcggggaccaccgaaggagtgtgtgacttaggcatccagcgcactgcctgacccgaagtaccgacccgagttatgcccaccctccaactttgcgacggaaatgtgtcatcgaaagccaggtaaccagtgggccgcggctgggccgccggggcaggctaggggcgccgcggtgggcttcggggcctttggggccgtgggcttttgctgccgcccgccccttccggctcctccctgtagagcaaagggcacgtgagcgaggcgcccgaagccgtcgcggcggggaccatgttgcttccgaacatcctgctcaccggtcagggcgcgcggccgggagggactgggctggggcaggctgggggcgcagagtgctctgggcatcgggcgcccaggtgggggcccctcactgccctcttcagaggccggccgagggccacgaggcggttgtcagcgccccgggagccgaccctcgcgggcgttgcgggaggcgagggaggggacgcggaacgttaattccgttggcctgaggctccgggggggggcgggggggggtggagagaggtcggcagatccagctctccagcttggcaacctgcttagtctttctgaatctggtatttcgtttgtaaaatgggttgttgattctttggcagggttggccttgggatttttagcgaaataacgtaaggccatatctgcttcccggtagagtcattaatggtggatgcctcactccttaggcctccgtgggccgtattttattttttctttgcttctgataaacgcctcagattagatttcggtaaacgagttcagatgtttgtgacgtgacgaaattgctgtatgcttttgttgagttacatcaaaggatccccccgccccttaaaaggaaggcatatagagcatttcgggtcgtttctcgcgtaggagtgggtctttgaagccatactcagggtgcatgttatcagtgaagggaattaaaatgctgcataacgactttaacgaatatttttgctagccgtttagtcctgaaagtgtttatcaaattgtaggccattcgtggaaaaatctaatgcatgtagattttattgcaaggtacagaaaaattaagactctttgtgggaacagtaaagttacatcattcacccaaaggtaaaattgttggcagcgcacaagacatgtctgtttctgagaggtgcagattaaccaccccacaaataacgtttagaattttagattccttaagcggaagattttacatctttttgcatggatcaaacatagtgccctggttattaagtcattgtcaaaactttaaagtgaacattttattgaaaacatgttgagtccagggttcagacttggtgtattatagtggacttgaggtgaccgttattctcctgggtatgggaactggattatccctgttatctttatgcttaagtttaatttcagggatgttaaatctgaatagctgaaaattatgaatttgatgatcttgaaatgtaattttaataggtatcagaaggggaaggtaaagaacaatgtatatagtattgtcatttat

SEQ ID NO: 3033 - DNA, 6000 bp, Homo sapiens
ctaaaacacaacttgaaaacatccagcatgcatgtttaatatcagtacaatgaattcaagaccaagtatacatgttacattcagcaaggctagattacagattatcatagtcatcatcatcatcatcgtcatcatcatcatcttcacgttttcttttcaatgcatttgatgattcattggcagtattttgtgatgacatcatattagtggtaataagaatgtttttggacccgattaatgatggattaatcagaacattctgaactgctgaggttgcaggaattgaagcttttacagctggagactgagaagtaggcatctgtactgtaaacctttgacctgtgagggacatgggagtccctactttagttgaaacagacatggtctgtggggttggtgtgcctagtgtgggagtacttggtctgctagtaactgaaccaacacttaaccgcgggactgttattcttcccgcagaagttgatgcctttttctgtaaagatttcagcctatagtttggagctgttaagcagtatctatcaggtggcaacctaggacctgaatatggcttgatcaatggcaaaggggtttgatttctttgccttgcaatatctaataaaaaatctcttgggggaggagaggtaaaagactgatcagcgcggcactggattgccaatcgcacatcatctgcatcaacagtagctttcttagcatggcttgaataaatttttgcatcatctagaattgtggtcacatatcggaaggcaaactccaacatctgatttataactcttggctcatattctgtaatccccatatccttcaggatttgtgccatcatctgtgcatctttcggcatgctcttgggagaagccgtcttgccagactccatgatatccgatgatcagactttagatcatttgaaaaaaatatgtacattagatcaatctgaaatagttactttagtagcaactgtcaggaacttaaaaaaattttaaatctatgttaaactgtaaaaaaatttttaaaatttaaaccatatgttttcttaattttaatgaggcaacttaaggtcgctttaatttattgagttcctaccatgtacaaatcattgtcgactataaaaagatgaagacacaaataagggagcgatgaaagattaggggaaaacagggtaaaataaataaaaacaatgatcatcttagaatatatgcagttgcatgcaaatctcacactaatctaagataccatagcatagtcaggtcccacacctgagctcaaaacagtctctttccagtgagaccaatatactcactgtgctcatatatatgtttagcagtaccaaacctttgtttgttcaacttaaaaacattctccttattcacattctacctatccgaaatccagtctctttataggagccttcccaactattcacaagaattgccagccattttgaaggcggaagggaaaatggtcaaaataaccaggacatagcattagacacttaatatttctgtggattccctaacagagtatatattctttaatggcaatctctgttttttgtaccctatgacaatacccagcactaacactccacttaccagaccttaaaaaaaaaacaaaacaaatctaacaccaaagtgtcccttaccttctcgagctaaatcacccacattaatgtatttcagtcctgattttgacgcaagttctttgcctagtgtggtttttccaacccctggtgtacctgtaagacaagccacagaaaaatactgtttgtgaaatactacttatcacactgcggtccaccttctgcctttccttttatttttgagacagagtctcacctggcctctgcccttaaaagttcttgacgactgaaatgaaaaatttcctaattagcaatcatatgtaaaattttttttttgagacagagtttcactcttgtcgcccaggctggagtgcagtggcacaatcttggctcactgcaacctccacctcccaggttcaagcgattctcctgcctcagtctcctcagtagctggaattacaggtgcccaccaccatacccagctaatttttgtattttcagtagagaccgggtttcaccatattggccaggctggtctcaaactcctaacctcaggtgatctgccagcctcggcctcctaaagtgctgggattacaggcgtgagccaccatgcctggccatatgtaaattagcatgtactacgatctaataaaaattttccaaagctaactgaatgtcagaatattacccagtgtattgattctccaggggtggggctcagcagattctgacgccaattcaaactgcctgctgctaccggggaactgctgagaataaaattagccatctcgtgctgggcgcagtggctcatgcctgtaatcaccgcactttgggaggccgaggcgggcagatcacaaggtcaggagattgagacaatcctggccaacatagtgaaactacatctctattaaaatacaaaaattagccgggcgtggtggcgcgtgcctgtaatcccagctactcaggaggctgaggcaggagaatcccttgaaccaggtagttgtaggatgcagtgagccaagatcgcgccacagcactccagcctggcgacagagactccatctcaaaaaaaaaaaaaaaaaaattagccacctcgaatcaattacaataatttatttacctttttctttttttaaagacaagatatctctttgttacctaggctggagtgcagtggaacttggctcactagagcctttacctcctgggctcaagcaatcctcccatctcagcctgtccggtagctaggaccacaggtatgcaccaccatgccctggttaatttttgtagagacggggtttggctatgttgcttaggctaagctcaaactcctgagctcaagcgatctccccacctccacctcccaaagtgctgggatttacaggcatgagccacccacctggcctatttgctttaacttataaagatttaaaaactgttcatggccacgtgtggtggctcgcgcgtgtaatcccagcaatttgggaggagaaggcgggaggatcgcttaagcgcaggagttcgagaccagcctggccaacataatgagactctgtctcaaacaaaaacaaaaacaagaacaaaaacaaaactgttcatgttaaaattaagcagtctgaaaattacctctactgaccccttgcgcccttccctagagataaccactgtaaaccagtttcctttcccaaagaaaccctatttatgtttgcatgtaaatgtacatatatgtacatactctttgttatataaatacaacacatattcccttttacataaatgacaatactatatacattgttctttaccttccccttctgatacctattaaaattacatttcaagatcatcaaattcataattttcagctattcagatttaacatccctgaaattaaacttaagcataaagataacagggataatccagttcccatacccaggagaataacggtcacctcaagtccactataatacaccaagtctgaaccctggactcaacatgttttcaataaaatgttcactttaaagttttgacaatgacttaataaccagggcactatgtttgatccatgcaaaaagatgtaaaatcttccgcttaaggaatctaaaattctaaacgttatttgtggggtggttaatctgcacctctcagaaacagacatgtcttgtgcgctgccaacaattttacctttgggtgaatgatgtaactttactgttcccacaaagagtcttaatttttctgtaccttgcaataaaatctacatgcattagatttttccacgaatggcctacaatttgataaacactttcaggactaaacggctagcaaaaatattcgttaaagtcgttatgcagcattttaattcccttcactgataacatgcaccctgagtatggcttcaaagacccactcctacgcgagaaacgacccgaaatgctctatatgccttccttttaaggggcggggggatcctttgatgtaactcaacaaaagcatacagcaatttcgtcacgtcacaaacatctgaactcgtttaccgaaatctaatctgaggcgtttatcagaagcaaagaaaaaataaaatacggcccacggaggcctaaggagtgaggcatccaccattaatgactctaccgggaagcagatatggccttacgttatttcgctaaaaatcccaaggccaaccctgccaaagaatcaacaacccattttacaaacgaaataccagattcagaaagactaagcaggttgccaagctggagagctggatctgccgacctctctccacccccccccgcccccccccggagcctcaggccaacggaattaacgttccgcgtcccctccctcgcctcccgcaacgcccgcgagggtcggctcccggggcgctgacaaccgcctcgtggccctcggccggcctctgaagagggcagtgaggggcccccacctgggcgcccgatgcccagagcactctgcgcccccagcctgccccagcccagtccctcccggccgcgcgccctgaccggtgagcaggatgttcggaagcaacatggtccccgccgcgacggcttcgggcgcctcgctcacgtgccctttgctctacagggaggagccggaaggggcgggcggcagcaaaagcccacggccccaaaggccccgaagcccaccgcggcgcccctagcctgccccggcggcccagccgcggcccactggttacctggctttcgatgacacatttccgtcgcaaagttggagggtgggcataactcgggtcggtacttcgggtcaggcagtgcgctggatgcctaagtcacacactccttcggtggtccccgcccttcgcttgcgccgaccagtctggaaggtccccgggaggccgtacctccgagaggctcggcgttgagcccgggtagggccaggtggctgccctttcacctagggtagtccctggtcgcctccgctcttcgcctaaaaggggatgcagctccgggaaagtaaggccgccgcggttgcggctatattatgtatatgtcttagagacgtgagtctatctctgccttcaagctttcctgggctctcgtcgctcctcctcccgacccgcccatcccatctggggatgagaagattgagggtgcagagccctgtcctgcagcggggatttgcgagctcaacccggcaccccactgattacaggattacgttggacgaatatttgagcttagtattccctgttcactgtgtggggtggtggtgggtcggctaggaatagtcttgaaggtctacctctgacatctcatttcagtaacctcgcatcttcagggacagttatctgctttttaaaggaggtaattgtcaatcttgttttcaagagtgaatagagacctgaccgtgacaacagtctgcacctttttttgtttgtttgtttgtttttgttttgttttgagacggagtctcactcttgtcgcccaggctggagtgcaacctccgcctcctgggttcaagtgattctcctgccttagcctccagagtagctgggattacaggcgcccaccaccacgcccggctaatttttgcatttttaatagagacggggtttcaccatgttttggccaggctggtctcaaactcctgacctcagatgatccgcccgcctcgtcctcccacggtgctgggattacaggcatgagccaccgcgtccggcccctggtctgcatcttttatttcgagctacaaactatatttactcaaataggtgttttttttccacctgtataccttttgaaacgtcacagtctctaatcgtgaacgatttggggcggagggctgaacaatgtgttttctagtgtgtcgaggtgtttataggctatgtgtgcctccaaactgtaaagtagtccagtatactttccaat

SEQ ID NO: 3034 - DNA, 6000 bp, Homo sapiens
aataagaatgtttttggacccgattaatgatggattaatcagaacattctgaactgctgaggttgcaggaattgaagcttttacagctggagactgagaagtaggcatctgtactgtaaacctttgacctgtgagggacatgggagtccctactttagttgaaacagacatggtctgtggggttggtgtgcctagtgtgggagtacttggtctgctagtaactgaaccaacacttaaccgcgggactgttattcttcccgcagaagttgatgcctttttctgtaaagatttcagcctatagtttggagctgttaagcagtatctatcaggtggcaacctaggacctgaatatggcttgatcaatggcaaaggggtttgatttctttgccttgcaatatctaataaaaaatctcttgggggaggagaggtaaaagactgatcagcgcggcactggattgccaatcgcacatcatctgcatcaacagtagctttcttagcatggcttgaataaatttttgcatcatctagaattgtggtcacatatcggaaggcaaactccaacatctgatttataactcttggctcatattctgtaatccccatatccttcaggatttgtgccatcatctgtgcatctttcggcatgctcttgggagaagccgtcttgccagactccatgatatccgatgatcagactttagatcatttgaaaaaaatatgtacattagatcaatctgaaatagttactttagtagcaactgtcaggaacttaaaaaaattttaaatctatgttaaactgtaaaaaaatttttaaaatttaaaccatatgttttcttaattttaatgaggcaacttaaggtcgctttaatttattgagttcctaccatgtacaaatcattgtcgactataaaaagatgaagacacaaataagggagcgatgaaagattaggggaaaacagggtaaaataaataaaaacaatgatcatcttagaatatatgcagttgcatgcaaatctcacactaatctaagataccatagcatagtcaggtcccacacctgagctcaaaacagtctctttccagtgagaccaatatactcactgtgctcatatatatgtttagcagtaccaaacctttgtttgttcaacttaaaaacattctccttattcacattctacctatccgaaatccagtctctttataggagccttcccaactattcacaagaattgccagccattttgaaggcggaagggaaaatggtcaaaataaccaggacatagcattagacacttaatatttctgtggattccctaacagagtatatattctttaatggcaatctctgttttttgtaccctatgacaatacccagcactaacactccacttaccagaccttaaaaaaaaaacaaaacaaatctaacaccaaagtgtcccttaccttctcgagctaaatcacccacattaatgtatttcagtcctgattttgacgcaagttctttgcctagtgtggtttttccaacccctggtgtacctgtaagacaagccacagaaaaatactgtttgtgaaatactacttatcacactgcggtccaccttctgcctttccttttatttttgagacagagtctcacctggcctctgcccttaaaagttcttgacgactgaaatgaaaaatttcctaattagcaatcatatgtaaaattttttttttgagacagagtttcactcttgtcgcccaggctggagtgcagtggcacaatcttggctcactgcaacctccacctcccaggttcaagcgattctcctgcctcagtctcctcagtagctggaattacaggtgcccaccaccatacccagctaatttttgtattttcagtagagaccgggtttcaccatattggccaggctggtctcaaactcctaacctcaggtgatctgccagcctcggcctcctaaagtgctgggattacaggcgtgagccaccatgcctggccatatgtaaattagcatgtactacgatctaataaaaattttccaaagctaactgaatgtcagaatattacccagtgtattgattctccaggggtggggctcagcagattctgacgccaattcaaactgcctgctgctaccggggaactgctgagaataaaattagccatctcgtgctgggcgcagtggctcatgcctgtaatcaccgcactttgggaggccgaggcgggcagatcacaaggtcaggagattgagacaatcctggccaacatagtgaaactacatctctattaaaatacaaaaattagccgggcgtggtggcgcgtgcctgtaatcccagctactcaggaggctgaggcaggagaatcccttgaaccaggtagttgtaggatgcagtgagccaagatcgcgccacagcactccagcctggcgacagagactccatctcaaaaaaaaaaaaaaaaaaattagccacctcgaatcaattacaataatttatttacctttttctttttttaaagacaagatatctctttgttacctaggctggagtgcagtggaacttggctcactagagcctttacctcctgggctcaagcaatcctcccatctcagcctgtccggtagctaggaccacaggtatgcaccaccatgccctggttaatttttgtagagacggggtttggctatgttgcttaggctaagctcaaactcctgagctcaagcgatctccccacctccacctcccaaagtgctgggatttacaggcatgagccacccacctggcctatttgctttaacttataaagatttaaaaactgttcatggccacgtgtggtggctcgcgcgtgtaatcccagcaatttgggaggagaaggcgggaggatcgcttaagcgcaggagttcgagaccagcctggccaacataatgagactctgtctcaaacaaaaacaaaaacaagaacaaaaacaaaactgttcatgttaaaattaagcagtctgaaaattacctctactgaccccttgcgcccttccctagagataaccactgtaaaccagtttcctttcccaaagaaaccctatttatgtttgcatgtaaatgtacatatatgtacatactctttgttatataaatacaacacatattcccttttacataaatgacaatactatatacattgttctttaccttccccttctgatacctattaaaattacatttcaagatcatcaaattcataattttcagctattcagatttaacatccctgaaattaaacttaagcataaagataacagggataatccagttcccatacccaggagaataacggtcacctcaagtccactataatacaccaagtctgaaccctggactcaacatgttttcaataaaatgttcactttaaagttttgacaatgacttaataaccagggcactatgtttgatccatgcaaaaagatgtaaaatcttccgcttaaggaatctaaaattctaaacgttatttgtggggtggttaatctgcacctctcagaaacagacatgtcttgtgcgctgccaacaattttacctttgggtgaatgatgtaactttactgttcccacaaagagtcttaatttttctgtaccttgcaataaaatctacatgcattagatttttccacgaatggcctacaatttgataaacactttcaggactaaacggctagcaaaaatattcgttaaagtcgttatgcagcattttaattcccttcactgataacatgcaccctgagtatggcttcaaagacccactcctacgcgagaaacgacccgaaatgctctatatgccttccttttaaggggcggggggatcctttgatgtaactcaacaaaagcatacagcaatttcgtcacgtcacaaacatctgaactcgtttaccgaaatctaatctgaggcgtttatcagaagcaaagaaaaaataaaatacggcccacggaggcctaaggagtgaggcatccaccattaatgactctaccgggaagcagatatggccttacgttatttcgctaaaaatcccaaggccaaccctgccaaagaatcaacaacccattttacaaacgaaataccagattcagaaagactaagcaggttgccaagctggagagctggatctgccgacctctctccacccccccccgcccccccccggagcctcaggccaacggaattaacgttccgcgtcccctccctcgcctcccgcaacgcccgcgagggtcggctcccggggcgctgacaaccgcctcgtggccctcggccggcctctgaagagggcagtgaggggcccccacctgggcgcccgatgcccagagcactctgcgcccccagcctgccccagcccagtccctcccggccgcgcgccctgaccggtgagcaggatgttcggaagcaacatggtccccgccgcgacggcttcgggcgcctcgctcacgtgccctttgctctacagggaggagccggaaggggcgggcggcagcaaaagcccacggccccaaaggccccgaagcccaccgcggcgcccctagcctgccccggcggcccagccgcggcccactggttacctggctttcgatgacacatttccgtcgcaaagttggagggtgggcataactcgggtcggtacttcgggtcaggcagtgcgctggatgcctaagtcacacactccttcggtggtccccgcccttcgcttgcgccgaccagtctggaaggtccccgggaggccgtacctccgagaggctcggcgttgagcccgggtagggccaggtggctgccctttcacctagggtagtccctggtcgcctccgctcttcgcctaaaaggggatgcagctccgggaaagtaaggccgccgcggttgcggctatattatgtatatgtcttagagacgtgagtctatctctgccttcaagctttcctgggctctcgtcgctcctcctcccgacccgcccatcccatctggggatgagaagattgagggtgcagagccctgtcctgcagcggggatttgcgagctcaacccggcaccccactgattacaggattacgttggacgaatatttgagcttagtattccctgttcactgtgtggggtggtggtgggtcggctaggaatagtcttgaaggtctacctctgacatctcatttcagtaacctcgcatcttcagggacagttatctgctttttaaaggaggtaattgtcaatcttgttttcaagagtgaatagagacctgaccgtgacaacagtctgcacctttttttgtttgtttgtttgtttttgttttgttttgagacggagtctcactcttgtcgcccaggctggagtgcaacctccgcctcctgggttcaagtgattctcctgccttagcctccagagtagctgggattacaggcgcccaccaccacgcccggctaatttttgcatttttaatagagacggggtttcaccatgttttggccaggctggtctcaaactcctgacctcagatgatccgcccgcctcgtcctcccacggtgctgggattacaggcatgagccaccgcgtccggcccctggtctgcatcttttatttcgagctacaaactatatttactcaaataggtgttttttttccacctgtataccttttgaaacgtcacagtctctaatcgtgaacgatttggggcggagggctgaacaatgtgttttctagtgtgtcgaggtgtttataggctatgtgtgcctccaaactgtaaagtagtccagtatactttccaatgtataagtttgtagaccttaaacttttcttctggctaacttaaaatcgttgaattcactagtttgcataaacatttaagaatttgaaaacacggttgaaaaacagtgttaccaagaaattttgtaataacatgttcaaatgaagacaaaaattttacagtttaagacttaaattcttcgtccacagcaagtgaattcatggtattttactt

SEQ ID NO: 3035 - DNA, 6000 bp, Homo sapiens
aaatctcacactaatctaagataccatagcatagtcaggtcccacacctgagctcaaaacagtctctttccagtgagaccaatatactcactgtgctcatatatatgtttagcagtaccaaacctttgtttgttcaacttaaaaacattctccttattcacattctacctatccgaaatccagtctctttataggagccttcccaactattcacaagaattgccagccattttgaaggcggaagggaaaatggtcaaaataaccaggacatagcattagacacttaatatttctgtggattccctaacagagtatatattctttaatggcaatctctgttttttgtaccctatgacaatacccagcactaacactccacttaccagaccttaaaaaaaaaacaaaacaaatctaacaccaaagtgtcccttaccttctcgagctaaatcacccacattaatgtatttcagtcctgattttgacgcaagttctttgcctagtgtggtttttccaacccctggtgtacctgtaagacaagccacagaaaaatactgtttgtgaaatactacttatcacactgcggtccaccttctgcctttccttttatttttgagacagagtctcacctggcctctgcccttaaaagttcttgacgactgaaatgaaaaatttcctaattagcaatcatatgtaaaattttttttttgagacagagtttcactcttgtcgcccaggctggagtgcagtggcacaatcttggctcactgcaacctccacctcccaggttcaagcgattctcctgcctcagtctcctcagtagctggaattacaggtgcccaccaccatacccagctaatttttgtattttcagtagagaccgggtttcaccatattggccaggctggtctcaaactcctaacctcaggtgatctgccagcctcggcctcctaaagtgctgggattacaggcgtgagccaccatgcctggccatatgtaaattagcatgtactacgatctaataaaaattttccaaagctaactgaatgtcagaatattacccagtgtattgattctccaggggtggggctcagcagattctgacgccaattcaaactgcctgctgctaccggggaactgctgagaataaaattagccatctcgtgctgggcgcagtggctcatgcctgtaatcaccgcactttgggaggccgaggcgggcagatcacaaggtcaggagattgagacaatcctggccaacatagtgaaactacatctctattaaaatacaaaaattagccgggcgtggtggcgcgtgcctgtaatcccagctactcaggaggctgaggcaggagaatcccttgaaccaggtagttgtaggatgcagtgagccaagatcgcgccacagcactccagcctggcgacagagactccatctcaaaaaaaaaaaaaaaaaaattagccacctcgaatcaattacaataatttatttacctttttctttttttaaagacaagatatctctttgttacctaggctggagtgcagtggaacttggctcactagagcctttacctcctgggctcaagcaatcctcccatctcagcctgtccggtagctaggaccacaggtatgcaccaccatgccctggttaatttttgtagagacggggtttggctatgttgcttaggctaagctcaaactcctgagctcaagcgatctccccacctccacctcccaaagtgctgggatttacaggcatgagccacccacctggcctatttgctttaacttataaagatttaaaaactgttcatggccacgtgtggtggctcgcgcgtgtaatcccagcaatttgggaggagaaggcgggaggatcgcttaagcgcaggagttcgagaccagcctggccaacataatgagactctgtctcaaacaaaaacaaaaacaagaacaaaaacaaaactgttcatgttaaaattaagcagtctgaaaattacctctactgaccccttgcgcccttccctagagataaccactgtaaaccagtttcctttcccaaagaaaccctatttatgtttgcatgtaaatgtacatatatgtacatactctttgttatataaatacaacacatattcccttttacataaatgacaatactatatacattgttctttaccttccccttctgatacctattaaaattacatttcaagatcatcaaattcataattttcagctattcagatttaacatccctgaaattaaacttaagcataaagataacagggataatccagttcccatacccaggagaataacggtcacctcaagtccactataatacaccaagtctgaaccctggactcaacatgttttcaataaaatgttcactttaaagttttgacaatgacttaataaccagggcactatgtttgatccatgcaaaaagatgtaaaatcttccgcttaaggaatctaaaattctaaacgttatttgtggggtggttaatctgcacctctcagaaacagacatgtcttgtgcgctgccaacaattttacctttgggtgaatgatgtaactttactgttcccacaaagagtcttaatttttctgtaccttgcaataaaatctacatgcattagatttttccacgaatggcctacaatttgataaacactttcaggactaaacggctagcaaaaatattcgttaaagtcgttatgcagcattttaattcccttcactgataacatgcaccctgagtatggcttcaaagacccactcctacgcgagaaacgacccgaaatgctctatatgccttccttttaaggggcggggggatcctttgatgtaactcaacaaaagcatacagcaatttcgtcacgtcacaaacatctgaactcgtttaccgaaatctaatctgaggcgtttatcagaagcaaagaaaaaataaaatacggcccacggaggcctaaggagtgaggcatccaccattaatgactctaccgggaagcagatatggccttacgttatttcgctaaaaatcccaaggccaaccctgccaaagaatcaacaacccattttacaaacgaaataccagattcagaaagactaagcaggttgccaagctggagagctggatctgccgacctctctccacccccccccgcccccccccggagcctcaggccaacggaattaacgttccgcgtcccctccctcgcctcccgcaacgcccgcgagggtcggctcccggggcgctgacaaccgcctcgtggccctcggccggcctctgaagagggcagtgaggggcccccacctgggcgcccgatgcccagagcactctgcgcccccagcctgccccagcccagtccctcccggccgcgcgccctgaccggtgagcaggatgttcggaagcaacatggtccccgccgcgacggcttcgggcgcctcgctcacgtgccctttgctctacagggaggagccggaaggggcgggcggcagcaaaagcccacggccccaaaggccccgaagcccaccgcggcgcccctagcctgccccggcggcccagccgcggcccactggttacctggctttcgatgacacatttccgtcgcaaagttggagggtgggcataactcgggtcggtacttcgggtcaggcagtgcgctggatgcctaagtcacacactccttcggtggtccccgcccttcgcttgcgccgaccagtctggaaggtccccgggaggccgtacctccgagaggctcggcgttgagcccgggtagggccaggtggctgccctttcacctagggtagtccctggtcgcctccgctcttcgcctaaaaggggatgcagctccgggaaagtaaggccgccgcggttgcggctatattatgtatatgtcttagagacgtgagtctatctctgccttcaagctttcctgggctctcgtcgctcctcctcccgacccgcccatcccatctggggatgagaagattgagggtgcagagccctgtcctgcagcggggatttgcgagctcaacccggcaccccactgattacaggattacgttggacgaatatttgagcttagtattccctgttcactgtgtggggtggtggtgggtcggctaggaatagtcttgaaggtctacctctgacatctcatttcagtaacctcgcatcttcagggacagttatctgctttttaaaggaggtaattgtcaatcttgttttcaagagtgaatagagacctgaccgtgacaacagtctgcacctttttttgtttgtttgtttgtttttgttttgttttgagacggagtctcactcttgtcgcccaggctggagtgcaacctccgcctcctgggttcaagtgattctcctgccttagcctccagagtagctgggattacaggcgcccaccaccacgcccggctaatttttgcatttttaatagagacggggtttcaccatgttttggccaggctggtctcaaactcctgacctcagatgatccgcccgcctcgtcctcccacggtgctgggattacaggcatgagccaccgcgtccggcccctggtctgcatcttttatttcgagctacaaactatatttactcaaataggtgttttttttccacctgtataccttttgaaacgtcacagtctctaatcgtgaacgatttggggcggagggctgaacaatgtgttttctagtgtgtcgaggtgtttataggctatgtgtgcctccaaactgtaaagtagtccagtatactttccaatgtataagtttgtagaccttaaacttttcttctggctaacttaaaatcgttgaattcactagtttgcataaacatttaagaatttgaaaacacggttgaaaaacagtgttaccaagaaattttgtaataacatgttcaaatgaagacaaaaattttacagtttaagacttaaattcttcgtccacagcaagtgaattcatggtattttacttttttgggaaatactggaaatgaagacctgcaactgtaatttgaaataaggaaaactttaattttcagtataaaaattgctcaaatagaattgcctgattttaatgacaaaaggtaagtacatagtatgtgtggtttttttgtttttttttttctaatacatcattgagttcatgtgaaaaactcttaacaccacaagtagattatttgatacagttatagtcattaaaattattttagaattttgatttcttgtatcacttaaatttactgttctttttcactagttcttgagcctttattgtattgttgattatatcagtatacatttattactataattgggcatttacagtttttcttcatttgagggcttcttcccccccccccccccaggtgaattatagtttaatgtactgcaagtcctaaactacggatgggaactattacagtttataatgtcaaaaacttttcttagaccaaaggtatcttccacaaaggtatgatacactggaatggccatgtaataattgccttaaaataattataaatttttatatatattcttaataacttattactgctatcaaagtaatagagccgagtatctattgtaattaatgatttaagcaagtctggtaataagttgtgaaacaagtgttctctaaaagcacaaccttaattttgaaaaagtgttttacagtcccagtcacaaaggctgaaaacatttgaatgaaagaacatagaagagagaaatatgagtggtagttggtgttatagcttaaccaaaagcactgcttcttagaagtaatgtaattcagtgtgtgagttctcagcaagataggggttaaggtgggatgggggtcagacagtttcatgcatgcagggtagctatttccctaagtggtagctctaaattttctttgatgttaagtaagttacttaactttgctgtttatctttctctttttttcagtatatgggagtccacatttatgtaagaaatgaaact

SEQ ID NO: 3036 - DNA, 6000 bp, Homo sapiens
atttttttttttttttttttgagatggagttttgctcttgttgaacaggctggagtgcaatgtcgcgatctcagctcaccacaacctccgcctcccaggttcaaacaattctcctgcctcggcctcccgagtagctgggattacaggcatgcgccaccacacctggctaattttttttttgtatttttagtagagatggggtttctccatgttggtcaggctggtctcgaactcctgacctcaggtgatccatccacctcggcctcccaaagtgctgggattagaggcgtgagccactgtgcccggcctataatttttgatagatgattttgaattattttccagagataaaattttaaatgtttccattatatcactgatttatttctgcaaattgaataaattcttaattttctgcatgcacataatacaaaaggtattttcatagttttggatttataccaaatgaaaaggattctcttgatgagcacctttaactgatttttctgttaaagttttaacaatttgttcttggaagtcagttcgtgaaggcaagtttgtcagtattttcacaaaactattcagctgaatccagaaagtgaaacagcaagaatttgcattgtaaaattgtgttataaaattggactttgaaatttcaaaaataagaaaaattttcatgtgtatttatactaaataccgttttaggaaactaggatcagggtgtttctgttggcgttggcattaactagctggatgtaaatttgaaaagccactcaagcagcttcctagtctagaaagtcagaggtttagattagatttccgacatcccttccatttctgacctgtagttcttgtctggaattctgctttgttataaactattgttctaaggagtttgttgtgatagcacatagttcattttgtaaagattccctgcgtataaagtgatgccctacatatgtgattttgtattaaaagtatataggatcattattttattttgaaaaatttaaatacagaaaagtataaaatataagtaccatccgcccagaaataacatgtgttaatgttttgtcatatgtgctttatattttttgaaataaagtgaagtcaactagtatttatagtaaataagttacatacacataagtacatatatgatatttaatcctcacaacgatcttttgacatgtgaccatttcttattcttcttttatagacaaggaactaatgatatgatagattaactggctgttgtcacactagcaagtggcaaaacaagggattaggatcttagtctcttcaactgttagattctatacttccatcctgtgttgactttgttaatggattggataatgtgagatcactctgatgtaaataaagtatcctatattaatttcgagtgcattttaagtacttgtaacataaatgcttcctgtgaaatatctgtaaagacctgaatgggtacatgtgtgtaaagaagaatcagggcagaaaagtgcttttatcatggctccggggaccttagcttcagttggtgttgtgagaattcctcacacaaggacattctccttgcttcagcatcaggatggaagtgtttctcatctggactttttcaaagactcagctggaggaatcagaattcataatttcctggcagctcatgattctgctacactacaccatgccatctcttgtgtgaaaggacagatttgatggaggactatgtcatccctcatgcgtttcttattgtctacatttattctaatgggaagaagtgagcaaaaacacctcaataatttgggtagtttttagaaaaccttgttagtaaattagaatagtgccactttggcattatgagaaagaagcatggatacataactagggttttgtgtatgactacaacgaaatgcagaatggtgtctccaaaaggtttccaattgctgccacaagaactgcttggtattgcctacatgtgttgtcctatttttgctttgcccttctgcagttacttgctgtgggaccttggagaaattaacttagcctctctgtacttcagttttttgtatttgtaaaatatatttgtaataatctcatagttaagaaggtagttaatgtgtgactcagtccttgtctaaaagtaaatatgcctagctacccccatcttccaaagccagaaggtgaaactttaacaagttttctaaaagcaaattgtgttttttaaaagtgcatgtgtcatccaatcccatatgattgatctgtgctgggtgcagccttagaatgtaaattcttttgaattctaggcagagaatgcaggattggcattctaaatatttgtacatgataaacaaatgcttctttaggttagagcaaatagtttacttatcaagatcacaattgttagatactgttgtcaattacagaggttttagatgaggctttctggaatgatttagtttccctgtaagggagcctgtctattggaatagacaggttcacttctcccagtctttcaagttgcatgctttttatatctgattccactggctgagctgattgtgaatgtcctaaccctgttgattgtgtctggccactcatgggcaaagaacagattatccattctttatagttgtcttttagttttacaagttgaaaaaacatctgagtaggttagataatttattctaccactttgtaaatgattagaatatgtcagtcataatcatgccaagagattatggatttatgcatattttgttttgctgtagtaccattcctagttgaatcttaacatccatgtctaaaatctatacagaacaaatattacagttgggaaaactgtttcagtctcctctcttcgcaaatatgctttatatttattggggagtcctctatctttttcctggttttccttaaagccttcccaggctgatggataacaaacatatgcaagaaacttggggcttgggattcctctaggctgtttgtcctagaggaatgcatcccgtcttgcaaataggatggtcaattaagatggaaggaagcaaaagtgtggataggaaggaagggcacaaaaggaaaagtgtggaatttgtgtgtgagtcctctaatgaggtcaaaggtgggagggaggcaagcatggaagcttcctggcactgcgatactaatttcccctcctctcccttttaaaatcctgtcttctgggaggaaatgagactgattatggagttcccactaagccctgcagggttggtggagacaaccccattttacacattagttcatagacttgggttgtgacttgcttgaggtcacccagccagtgtgtcagagcctgattttaaatccagggctgttctttccactgctatgcaagataccttctgtttatatttttgagggagacaacagagatgggaaaaatttttaacaataaaataaaggcaatggaggggatgagtatgctgatggggaaggaaagaggccctagcttctgcagttcctttgtgttattcctaacccttttctcatctgggggtgcactgcctctccatttctcaagtatgggaaatgccagtaattccacttgtgttaattggcagtcatacaacttgtccaaaactgaattgatcttacccaccccgccaacattttaataattgcaaccccaacctttcagttgctcagctaaagactatggaggtatccttgattcttttctcataacacacatccagtgtattggtaagatttagaattcagtcacttctcaccagctgctggtccaagccatcacaattcccccaaagttcttaacagtgctcacagcctctcctccccaccttacccttctgattgcagcttccaccactcatcccctgctcactcctgcagtcgtcaaagaccccaatgcacttctacctcagggcctttgcacttgcagctctctttgtctgaagagcttttcccctaggtatcagcagggttaacacccttcctcattcaggtcatggcttaactgtcttcccagcgaggactcctctggccaccctattttattttttgagatgaagtctctgtcacccaggctggagtgcaaggttggctcactgcaacctgtgcctcctggattcaagcgattctcctgcctcagcctcccgagtagctgggattacaggcgcctgccagcacgcccggctaatgtttttgtatttttagtagagacggaattcactatgttggccaggctggtctcgaagtcctgccctccgatgatccacccccgctcggcctcccaaatcaccatgcctgggattacaggcgtgaaccatcgcacccggcctggccaccctattttaaactgcaaacttctccccttcagtgcttagtttttctccacagcattatcaccatttcatatagtatatgtttttcttcatactgactccccttggagaaggaaaactccacgagagcaaggatttttgtcagtttttcattgttatttcctcagtgcttagacatgcatcaggctcaaagtagatgctcaatgtttgttgaatgaacagcaagagcaatggaggagtcctgaaatacacagcaagaagcaaggataattctggctttacttctgtggccagggtccttcatcccaaccttttagaagtagaaagacaagatcgagctcctcagaacccaggtcgatggctgcagagccttcgaccttccgagagcgaatggcgatcactctttccggttctctgcgaattccagctggaacaccgtccctttccgcgccccaactcagcggaggccatgccctgcacctgagcgccccgctccggcagctgcactctgcagcatccggaacgtttcggcgtggccgcagggcgcggcggaatgacttccggggcgcccctaaagcggcggagaggagtgtcgggctgagtttccggctgagagtccttctagcggcgccggtgagtccgcgtgtggaagtctgtgaggcgcagaggtggggcaggccgtctgactagctaggcggctgggagcgttttcgtggcggggaacggaggttgaattgccctgcctgggctcatagggaaggaggatgtgaaggagcttgtgaaggcagaggaaggtaactttcgtctggggagccgcagagtagggagggaagctgcaggccgtctctccctaagtaaaagcgcgacttttagaaatgatggttcagggttcgagtttgtgacccgcttgagaaagtgaccaacctctgagcctgaatcccatacctgaaaaacaaggacagtaatcacccttgccagtttcacatagcttggtaaggtgtgaagaaaagcttcttaaattgggatgtttggtgctctcatttgttggcagatagcattccgagctcatgtaacgggaatcacaccagtaggcttatgctgaggaacgtggattgtttggggttggattccaggaaacagatcacttaaaaaaatttttttttcttcgagacggagtctcgccctgtcgccaggctggagtgcagcggcgcgatctcggctcactgcaacctccacctcccgggttcaagcgattctccttcctcagcctcccgagtagctggaactacaggcgcgtgccaccacgcccagctaatttttgtattttcagtagagacggggtttcaccatgttggctaggatggtcttgatttcttgacctcgtgatcctcccgcctcggcctcccacagtgctgggattacaggtgtgagccacccacctggcctcggtgatatttttaagaagaaaatggactgttgggaagtgacaggccattggagatctttacaaagtccatcttcaggatgcatgaatcctttaaacagcatgcatgtttacaatcagacttcccattgaacgtctgcagttttagggaccttaatacctcctgtccagtcggatttcccattgcaggcagctctaattaagaag

SEQ ID NO: 3037 - DNA, 6000 bp, Homo sapiens
gtgctcaagtccaaatttgtgccattcagaagtgttttctagttttttttatatataggttttaaacatttctggttaagtttatgccctcacattttattttagtttggttaatgacgttttacatgtgtgagttccctcaattatttgttttaaatgttctgattcaataggaacactctccttagtatccttaacagaaatgattcttgtttatagaattgctaaataagtaaagaaattttaagttaaatcatggcaaggagttataattatactaagcttttttgttcctagaggttttggctcactcatatggtaatctatatgaaaatttttctgtgatatctaatattagaaagatcctcagtgatagaatagtgtttcttcctagctgattcatacatctttctctgccaacattttgtttgttgaagtgttccccaacatatgactcattgcttactaaatccctattgagcagccaaagccctggtgactaattatgtcattaatttgggaaagtcagagacaataagactgtcagttgaaactttgtaggaggtaaaaaagtcactgctgtcagctgcaaagatccttaaaacggtcttcagtaaagtcaaattttgtgacaagaattattgcatcaaagtcggggaaatacctcttagatcaaataagatacattgaaaagccaaaaattatttttatctcactttgggttctcataaggtctacccactgttacttggatatgagacttaacaaatggaaaagaagacaggggtactgtcacactgtattttcctacggcctaatgaccacaatggttgatgaactgcagtaaagtttctataatattttccatctattcatttgctcaatcaccttgtaatggttatgttggttaattccagtctttcatgggtaagcaacaaaatgagacttaatttgaaatatccagtatttttctattcttacaaataattttcaggatcaatgcactgaggattaggaatggcaatgtgtattactactttgataccaactatatccaatctaatgttggaatttgtttgacaaagtgttatgtatttgaaaacaggcagcactgaataaaaagaatatgggcaaaagaaaaatggaagtgttttgaatggaagtctaaaatatttattgatcaatgctgaactgagtaagcaggagatgcctgtacataaatgacattatcctgatctagtaacagggagaagcagaatatctgaaagctgtttattaatttgataataataagattagaaacatgcaaatcaagattaatagtattcacttctaattgggtttaggtagactttgactattttgcttctgatgttcttatatttttaattttctataatgatcatataacatataatattttcataatattaaacattttagaattaaactccattagagtgtatctttcctaaaataatataaacatccaatcttgtccttaacaattctgttctcaaacattagcctattccctcaagccagtgttgctttcgacccatattgtccatcatttcaatttatctcaaagttttttattgcaacaattaaatgctttgaatgatacccaaggcatagttctatttcaacaaaatttcaaagttaatagttacatcaaattttgttggtgctcattgaatttggttattaaaaccataagtagtatgttttatgctgactgagggagataaaagtagtaatgtttaatattcaaactgtgatgactgaaaaaaaaatgaggcctgtaaaatcttatttaacgtcaaattttaattaaacaggcttagcagaccaaaattaaaatctcaattatttttaaattattaatgacagacaactagattgagtgaacactggcatctcttttcaaataacttagtttagtggatgagttaaacataaactagttattataatgcagcgaagtatgtgaaaaatttaatttgaaccctacttagcttaaaatcctgacattctaggatgcaagtcctgcaaactttccatatgtaatcaacaattttctaaacatgcatgctgtatctctcctgtgtgactttgcatacatcattcccacattctagatcatcccgacccaccttaagtgactgcttttgcataatctcccttaaaattctaactcaagcactgcatcttttgagtccttccctaacatcttaacatcttccttctttcattcattattaactatagttagttattatagcacctgttagcactgtaaaattatgtgtgttacacaagtacaacatgcagactaaggtcgtgtattacctagcctcataccagcgtcacctagaacagcaaaaatgtatgcagattaatcacaatatatttggatgtacaaaatatattgagagcaaaatatgatggaaatttaggtgatgctctttgagcattgcttccattttccaataatgtaaccaggaatcactgttcatgtaattaaagaacaataagtctatgtgaatcaaaatatacatatacatgcaaatgttaaacctcagcaggaagaggcccattctcttgcttgctgatatatatatatatatatatatatatatatacacacacacacacacacacacacacatatatgtatgttgtgtgtatatgtatatacacacaacaatctataggcttgccttttaaaatagtataagcaacaaattttaagagaaacaataatgagtgtgtaaaacattagatatgtgtatgtacctttgctattatttgtggaaatggggctataaaataagctcctttattttcttttgtaaaacatttctttaatatgaagtaatgcaatacgtatttatgttctaagtgttaatttccttggatataaaataatatcttgttcctttgattctcttacatataagtgtatttactcagatattactccaaatacaccagatatattcaaagttgaaaaaatatatactttggaatgtattatcaccttatttcacatgaagaaatcaaaatctctggcatccaagtgcattccagcctgaaaaaaattatgcaattgtgaatttaacagaaagcaaattgctcacatatggagtcaacgtgaagctatatcaatatttattaaaagtttatatattacttttgatcccctggagagaaatacaaaattcaaataattattctatttttatatcccaatttgtaattatgaaactctagcattttaatttttctctttcaagtttacctgaagcttcacaaaattctgtgaggaatctattataacaggtattttgcttatttccacacaaacagaaggaaatgtgtattttctatgccctgaagaatttactcttttctgtaaatgacatatggtagttaattctttttggtaataaaatattcctgtttttaggccgaacagccttttctttaaattcagggcaacatatcaaagctttgccgtaataatacagagtaatcgactaaagtaatatagaatttaaataacaaagagtttaaacaatttaatatgtcttctattaatttcaaactgaaattttacagaaattatttggaatatgctgccagagtacacacacacacacacacacacacacacacacacaatcacacgctcacatcacacactcacacccagctaaaggaaattaccacagctataatgatttcattaaatatctgaaattaaagtttcttttggattttcagctgaagctcatagtaaataaaagtaatatgatcattgttgcatactgtgaatcaacagcacccagaaaccttcgactttctatatttacacagcttaattatccgaactgaaacctgaggccatctgtgtcaacatgatttcacaattcattccagaaaattatttttcaggaaagtaaggctgcaaaccaataaataacttattgtttgcttcaggaaatttctgcaaatcaatttatgtcagtaagcaactctcctctgggccaacagattgctcacctgggcaggtagcagcttgtgtcaattaacagtttacttatgaagacttctgtcatggcccttaactcacagtgtcccccaatcctaaactctatgtcctgaacattacctattcttatcagtcattggtcttgaaaggccccgggcaaccatttgagcccagacttcaatactctatcaataccaccttatcatctacttttctaacatgacccctcaaggtggtgaccccacttacagtcgtcttttattgaatttagctttccctaatcaacatgctagtctattggatgcagtgtcggaggcaaaaatcacagaggttctgaaagcatcagcccatggttttctaaacatcatggttcaagacccttaacacgaaacagaaagtttccccgaggcgccgtaaacaacccatttgggcgcttccctgataattatagtgaaatctggcatctaattttttttggtggactctcaaattttatatttatgttttgattcctagaaataaaaaatgtttttataaggaattctttgatcgtttatgttttattcttgatagaaacctactactttataacttcgtttatgttttactcttgatagaaacctactactttataacttcgaacattattgatgttcttcctgtatttctgagaggtgacagcttgctggcatccctcgctggctctcggcacctcctcggcctcagcccactctggccgcgcttgaggagcccttcagcccgcagctgcaccgtgggagcccctctctgtgctggctgaggcctgagcgggctccctctgctggcggggaggtgtggagggagaggcgcgggccggaacctgggctgcctgcggggctcgccggtccagcgcgacttccgggtgggcgcgggctcggcgcgacttccgggtgggcgcgggctcggcgcaacttccgggtgggcgcgggctcggcgcgccccgcactcttgagcggtcggctggcgccgccggccctgggcagtgagaggcttagcacccgggccagcagctgcggagggtgcactgggtcctccaacagtgatggcccgccggcgccgcgctcgaattttcgctgggcctcagccacctccccgcggggcaagggggcagggctcgggacctgcagcctgccatactggagccctcaccctcctccccgcccccgtcccctgccccccgccccccgccccccaaccgcaggctcccgcgcaccaccccgaggggacgggcgccacctcctgctacgcggcacccggtcccgtcaaccgcccaacggctgaggagtgcggcagtgcgccagagactggcgggcagctccgcccgcggccgggatgcactaggcaaagccagctgggctcctgagtccggtgggtacttggagaacttactgcgtctagctggaggattgtaaatgcaccaatcagcatgctgtgtctagctcaaggtatgtgaacgcactaatcagtgctctgtgtctagctaatctggtggggacttggagaacttttgtgtctagctaaaggattgtaaacagaccaagcagctctctgtaaaatgaacccatcagctctctatgaaatggaccgatcatcaggatgtgggtggggtgagataagggaataaaagcagctgccagagccagcaacagcaacgtgctagggtccctttccacagtgtggaggctttgttcttttgctctttgcagtcttgctgctgctcactgtttggctctgcgcagaactgtaacactcaccaagaaggtctgcagcttcacccaaagatattccaaagatacagaaaactatatagagacattttgtatagttctaatagcatataatccacaggtccctgatctataatatgggttttttataaaattgtttttttgtatgctatgagg

SEQ ID NO: 3038 - DNA, 6000 bp, Homo sapiens
tttttttttttttttttttttgagatggagttttgctcttgttgaacaggctggagtgcaatgtcgcgatctcagctcaccacaacctccgcctcccaggttcaaacaattctcctgcctcggcctcccgagtagctgggattacaggcatgcgccaccacacctggctaatttttttttgtatttttagtagagatggggtttctccacgttggtcaggctggtctcgaactcctgacctcaggtgatccatccacctcggcctcccaaagtgctgggattagaggcgtgagccactgcgcccggcctataatttttgatagatgattttggattattttccagagataaaattttaaatgtttccattatatcactgatttatttctgcaaattgaataaattcttaattttctgcatgcacataatacaaaaggtattttcatagttttggatttataccaaatgaaaaggactctcttgatgagcacctttaactgatttttctgttaaagttttaacaatttgttcttggaagtcagttcgtgaaggcaagtttgtcagtattttcacaaaactattcagctgaatccagaaagtgaaacagcaagaatttgcattgtaaaattgtgttataaaattggactttgaaatttcaaaaataagaaaaattttcatgtgtatttatactaaataccgttttaggaaactaggatcagggtgtttctgttggcgttggcattaactagctggatgtaaatttgaaaagccactcaagcagcttcctagtctagaaagtcagaggtttagattagatttccgacatcccttccatttctgacctgtagttcttgtctggaattctgctttgttataaactattgttctaaggagtttgttgtgatagcacatagttcattttgtaaagattccctgcgtataaagtgatgccctacatatgtgattttgtattaaaagtatataggatcattattttattttgaaaaatttaaatacagaaaagtataaaatataagtaccatccgcccagaaataacatgtgttaatgttttgtcatatgtgctttatattttttgaaataaagtgaagtcaactagtatttatagtaaataagttacatacacataagtacatatatgatatttaatcctcacaacgatcttttgacatgtgaccatttcttattcttcttttatagacaaggaactaatgatatgatagattaactggctgttgtcacactagcaagtggcaaaacaagggattaggatcttagtctcttcaactgttagattctatacttccatcctgtgttgactttgttaatggattggataatgtgagatcactctgatgtaaataaagtatcctatattaatttcgagtgcattttaagtacttgtaacataaatgcttcctgtgaaatatctgtaaagacctgaatgggtacatgtgtgtaaagaagaatcagggcagaaaagtgcttttatcatggctccggggaccttagcttcagttggtgttgtgagaattcctcacacaaggacattctccttgcttcagcatcaggatggaagtgtttctcatctggactttttcaaagactcagctggaggaatcagaattcataatttcctggcagctcatgattctgctacactacaccatgccatctcttgtgtgaaaggacagatttgatggaggactatgtcatccctcatgcgtttcttattgtctacatttattctaatgggaagaagtgagcaaaaacacctcaataatttgggtagtttttagaaaaccttgttagtaaattagaatagtgccactttggcattatgagaaagaagcatggatacataactagggttttgtgtatgactacaacgaaatgcagaatggtgtctccaaaaggtttccagttgctgccacaagaactgcttggtattgcctacatgtgttgtcctatttttgctttgcccttctgcagttacttgctgtgggaccttggagaaattaacttagcctctctgtacttcagttttttgtatttgtaaaaatatatttgtaataatctcatagttaagaaggtagttaatgtgtgactcagtccttgtctaaaagtaaatatgcctagctacccccatcttccaaagccagaaggtgaaactttaacaagttttctaaaagcaaattgtgttttttaaaagtgcatgtgtcatccaatcccatatgattgatctgtgctgggtgcagccttagaatgtaaattcttttgaattctaggcagagaatgcaggattggcattctaaatatttgtacatgataaacaaatgcttctttaggttacagcaaatagtttacttatcaagatcacgattgttagatactgttgtcaattacagaggttttagatgaggctttctggaatgatttagtttccctgtaagggagcctgtctattggaatagacaggttcacttctcccagtctttcaagttgcatgctttttatatctgattccactggctgagctgattgtgaatgtcctaaccctgttgatagtgtctggccactcatgggcaaagaacagattatccattctttatagttgtcttttagttttacaagttgaaaaaacatctgagtaggttagataatttattctaccactttgtaaatgattagaatatgtcagtcataatcatgccaagagattatggatttatgcatattttgttttgctgtagtaccattcctagttgaatcttaacatccatgtctaaaatctatacagagcaaatattacagttgggaaaactgtttcagtctcctctcttcgcaaatatgctttatatttattggggagtcctctatctttttcctggttttccttaaagccttcccaggctgatggataacaaacatatgcaagaaacttggggcttgggattcctctaggctgtttgtcctagaggaatgcatcccgtcttgcaaataggatggtcaattaagatggaaggaagcaaaagtgtggataggaaggaagggcacaaaaggaaaagtgtggaatttgtgtgtgagtcctctaatgaggtcaaaggtgggagggaggcaagcatggaagcttcctggcactgcgatactaatttcccctcctctcccttttaaaatcctgtcttctgggaggaaatgagactgattatggagttcccactaagccctgcagggttggtggagacaaccccattttacacattagttcatagacttgggttgtgacttgcttgaggtcacccagccagtgtgtcagagcctgattttaaatccagggctgttctttccactgctatgcaagataccttctgtttatatttttgagggagacaacagagatgggaaaaatttttaacaataaaataaaggcagtggaggggatgagtatgctgatggggaaggaaagaggccctagcttctgcagttcctttgtgttattcctaacccttttctcatctgggggtgcactgcctctccatttctcaagtatgggaaatgccagtaattccacttgtgttaattggcagtcagacaacttgtccaaaactgaattgatcttacccaccccgccaacattttaataattgcaaccccaacctttcagttgctcagctaaagactatggaggtatccttgattcttttctcataacacacatccagtgtattggtaagatttagaattcagtcacttctcaccagctgctggtccaagccatcacaattcccccaaagttcttaacagtgctcacagcctctcctccccaccttacccttctgattgcagctgccaccactcatcccctgctcactcctgcagtcgtcaaagaccccaatgcacttctacctcagggcctttgcacttgcagctctctttgtctgaagagcttttcccctaggtatcagtagggttaacacccttcctcattcaggtcatggcttaactgtcttcccagcgaggactcctctggccaccctattttattttttgagatgaagtctctgtcacccaggctggagtgcaaggttggctcactgcaacctgtgcctcctggattcaagcgattctcctgcctcagcctcccgagtagctgggattacaggcgcctgccagcacgcccggctaatgtttttgtatttttagtagagacggaattcactatgttggccaggctggtctcgaactcctgccctccgatgatccacccccgctcggcctcccaaatcaccatgcctgggattacaggtgtgaaccatcgcacccggcctggccaccctattttaaactgcaaacttttccccttcagtgcttagtttttctccacagcattatcaccatttcatatagtatatgtttttcttcatactgactccccttggagaaggaaaactccacgagagcaaggatttttgacagtttttcattgttatttcttcagtgcttagacatgcatcaggctcaaagtagatgctcaatgtttgttgaatgaacagcaagagcaatggaggagtcctgaaatacacagcaagaagcaaggataattctggctttacttctgtggccagggtccttcatcccaaccttttagaagtagaaaaaccagatcgagctcctcagaacccaggtcgatggctgcagagccttcgaccttccgagagcgaatggcgatcactctttccggttctctgtgaattccagctggaacaccgtccctttccgcgccccaactcagcggaggccatgccctgcacctgagcgccccgctccggcagctgcactctgcagcatccggaacgtttcggcgtggccgcagggcgcggcggaatgacttccggggcgcccctaaagcggcggagaggagtgtcgggcggagtttccggctgagagtccttctagcggcgccggtgagtccgcgtgtggaagtctgtgaggcgcagaggtggggcaggccgtctggctagctaggcggctgggagcgttttcgtggcggggaacggaggttgaattgccctgcctgggctcatagggaaggaggatgtgaaggagcttgtgaaggcagaggaaggtaactttcgtctggggagccgcagagtagggagggaagctgcaggccgtctctccctaagtaaaagcgcgacttttagaaatgatggttcagggttcgagtttgtgacccgcttgagaaagtgaccaacctctgagcctgaatcccatacctgaaaaacaaggacagtaatcacccttgccagtttcacatagcttggtaaggtgtgaagaaaagcttcttaaattgggatgtttggtgctctcatttgttggcagatagcattccgagctcatgtaacgggaatcacaccagtaggcttatgctgaggaacgtggattgtttggggttggattccaggaaacagatcacttaaaaatttttttttttcttcgagacggagtctcgccctgtcgccaggctggagcgcagcggcgcgatctcggctcactgcaacctccacctcccgggttcaagcgattctccttcctcagcctcccgagtagctggaactacaggcgcgtgccaccacgcccagctaatttttgtattttcagtagagacggggtttcaccatgttggctaggatggtcttgatttcttgaccccgtgatcctcccgcctcggcctcccacagtgctgggattacaggtgtgagccacccacctggcctcgctgatatttttaagaagaaaatggactgacgggaagtgacaggccattggagatctttacaaagtccatcttcaggatgcatgaatcctttaaacagcatgcatgtttacaatcagacttcccattgaacgtctgcagttttagggaccttaatacctcctgtccagtcggatttcccgttgcaggcagctctaattaagaa

SEQ ID NO: 3039 - DNA, 6000 bp, Homo sapiens
ttttttttttttttttttttttgagatggagttttgctcttgttgaacaggctggagtgcaatgtcgcgatctcagctcaccacaacctccgcctcccaggttcaaacaattctcctgcctcggcctcccgagtagctgggattacaggcatgcgccaccacacctggctaatttttttttgtatttttagtagagatggggtttctccacgttggtcaggctggtctcgaactcctgacctcaggtgatccatccacctcggcctcccaaagtgctgggattagaggcgtgagccactgcgcccggcctataatttttgatagatgattttggattattttccagagataaaattttaaatgtttccattatatcactgatttatttctgcaaattgaataaattcttaattttctgcatgcacataatacaaaaggtattttcatagttttggatttataccaaatgaaaaggactctcttgatgagcacctttaactgatttttctgttaaagttttaacaatttgttcttggaagtcagttcgtgaaggcaagtttgtcagtattttcacaaaactattcagctgaatccagaaagtgaaacagcaagaatttgcattgtaaaattgtgttataaaattggactttgaaatttcaaaaataagaaaaattttcatgtgtatttatactaaataccgttttaggaaactaggatcagggtgtttctgttggcgttggcattaactagctggatgtaaatttgaaaagccactcaagcagcttcctagtctagaaagtcagaggtttagattagatttccgacatcccttccatttctgacctgtagttcttgtctggaattctgctttgttataaactattgttctaaggagtttgttgtgatagcacatagttcattttgtaaagattccctgcgtataaagtgatgccctacatatgtgattttgtattaaaagtatataggatcattattttattttgaaaaatttaaatacagaaaagtataaaatataagtaccatccgcccagaaataacatgtgttaatgttttgtcatatgtgctttatattttttgaaataaagtgaagtcaactagtatttatagtaaataagttacatacacataagtacatatatgatatttaatcctcacaacgatcttttgacatgtgaccatttcttattcttcttttatagacaaggaactaatgatatgatagattaactggctgttgtcacactagcaagtggcaaaacaagggattaggatcttagtctcttcaactgttagattctatacttccatcctgtgttgactttgttaatggattggataatgtgagatcactctgatgtaaataaagtatcctatattaatttcgagtgcattttaagtacttgtaacataaatgcttcctgtgaaatatctgtaaagacctgaatgggtacatgtgtgtaaagaagaatcagggcagaaaagtgcttttatcatggctccggggaccttagcttcagttggtgttgtgagaattcctcacacaaggacattctccttgcttcagcatcaggatggaagtgtttctcatctggactttttcaaagactcagctggaggaatcagaattcataatttcctggcagctcatgattctgctacactacaccatgccatctcttgtgtgaaaggacagatttgatggaggactatgtcatccctcatgcgtttcttattgtctacatttattctaatgggaagaagtgagcaaaaacaccacaataatttgggtagtttttagaaaaccttgttagtaaattagaatagtgccactttggcattatgagaaagaagcatggatacataactagggttttgtgtatgactacaacgaaatgcagaatggtgtctccaaaaggtttccagttgctgccacaagaactgcttggtattgcctacatgtgttgtcctatttttgctttgcccttctgcagttacttgctgtgggaccttggagaaattaacttagcctctctgtacttcagttttttgtatttgtaaaaatatatttgtaataatctcatagttaagaaggtagttaatgtgtgactcagtccttgtctaaaagtaaatatgcctagctacccccatcttccaaagccagaaggtgaaactttaacaagttttctaaaagcaaattgtgttttttaaaagtgcatgtgtcatccaatcccatatgattgatctgtgctgggtgcagccttagaatgtaaattcttttgaattctaggcagagaatgcaggattggcattctaaatatttgtacatgataaacaaatgcttctttaggttacagcaaatagtttacttatcaagatcacgattgttagatactgttgtcaattacagaggttttagatgaggctttctggaatgatttagtttccctgtaagggagcctgtctattggaatagacaggttcacttctcccagtctttcaagttgcatgctttttatatctgattccactggctgagctgattgtgaatgtcctaaccctgttgattgtgtctggccactcatgggcaaagaacagattatccattctttatagttgtcttttagttttacaagttgaaaaaacatctgagtaggttagataatttattctaccactttgtaaatgattagaatatgtcagtcataatcatgccaagagattatggatttatgcatattttgttttgctgtagtaccattcctagttgaatcttaacatccatgtctaaaatctatacagagcaaatattacagttgggaaaactgtttcagtctcctctcttcgcaaatatgctttatatttattggggagtcctctatctttttcctggttttccttaaagccttcccaggctgatggataacaaacatatgcaagaaacttggggcttgggattcctctaggctgtttgtcctagaggaatgcatcccgtcttgcaaataggatggtcaattaagatggaaggaagcaaaagtgtggataggaaggaagggcacaaaaggaaaagtgtggaatttgtgtgtgagtcctctaatgaggtcaaaggtgggagggaggcaagcatggaagcttcctggcactgcgatactaatttcccctcctctcccttttaaaatcctgtcttctgggaggaaatgagactgattatggagttcccactaagccctgcagggttggtggagacaaccccattttacacattagttcatagacttgggttgtgacttgcttgaggtcacccagccagtgtgtcagagcctgattttaaatccagggctgttctttccactgctatgcaagataccttctgtttatatttttgagggagacaacagagatgggaaaaatttttaacaataaaataaaggcaatggaggggatgagtatgctgatggggaaggaaagaggccctagcttctgcagttcctttgtgttattcctaacccttttctcatctgggggtgcactgcctctccatttctcaagtatgggaaatgccagtaattccacttgtgttaattggcagtcagacaacttgtccaaaactgaattgatcttacccaccccgccaacattttaataattgcaaccccaacctttcagttgctcagctaaagactatggaggtatccttgattcttttctcataacacacatccagtgtattggtaagatttagaattcagtcacttctcaccagctgctggtccaagccatcacaattcccccaaagttcttaacagtgctcacagcctctcctccccaccttacccttctgattgcagctgccaccactcatcccctgctcactcctgcagtcgtcaaagaccccaatgcacttctacctcagggcctttgcacttgcagctctctttgtctgaagagcttttcccctaggtatcagtagggttaacacccttcctcattcaggtcatggcttaactgtcttcccagcgaggactcctctggccaccctattttattttttgagatgaagtctctgtcacccaggctggagtgcaaggttggctcactgcaacctgtgcctcctggattcaagcgattctcctgcctcagcctcccgagtagctgggattacaggcgcctgccagcacgcccggctaatgtttttgtatttttagtagagacggaattcactatgttggccaggctggtctcgaactcctgccctccgatgatccacccccgctcggcctcccaaatcaccatgcctgggattacaggtgtgaaccatcgcacccggcctggccaccctattttaaactgcaaacttttccccttcagtgcttagtttttctccacagcattatcaccatttcatatagtatatgtttttcttcatactgactccccttggagaaggaaaactccacgagagcaaggatttttgacagtttttcattgttatttcttcagtgcttagacatgcatcaggctcaaagtagatgctcaatgtttgttgaatgaacagcaagagcaatggaggagtcctgaaatacacagcaagaagcaaggataattctggctttacttctgtggccagggtccttcatcccaaccttttagaagtagaaaaaccagatcgagctcctcagaacccaggtcgatggctgcagagccttcgaccttccgagagcgaatggcgatcactctttccggttctctgtgaattccagctggaacaccgtccctttccgcgccccaactcagcggaggccatgccctgcacctgagcgccccgctccggcagctgcactctgcagcatccggaacgtttcggcgtggccgcagggcgcggcggaatgacttccggggcgcccctaaagcggcggagaggagtgtcgggcggagtttccggctgagagtccttctagcggcgccggtgagtccgcgtgtggaagtctgtgaggcgcagaggtggggcaggccgtctggctagctaggcggctgggagcgttttcgtggcggggaacggaggttgaattgccctgcctgggctcatagggaaggaggatgtgaaggagcttgtgaaggcagaggaaggtaactttcgtctggggagccgcagagtagggagggaagctgcaggccgtctctccctaagtaaaagcgcgacttttagaaatgatggttcagggttcgagtttgtgacccgcttgagaaagtgaccaacctctgagcctgaatcccatacctgaaaaacaaggacagtaatcacccttgccagtttcacatagcttggtaaggtgtgaagaaaagcttcttaaattgggatgtttggtgctctcatttgttggcagatagcattccgagctcatgtaacgggaatcacaccagtaggcttatgctgaggaacgtggattgtttggggttggattccaggaaacagatcacttaaaaatttttttttttcttcgagacggagtctcgccctgtcgccaggctggagcgcagcggcgcgatctcggctcactgcaacctccacctcccgggttcaagcgattctccttcctcagcctcccgagtagctggaactacaggcgcgtgccaccacgcccagctaatttttgtattttcagtagagacggggtttcaccatgttggctaggatggtcttgatttcttgaccccgtgatcctcccgcctcggcctcccacagtgctgggattacaggtgtgagccacccacctggcctcgctgatatttttaagaagaaaatggactgacgggaagtgacaggccattggagatctttacaaagtccatcttcaggatgcatgaatcctttaaacagcatgcatgtttacaatcagacttcccattgaacgtctgcagttttagggaccttaatacctcctgtccagtcggatttcccgttgcaggcagctctaattaaga

SEQ ID NO: 3040 - DNA, 6000 bp, Homo sapiens
aatgttttaaacttttttctttaattttattttaatttttaaacttttaaaattctttttgcaaaagtagggtctccctatgttgcccagactggtctgaaactcctggggtcaagcaatcctctgcctcagcctcccaaagtgctgggattataggcatgaggcacaactcttggcctggccaaaaacttttctgtgtaagaccacaaaagcactgacaaccaaagcaaacgtagacaaattagattatatcaagctaaaaagcttcttcacagctgagtgaacaatcaacaaagtgaagggacaacccacagaacaggagaaaatgtctgcaaactatccatctgacaagggattagtaaccagaatatataaggagctcaaacaactcaataaaagaaaaataatcttatttaaaaatgggcaaaagaatagacatttctcaaaataaggcatactaatggccaacaggtaaattaaaaaaatgttcaacatcactaatcatcatagaaatgcaaatcaaaaccacaatgagctatcatcttaccccagtcaaaatggcttaaaaaaaattttttttattatactagagacgaggtctcactacgttgcccacgctagttttaaactcctgagcagctcaagtgatcctctcacctcagtcaccatgggcggcctaaaatggcttttattaaaaagatagagaataatggatggtggcaaggatgtggagaaaggggaaccctgctacactgttggtgggaatgtaaattagtacagtcactatggaatacagtatggaggttcctcagaaaacttaaaatacaactactgtatgatctagcaattctactactacgtatatatccaaaagggaaatcaatacattgaagagatatctgcactcacacgtttattacagcactattcacaatagctaaaatatggaatcaaccatcaatggatgaatggataaagaagatgtggtctatatacacaatggaatttagccataaaaaaagaatattgggcctggcatgttggctcacatcaaatctcaacactttgggaggccaaggcaggaggattgcttgaggcctccctatttcaagaatatatggaataaaaatttgggtttgctatgtttttatttttattataatttctaataaagttgtttttccactatccctttattgctgcttctcaggactattcataaaatgaccaaaaatacaaaaaataaaatgatagtaaatgacaatgactatttttcctgataataccaaaggttaaatcaatacgtttttccttttagtagcaacacaagacaaggggatagttgcaagaggctccagagatcatttaaattatttatgcgtaattggaacatatatttgctagtgtacactagcaagaaaagagctgtaaactggctatatgttactgcaccttaaaaatgcatgtggatgaattttcttttaagaaaactgttaaactaaagaaaaactatgtaacacacctagaatgtaatctatctggctctgacagattctcaaatgtttaatcatttaaaaaatttgggataatagttttttggaatttttttttttttgagacagggtctcactttgtcacctacactggagtgcactggcatgatcacagctcactacagcctcaaacctctggggtcaagctagcctgccacctcagcaccctgagcagctaggactacagatatgtgccattatgcctgagtgacttttctaaaatctaaaatcaattctatatgtattaaaagttatgtattgcaagcgcctaaggtccaaagtctggactagactattcactagcgatgatctgggcaattaacttctttgaatgttaatttcctcatatgtaaagtaagaataatgtctaccttgcaggatttttgtgaagagcgaataaatcaaatgaacctaaaacaatgtttgacattttgtaggcctttggcaaatgataattgctacttacaaaaggctatgatgttatttggttctttggtgtctgaccaattttaatcatgttagtgatttttttcttgggccttgttaattgcagttcccacaacttctcttcaatcatcaaccaagttaaacttatttcattcatcagttattatttactgaaaacctcctatgtcacacacaattttaaatatttattcactctctacacataattattgtcagaatacctagacagaaaaatgctagaaaacaatgaatctacagaagaagtggtttatatcttacttttatagcaccccagtcagattatcatatagcaagatcttaataaagatcttaaacagggataaagtatattttcataaactatcaccatagcaacatgttctataaaaatatattttttcaacttatttgactaagaagaaaaggatgtgaaattatagtagaagtgaaacaataaaaaggttagaaaaaaacaggaagcaaaacacgtttactaaataactatcaagaggattctactgatacctaatataccaccacactgctttatatagtatgcctttaaaatattaataaaagaatttctcacagtaacaggaagagactcaaaagctaagcaaaataaaaacgacagaaagaacatgtgtacatgccaagagtgggcactaatactgttcattggtgtaccgtactgtgtgctttttagactaaaagattttccaatgttatagtgaagcctatgaaataccaactactctaacaagtttttatcccataaaccaaacagataggagtaaaagatatgggaatacattttcaatttcattgaatagtaagaatatttctgcttgaaacattcctagcctggctctcatttctacaataggaaacaggataaaaagggtggcctacacaccctttgaaattccatttctgaaatcactgtcttattctcgaatgttagaactttttatgagatctgacatattctcaagcagctgtgaagtgcattaaggtatcaatgagtatccccatctacctcttccctcccacttttccaaaaatacagctgtctttggagacttaaatggtaaaaatcaacagataaaggagtcctagacagatatgcaaagtcaccttaaggatcaaagctgcagaataagacatggcagtatgagcataatataataataattgatattagtaaaagaactcatcaatataaatggagtgtggatggtcagaaaaagaagaaagtaaaagaaagcaagataaatattggcaatgcctacttaaatatccattgccacgatagggataacctagcttcatgctaccaaccattcagaatcgtaattaatcccccatgcaggaagaaaaaaatatgatactgggatatgggagaaggtcatcaagcctagatttgaaaccaggatataaagagctggagttacaggcacctaccaccatgctcggctaatctttgtatttttagtagagacggggttttaccttgttgcccaggctggtctcaaactcccggcctcaggtgatccacccacctcggcctcccgaagtgctgggattacaggcgtgagccaccacactcggccagcgttttcccttagactcgaaatttcgctcctatcgtcccatccttgtagtaagaaagtactctttctaaggtttaataacaaattttactcttggcaattacaaggaaatcgactatattaaaatagctaacgagaggaaattactgaagctacaaagtcaaagtctcataatcaaagttatccttgacaactgacaagagttgttagatcttctattggtctttctgctaattcaaccctagtcttaaaacaaaaatagcctcctattgcctaatcccttgtacacacaaaaccactgcacttcggtatttctaatacgagaaagtttctatatatccaacctttcctatctttgaggggcaggcatggttaacgtggttctcagtaagatattcatttacaaccaagagaaaatcccaggctatcatctcacattcttgttttactttaaaaacctttctaacgtcatttattctctgacaacctcaaaattactttctacaaagcaaactctagaaatctaaaaatgcgaagtgcgtgcttgtgagaaggtactaaggaaattcttcctttaaacgtcaaatgtgaattctaacttctaatgagtaagaccctcgagatttacagcggtggtctggtggaaagaaaacccttggcactagtagctcacaaaaccccagcccatggttgaggcggaagcggccagatgctcccgggctttcgacaagccgccctggaaagcaggcccgtcatcttcagcggaaagctctctcacgtctgggcccgcaagcccggagggttcgtcataaacacacaaggcaaggatagaagcgaggccgaggggctggtcacgcaactgtcaaacgaagcccacccaccgactgacaaggccccaaggggacaagcgatccccgcgcgggatactcacccgttacctcaggatcgcgactacaactcccaggaggctgcgcgagcgacggaccaacgcccttcccagaatgcagcacagctgcatccctaccccgccctctcctttctccgctcctcctgcttttctacccgtcgtcacccgggagagccggaggtagggttcgggaggaggatcccgaaggctcggcgtgtcgcgtcagacgccgggagggggacggggcggggagtagtgggggagaatgggaggacgaaggggaggggaaaggacaggggaggggagggtaaatagtgggccaggcaggaagatggcggcggtagcggaggtgtgagtggacgcgggactcagcggccggattttctcttcccttcttttcccttttccttccctatttgaaattggcatcgagggggctaagttcgggtggcagcgccgggcgcaacgcaggggtcacggcgacggcggcggcggctgacggctggaagggtaggcttccttcaccgctcgtcctccttcctcgctccgctcggtgtcaggcgcggcggcggcgcggcgggcggacttcgtccctcctcctgctcccccccacaccggagcgggcactcttcgcttcgccatcccccgacccttcaccccgaggactgggcgcctcctccggcgcagctgagggagcgggggccggtctcctgctcggttgtcgagcctccatgtcggataatcagagctggaactcgtcgggctcggaggaggatccagagacggagtctgggccgcctgtggagcgctgcggggtcctcagtaaggtgagcaacccctggtgccaagggacccctggccagactcacctgcagcgaggcaatccgctgaggcggtggggtggggctggcgggaggcgcggaacgtgccggggtgcgaggctgagtgttgctgcagcgactagggatgaggcggggatataggggcactgtccttgttgcccgggggctcgtcgggggcagccgaggaccagggaaagggtgtataaacctgagatccagtttgggaggccagatgcgcgccgtgacttgggacttagggcggcagctgtcccgggtgtaaggaatccgggttgggcttcagcggtgtccgaacgactgggcatgggagcggttcaagtcggacctcttaaaagaggttggtctctctgaggatgccaagccgagtaggttggggggcactgcggacgcaactctttcgacagaagctggagcgactcagcttggtgttgaaatttgaggtgttgaattctgctaggttagatgtagtgagacagatgaatgtggaggactttctccctcaccctgtaccttagttcagaatagagatattgaatcggcacatgatgggtacaggaaatattcatagtaacttggaacatgtgagaatggagactgat

SEQ ID NO: 3041 - DNA, 6000 bp, Homo sapiens
ttccaaaaactaattaaaaatggattgccaaaatatactgcattggctcaggctctatatccactgagaaatcttttatttttctgttctctaattaagcatttttgagattgattcacttcttaaattttcttttatttagtattttcttgagacagggtctcgctctgtcacccaggatggagtgcagtggcaccatctcagtttaccgcaatctcctgggctcaatcctcccacctcagcctcccaagtgattgagactacaggtgtgcacccccacatctggctaattttttgtagaaatgaggtttcgctatggtgccaaggctcgtctcaaactcctgggctcaagcgatctgtcttccttggtctcccaaagtgctgggactacaggtgagccaccatccctagccagttcttaatttttctaagccccatcattacaaccactctctgagaactcacccaagccaacatttaactcattctagtggctcccaatcaccatttccttatttctaactgcttgagatgtaccaccacttagacacgggcttgaaataaatgatagttaccaataaaactgaattcaccttcctataaagtatacttccttcctattttcctacttccttggggagactgctacttctgctcagagttagtgtattagatatacaaacagattagtggatataggataaaataggctcaactattttataactcatgtgaagagagttttgacaagttacttttgtaaacttcagtttctttgcctgttgactgacggccgaataaaataatgaaaatgcctagcatagtcacagaagatactcaatacctaagtgttccttctcaatatttatagcccattaccaaaagctgctcatctttccttcatagtaaacccttaaatttgcctcctcttctcattttcaactattccaatcaaattatccagttcctgtattccttaggagacttaataattttttctctagtatcttctgtttttttcataatttacacaagcttatttacttactaagcatatttgcctacttttcttacattgatcgtattgagtctctagctccaaaacttacatggacaacttcccactgactgtcatacaaattgtttagggcattcaagacccttcatggattaatcctacctcatttacaattaccacacttcataaggctaaactttgtgacagtggtcaagttacttattctctttgtgttctttttttctttgtcaaattctcttagagttaagtttaaacaagaatagacttagaacagtgcctggacatagtattttctgaatctgaggaagagttatacatagctaatgaagcttaaccttcagcatttctcactagaatagaactctttcaatgttagaggagaagccccagcaattatgtatccataacttaatattagttcttataagagactgaacaaactgtatcagcttcaggaccctttactcagtaagtattagctgtatcatgacacctggaagacaagttttttgtcttttctctgctctcataatgttccctcactcttccccatttaacaaatacagataaggcaatatgctagacactgcaggggaatcaaatattactgtggccaacaggccagcagacacaaactcaagagaaaaaaatatatatttagaataagagtcagaagcaagctacaaacaaaatgctatgggaattcaagtgaaggaggtcttgaatgatggcaaaataagaaaaggctttatggaaaggacagtatttggcttggactcttaaggatggacagaatttcaaacagtttggtgtgtggaaaaacagaaggtaaaccatgaaggatggaggaaattcagaaattgaatgagattattttatccaggcttaggtgctctcaagtcctactaaggcatgcatcttttccccaccatgatccatcacgatacttgctataactagatagaattattgtctatctagtatttttggaatctatacacttaagtgatttataagaaatatgcttcataggtatttccatgtatttcagattaccatatggaaaataccctttgaactggtatatttctaatataaatttacccaagcccattccaaatccaccccattttgggggagaaacaaaatgaattgtaccgggacttatttacattactcaatggaaggaaaagaacaaaatccgagttctgacctttgtttaaattaccaggtgaatacaaagaattcaaactatataatttacatttaaaaacatctaccatactcagtatgagtatatatactcaatttagaatacccttgattaaaaagcttccagaaaactgtatataaccataaattggtaaatctcaggaaaatttccttcatagctttgagcaagaataccaaaagctttattcctattcattctacatatgcagcaacagtcaaaatttaagctattcaccttccatagaggtgatcaaatacatttgtatgcatttaaatatcgagattggtcttccatttttttatctatagtatacctactccagagcactggttactttttcccccggtcactccactcccccaacccccaaaaaagtaattatcagtaggtcaaaagtacaatttgtttcgtaaaatacttaacacatcacaatactaatatggcagtcagcttcccatcttatgagcagtgatgaaactaccaaaatcactgagaagcaagtaacccacttcctattaccaactgaaaatgtatacctactacacaatgtgttcaatagagattcctaaattacaggatacatttaatctaaagaaatcctgaggagcttctcgttactgaaaaccttgcactgaaatttcaagaatgatcacagcatcaatatacaacataattttgctgctatacaaataaaagtcaacacttgcaatccttagttctgactactcatgcctttcctggcccccttctcattagctttctagacattataaaagcctaatatgaaacaattccacaaataatgtccaagtgatttgccaaatatgaatactggaaacagggtgatttcttaatagccactggctgcacatgacatagtatcttatgaccagcttgttgagggactggcccagctccccctctccaagttaactgctagctccagccatgtctaaaaaagtttaacaggaagggagagagaagtcaaaaaggctacgtgaatcttcttacagcaaaaacttaaaaaaaaaatccccacaactatgtaatatcaagagatcatccacctgcagtcctataatgactgctttgctaaaattttgatacagggattttaaaaaatatataaaagataaaacatcttttccttaccctcgaccccttaccgcaaaaatattttattattaagtaatgctcttcctggactaaagatcagtctccattctcacatgttccaagttactatgaatatttcctgtacccatcatgtgccgattcaatatctctattctgaactaaggtacagggtgagggagaaagtcctccacattcatctgtctcactacatctaacctagcagaattcaacacctcaaatttcaacaccaagctgagtcgctccagcttctgtcgaaagagttgcgtccgcagtgccccccaacctactcggcttggcatcctcagagagaccaacctcttttaagaggtccgacttgaaccgctcccatgcccagtcgttcggacaccgctgaagcccaacccggattccttacacccgggacagctgccgccctaagtcccaagtcacggcgcgcatctggcctcccaaactggatctcaggtttatacaccctttccctggtcctcggctgcccccgacgagcccccgggcaacaaggacagtgcccctatatccccgcctcatccctagtcgctgcagcaacactcagcctcgcaccccggcacgttccgcgcctcccgccagccccaccccaccgcctcagcggattgcctcgctgcaggtgagtctggccaggggtcccttggcaccaggggttgctcaccttactgaggaccccgcagcgctccacaggcggcccagactccgtctctggatcctcctccgagcccgacgagttccagctctgattatccgacatggaggctcgacaaccgagcaggagaccggcccccgctccctcagctgcgccggaggaggcgcccagtcctcggggtgaagggtcgggggatggcgaagcgaagagtgcccgctccggtgtgggggggagcaggaggagggacgaagtccgcccgccgcgccgccgccgcgcctgacaccgagcggagcgaggaaggaggacgagcggtgaaggaagcctacccttccagccgtcagccgccgccgccgtcgccgtgacccctgcgttgcgcccggcgctgccacccgaacttagccccctcgatgccaatttcaaatagggaaggaaaagggaaaagaagggaagagaaaatccggccgctgagtcccgcgtccactcacacctccgctaccgccgccatcttcctgcctggcccactatttaccctcccctcccctgtcctttcccctccccttcgtcctcccattctcccccactactccccgccccgtccccctcccggcgtctgacgcgacacgccgagccttcgggatcctcctcccgaaccctacctccggctctcccgggtgacgacgggtagaaaagcaggaggagcggagaaaggagagggcggggtagggatgcagctgtgctgcattctgggaagggcgttggtccgtcgctcgcgcagcctcctgggagttgtagtcgcgatcctgaggtaacgggtgagtatcccgcgcggggatcgcttgtccccttggggccttgtcagtcggtgggtgggcttcgtttgacagttgcgtgaccagcccctcggcctcgcttctatccttgccttgtgtgtttatgacgaaccctccgggcttgcgggcccagacgtgagagagctttccgctgaagatgacgggcctgctttccagggcggcttgtcgaaagcccgggagcatctggccgcttccgcctcaaccatgggctggggttttgtgagctactagtgccaagggttttctttccaccagaccaccgctgtaaatctcgagggtcttactcattagaagttagaattcacatttgacgtttaaaggaagaatttccttagtaccttctcacaagcacgcacttcgcatttttagatttctagagtttgctttgtagaaagtaattttgaggttgtcagagaataaatgacgttagaaaggtttttaaagtaaaacaagaatgtgagatgatagcctgggattttctcttggttgtaaatgaatatcttactgagaaccacgttaaccatgcctgcccctcaaagataggaaaggttggatatatagaaactttctcgtattagaaataccgaagtgcagtggttttgtgtgtacaagggattaggcaataggaggctatttttgttttaagactagggttgaattagcagaaagaccaatagaagatctaacaactcttgtcagttgtcaaggataactttgattatgagactttgactttgtagcttcagtaatttcctctcgttagctattttaatatagtcgatttccttgtaattgccaagagtaaaatttgttattaaaccttagaaagagtactttcttactacaaggatgggacgataggagcgaaatttcgagtctaagggaaaacgctggccgagtgtggtggctcacgcctgtaatcccagcacttcgggaggccgaggtgggtggatcacctgaggccgggagtttgagaccagcctgggcaacaaggtaaaaccccgtctctactaaaaatacaaagattagccgagcatggtgg

SEQ ID NO: 3042 - DNA, 6000 bp, Homo sapiens
cacaaaaagactctgaatagccaaagcagtcctaggggaaaagaacaaagcttggggcatcacactatctgacttcaaaatatactacaaagctatagtaaccaaatgaccataatactggcaagaaaatagacacatggacaaatggaacagaatagagaacccagatataaatccacacatttacaaccaagtaatttttgacaaagcaatcaagaacacatcatggtaaaaggatagtctcttcaataaatggtgctgggaaaactggataaccacatgcagaagaataagactatctctcagatatttcttccttatctctttgatttttgatacaaaaatcaaatcaaaatggattagaaacttaaatgtaagatctgaaattatgaaactactagaaaaatgtatttgggaaatactccaggacattggcctggccaaaagttgttttattttgtttttttgtttttggagacagggtctcactctgttacctggctttgaatgcagtggtgtaatcacagctttctatacccttgacctcctgagctcaagcaatcctcccacctcaggctcctgagtagctgggatcacaggtgtgtgctaccacatccagctaattttatttattcatttaactttatttttaaacttttaatgttttaaacttttttctttaattttattttaatttttaaacttttaaaattctttttgcaaaagtagggtctccctatgttgcccagactggtctgaaactcctggggtcaagcaatcctctgcctcagcctcccaaagtgctgggattataggcatgaggcacaactcttggcctggccaaaaacttttctgtgtaagaccacaaaagcactgacaaccaaagcaaacgtagacaaattagattatatcaagctaaaaagcttcttcacagctgagtgaacaatcaacaaagtgaagggacaacccacagaacaggagaaaatgtctgcaaactatccatctgacaagggattagtaaccagaatatataaggagctcaaacaactcaataaaagaaaaataatcttatttaaaaatgggcaaaagaatagacatttctcaaaataaggcatactaatggccaacaggtaaattaaaaaaatgttcaacatcactaatcatcatagaaatgcaaatcaaaaccacaatgagctatcatcttaccccagtcaaaatggcttaaaaaaaattttttttattatactagagacgaggtctcactacgttgcccacgctagttttaaactcctgagcagctcaagtgatcctctcacctcagtcaccatgggcggcctaaaatggcttttattaaaaagatagagaataatggatggtggcaaggatgtggagaaaggggaaccctgctacactgttggtgggaatgtaaattagtacagtcactatggaatacagtatggaggttcctcagaaaacttaaaatacaactactgtatgatctagcaattctactactacgtatatatccaaaagggaaatcaatacattgaagagatatctgcactcacacgtttattacagcactattcacaatagctaaaatatggaatcaaccatcaatggatgaatggataaagaagatgtggtctatatacacaatggaatttagccataaaaaaagaatattgggcctggcatgttggctcacatcaaatctcaacactttgggaggccaaggcaggaggattgcttgaggcctccctatttcaagaatatatggaataaaaatttgggtttgctatgtttttatttttattataatttctaataaagttgtttttccactatccctttattgctgcttctcaggactattcataaaatgaccaaaaatacaaaaaataaaatgatagtaaatgacaatgactatttttcctgataataccaaaggttaaatcaatacgtttttccttttagtagcaacacaagacaaggggatagttgcaagaggctccagagatcatttaaattatttatgcgtaattggaacatatatttgctagtgtacactagcaagaaaagagctgtaaactggctatatgttactgcaccttaaaaatgcatgtggatgaattttcttttaagaaaactgttaaactaaagaaaaactatgtaacacacctagaatgtaatctatctggctctgacagattctcaaatgtttaatcatttaaaaaatttgggataatagttttttggaatttttttttttttgagacagggtctcactttgtcacctacactggagtgcactggcatgatcacagctcactacagcctcaaacctctggggtcaagctagcctgccacctcagcaccctgagcagctaggactacagatatgtgccattatgcctgagtgacttttctaaaatctaaaatcaattctatatgtattaaaagttatgtattgcaagcgcctaaggtccaaagtctggactagactattcactagcgatgatctgggcaattaacttctttgaatgttaatttcctcatatgtaaagtaagaataatgtctaccttgcaggatttttgtgaagagcgaataaatcaaatgaacctaaaacaatgtttgacattttgtaggcctttggcaaatgataattgctacttacaaaaggctatgatgttatttggttctttggtgtctgaccaattttaatcatgttagtgatttttttcttgggccttgttaattgcagttcccacaacttctcttcaatcatcaaccaagttaaacttatttcattcatcagttattatttactgaaaacctcctatgtcacacacaattttaaatatttattcactctctacacataattattgtcagaatacctagacagaaaaatgctagaaaacaatgaatctacagaagaagtggtttatatcttacttttatagcaccccagtcagattatcatatagcaagatcttaataaagatcttaaacagggataaagtatattttcataaactatcaccatagcaacatgttctataaaaatatattttttcaacttatttgactaagaagaaaaggatgtgaaattatagtagaagtgaaacaataaaaaggttagaaaaaaacaggaagcaaaacacgtttactaaataactatcaagaggattctactgatacctaatataccaccacactgctttatatagtatgcctttaaaatattaataaaagaatttctcacagtaacaggaagagactcaaaagctaagcaaaataaaaacgacagaaagaacatgtgtacatgccaagagtgggcactaatactgttcattggtgtaccgtactgtgtgctttttagactaaaagattttccaatgttatagtgaagcctatgaaataccaactactctaacaagtttttatcccataaaccaaacagataggagtaaaagatatgggaatacattttcaatttcattgaatagtaagaatatttctgcttgaaacattcctagcctggctctcatttctacaataggaaacaggataaaaagggtggcctacacaccctttgaaattccatttctgaaatcactgtcttattctcgaatgttagaactttttatgagatctgacatattctcaagcagctgtgaagtgcattaaggtatcaatgagtatccccatctacctcttccctcccacttttccaaaaatacagctgtctttggagacttaaatggtaaaaatcaacagataaaggagtcctagacagatatgcaaagtcaccttaaggatcaaagctgcagaataagacatggcagtatgagcataatataataataattgatattagtaaaagaactcatcaatataaatggagtgtggatggtcagaaaaagaagaaagtaaaagaaagcaagataaatattggcaatgcctacttaaatatccattgccacgatagggataacctagcttcatgctaccaaccattcagaatcgtaattaatcccccatgcaggaagaaaaaaatatgatactgggatatgggagaaggtcatcaagcctagatttgaaaccaggatataaagagctggagttacaggcacctaccaccatgctcggctaatctttgtatttttagtagagacggggttttaccttgttgcccaggctggtctcaaactcccggcctcaggtgatccacccacctcggcctcccgaagtgctgggattacaggcgtgagccaccacactcggccagcgttttcccttagactcgaaatttcgctcctatcgtcccatccttgtagtaagaaagtactctttctaaggtttaataacaaattttactcttggcaattacaaggaaatcgactatattaaaatagctaacgagaggaaattactgaagctacaaagtcaaagtctcataatcaaagttatccttgacaactgacaagagttgttagatcttctattggtctttctgctaattcaaccctagtcttaaaacaaaaatagcctcctattgcctaatcccttgtacacacaaaaccactgcacttcggtatttctaatacgagaaagtttctatatatccaacctttcctatctttgaggggcaggcatggttaacgtggttctcagtaagatattcatttacaaccaagagaaaatcccaggctatcatctcacattcttgttttactttaaaaacctttctaacgtcatttattctctgacaacctcaaaattactttctacaaagcaaactctagaaatctaaaaatgcgaagtgcgtgcttgtgagaaggtactaaggaaattcttcctttaaacgtcaaatgtgaattctaacttctaatgagtaagaccctcgagatttacagcggtggtctggtggaaagaaaacccttggcactagtagctcacaaaaccccagcccatggttgaggcggaagcggccagatgctcccgggctttcgacaagccgccctggaaagcaggcccgtcatcttcagcggaaagctctctcacgtctgggcccgcaagcccggagggttcgtcataaacacacaaggcaaggatagaagcgaggccgaggggctggtcacgcaactgtcaaacgaagcccacccaccgactgacaaggccccaaggggacaagcgatccccgcgcgggatactcacccgttacctcaggatcgcgactacaactcccaggaggctgcgcgagcgacggaccaacgcccttcccagaatgcagcacagctgcatccctaccccgccctctcctttctccgctcctcctgcttttctacccgtcgtcacccgggagagccggaggtagggttcgggaggaggatcccgaaggctcggcgtgtcgcgtcagacgccgggagggggacggggcggggagtagtgggggagaatgggaggacgaaggggaggggaaaggacaggggaggggagggtaaatagtgggccaggcaggaagatggcggcggtagcggaggtgtgagtggacgcgggactcagcggccggattttctcttcccttcttttcccttttccttccctatttgaaattggcatcgagggggctaagttcgggtggcagcgccgggcgcaacgcaggggtcacggcgacggcggcggcggctgacggctggaagggtaggcttccttcaccgctcgtcctccttcctcgctccgctcggtgtcaggcgcggcggcggcgcggcgggcggacttcgtccctcctcctgctcccccccacaccggagcgggcactcttcgcttcgccatcccccgacccttcaccccgaggactgggcgcctcctccggcgcagctgagggagcgggggccggtctcctgctcggttgtcgagcctccatgtcggataatcagagctggaactcgtcgggctcggaggaggatccagagacggagtctgggccgcct

SEQ ID NO: 3043 - DNA, 6000 bp, Homo sapiens
atgtagagtaatatccctaattcaattcattgtatttaaatttatagagaataacgagcatttaatcacattctgaaattttgtgctgggtgctaaatctgttcaaagtattaaatatttgaatatttgggagattcaaaatagtatttgtccttaaagtatataaaggttttctgaggaaattattgcatttggttatttatagtatattagaaataggaaacaagctccacctaggaacttactgtagtttagcctttcgtattcatacttctctctctcttcccgccacctctctctccctcactctccctttcccccatcccctgtctcctccccttctctcttattacttttggtatattttgcatattttctggtagattaattccaggtgactttgatcacagtgtggttttttatatagctttgtttacctcttataggtgggaggaggcctaccacactaaaactttttccttagaattctttcttaaaaattctaagtttccatctttattaccaccaaaaacaaaagtttgccttatatgtgtgggtatatatatgtgtgtgtgtgtatatacacatatacacatatatatacacatatatacacatatacatatatacacatatatatatacacatatatacatatatatacatatatgtatatatatgtattttttttttgaggcggagtcttactctgtcgcccaggctgcagtgcagtggcgtgatctcggctcactgcaacctggctcactgcaaccgccacctcccagtttcaagcaattctcctgcctcagcctcctgagtagctgggattacaggcatctgccaccgcgcccagctaatttttatatttttagtagagatggggtttcaccatattggccaggctggtctcgaacccctgacctcgtgatccacccacctcggcctcccaaagtgctgggattacaggtgtgagccaccgcgcccagccttatttatttatttatttatttatttatttatttatttatttatttttgagacggagtcccattctgtctggcccaggctggagtgcagtggtgtagtcttggcccactgaagcctctgcctcccaggttcaagcgtttctcctgtctcagcctcctgagtagctgggactataggcatgtgccaccacacccagctaattttgtattttaagtagagagggtttcaccattttggccaggttggtctcaaactcctgatttcaggtgatccacccacctcggcctcccaaagtgctgggattgtaggcatgagtcactgctcccagctgtgccttatatttttaactagtaacctgaataaattcggggtgattttgaaagcagagctcacaggatttcctgatagtttggatgtgggtgtatgagaaagagaggggtcaacgatgactcctgggttatttgcatgagcaactggaatagattagagttgccctcaatggataccaggaaggccgtaaatggagctggttggaggggatggaggcagatgaaaagattacttttggacatgttaaacttgaaatggcaaacaggtattttgactggtgctataaacctgtaagtcattggcatgtagatgatagtcaacatatgcctatgaaactggacaaaagtttcatggtaattaggtatcaataagcaggaaggtagcaaaaaactaactttacctatctcacaattttgccttgtcccaggattgcccatagcccaattcttttgattcaagcaccaaaaccaactcttagagttttttgtttgtttgtttggtttggtttttttgagacaggttcttgctctcttgcccaggctggagtgcagtggcatgaccatggcctactgtagccttgacctcccaggctcaagtgaaactcccaactcagacttccaagtagcttggactacaggtgcgcatcactacacctggctaattttttacttttatttttgtagacatgagtctcactgtgttaccagggctggtgttgaactcctgggcttaaccaatcctcctgccttggcctcacaaagtgctaagattacagccatgagatgctgcacccggcctcttctcaagagttttttggctaagcaattaatatatgtgaagagtaggcattcaataatatgtcttttccttttatacatttcatcttttaaagggcaaggcagccaggagttgtggcatgtgccttcagtctcagctatttcggaggctgaggtgggaggatcactcgagcccaggaattcaagtccagcctgggcaacccacccctgtctctaaaaaacaacaagagccaggtgtggtggctcaggcctgtaatctcagctctttgggaggctgggacagatggatcacttgagtagtttgagaccagcctggctaacatgacgaaaccccatctttactaaaaatacaaaaattaaccaggcatggtggtgtgcacctgtagttcaagctacttgggaggctgaggcaggagaatcgcttgaacccaggaggcggaggtagcagtaagccgagatcacaccactgcactccagcctgggtgacagagtgagactttgtctctgaatgaatgaatgaatgaatgaatgaatatgaataacaacaatgacaaacccagaaatatatgggcaagacagcttaaatgtaggatgtttgcatttagccacttcactctttagtagtgaaggtatggtgaaattatgactgaattacattcacctgctttactagacaatgacaggtaattggattaatgaagcgtaaggcaaaatatagagtaattttagctcagtgtgatagtcgaagggaaaaaaattcaaatgataacaaaaaaccaacctatattcccctgggcactacgaaataacatctataccagtggttcttgtactttgggacacattggaattacctgggcatctctttaaaatactcctatctggcttctactcccagaccttctgatttatttggtatgggaggagctttggcgtcacagctctccaggtgggcctaatgtgcagcaaagtttgagaactaccatgatgtatactttttttcctagtgaaactaccactaatagtcacagtattcagagtcccttccaaaattctttttattctttgctggtgccaaaaacagaagcaacattgttaagggaagatcctcaaggcagagtggagtaaatgagtgccctctctaaatcatacaaataagtcacaatcgtaatttattttagattcatgacagctgttcatctggccacttatttatagcatacatgatccccaaattggaggcaaccgtaatgtcatggagtgcatcagagttgaagtaaaaaggcttgcattcaaatcccaattcttccacttactaacagttatgatgggcaattcattcaatcttgctgaagttctcatttttttctccctaatatgaaaataaccagatctgttttgcatggttgtaaatatctttaaaagctaatgtatgtgaagataaactataaagtatataaagatattaaataattattatctgaaaggatttttcttaaccttagagatgacgtaactttctaggtttttttttctgtattttttcattgccttaagaaggagatctgcatacagtagataataaatgcatttgaacttaacgtgtatagtagaggaagtattattttgtatttctataccatgttttaatctgggtagaaacgtaagttttctactcatgcctgggttccaacacatgtgttgccacttgttagcaaatttgtgtcagtagacatgttctaagagtcaggtttgttatctttttgtatggcgaataatatctatctttcagggctgttatggccctcacatgtagtgccgtaagcatagtagctagaatggagcatgcagaaaatgctaattcctttcttctctccaagaatatcataatcttgtgatagtacagatgacctttgaacaccacaggggctagggaccctgcccacacacaatcaaaaattcacatataatttttgactcctgaagaacgtaactactaatagcctattgtaaactggaagccttactaataaggtatacagttgattaatatgtattttgtatgttatatttgttctgtactgtatttttacaataaagaaagccagagaaaggaaaatgttattaagaaaatcataaaggagacaaaatatatttattattcattaagtggaagtagatcataaagatcttcatcttgtcttcatgttgaataaactaaggaggagaaagcagtggggttggtctttctgtcttgagggtggcagaaacggaagaaattcaaatataagtggatcctctcagttcaaacccgtgttgtctaagagtcacctgtaatttttaaaatctgagtaataatttttagtagctaaaaattcttaactgtcatttaaaaattttgttttgctgatttctatatcatttaacgttttaaaacttttttattgatgcataacggatgtacatggtcctcctgccccaccccaccccccacccccacaacatgttttttggagttttttctggtttttgtttgtttgtgttttggagacaaagtctcgctctgtcccccaggctggagtgcggtagcgcaatctcggctcactgcaacctctgcctcccgggttcaagcaattctcctgcctcagcctccctagtagctgggactacaggcgcatgccgtcatgcctggctaatttttttgtattttagtagagacagggtttcaccatgttgcccaggctggtgtcgaacccctgagctcagtcaatctgcccgcctcggcctcccaaagtgctaggattacgggcatgagccaccacgcctggccacagatggttttaaaagcagtgtttatctttatgctttttcagataagtttataccatggatagcacaaaggagaagtgtgacagttacaaagatgatcttctgcttaggatgggacttaatgataataaagcaggaatggaaggattagataaagagaaaattaacaaaattataatggaagccacgaaggtatgtttcttgtttcttttgatgtgtgtaatttaatgaccttttaactttctgtttcaaagaaaatcatttgaatatcatttgtatttaatatttcaatattttaatatatattatttttaaactacaaaagggtatggaataatctcccttctattctgttgctcctaccatccaggtttctatttcacatgcatataataggcatttaaaaccaaaataatgtatatgttcctgttcacctttttttttaaccccagtgggagaaattgtttaggtatttggatttttttttttcagttaatataacttggagctctttctgtataggtaaataaagatcttcattctttgtatgcctgtgtgtgtggatataatgtaatttattgaaccatccaaaaagtttatggataaatatatgtcatttgtagtcttttatttttacaaacattactagtgaagtagggaataacgtattttataactttctatatgtgcaagtataactgtggaagagattcctacaatggaattgtttcaccaactacacatagcacaaaagaatatatgcatgtgtgatttttatgaattgccaaattaccctccatggtgtttctatcaattcacacttccactacaaatatctgagagtatgtattaccatactgaaactgtgccaacacagtgtattactaaacttttgtatttggcaatctgaggtaatatagtatagcattaatttgtattccacttatgaaaaattagtttcatatcttttcttttttttgagacaaggtctcactctgtcacccaggccggagtccagtagcacaataatagctcgttacagcctcaccctggtctc

SEQ ID NO: 3044 - DNA, 6000 bp, Homo sapiens
gatgggtctcctgaatagagcacactgatgggtcttgactctttatccaatttgccagtctgtgtcttttaattggggcatttattttgatcctgtcataatgatgctagctggttattttgcccattagttgatacaggttcttcaagtgtcagtggtctttacattttggtatgcttttgcagtgcctggtaccggtttttcctttccatattcagtgcttccttcaggagctcttgtaaggcaggcctggtggtgacagaattcctcagcatttgcttgtctgtaaaggattttatttctccttcacttatgaagcttaatttagctggatatgaaattctgggttgaaaattctttaagaatgttgaatgttggcccccactctgttctggcttgtagggtttctgcagagagatctgccgttattctgatggacttccctttgtaacctgacctttctctctggctgcccttaacattttttccttcatttcaaccttggtgaatctgatgattatgtgtcttggggttgctcttctcgaggagtatcttgtgtttttctttgtatttcctgaatttgagtgttggcgtttcttgctaggttggggaagttctcctggataatatcctgaagagtgttttccaacttggttccattcttcttgtcagttttagtttcaccaatcaaatgtaggtttggtcttttcacatagtcccatatttctaagaggctttgtttgttccttttattcttttttctctaaccttgtcttcatgttttatttcattaagttgatcttcagtctctgatatcctttcttccgcttgatcaattcagctattgatacttgtgtatgcttcccgaagttcttgtgctgtgtttttcagctccatcaggtcatttatgttcttctctaaactggttattctagttagcagttcctgtaaccttttatcaaggttcttagcttccttgtgttgggttagaatatgctcctttagctcggaggactttgttattacccaccttctgaagcctacttctgtcaatttgtcaaactcattctccatccagttttgttcccttgctggcatgaagttgggattctttggaggaacagaggtgttctgttatttggaattttcagcctttttgcactgttttttcctcatctttgtggatttatctacctttagtgtttgattttggtaacctttgaatggcgtttttgcgtggttatcctctttgttgatgttgatgctgttgctttctgtttgttatttttccttctagcaggaccctcttctgaagttctgctggagtttgctggaggtctactccagaccctgtttgcctgggtatcaccagtggaggctgcagaacagcaaagattgctgcctgttccttcctctggaagcttcatcccagaggggcaccatcagatgccagctggagctctcctgtatgaggtgtctgtcaacccctgccatcaggaggcattggggtcaggcacccacttgaggaggcagtctgttccttagcagagcttgagcgctgtgctgggcgatccgctgctctcttcagagccagcaggcaggaatgtttaagtctgctgaagctgtgcccacaactgcccctttcccctggtgctctgtcctagggagatgggagttttatcaataagcccctgactggggttgtggcctttctttcagagatgccctgcccagagaggaggaatctaggaaggcagtctggctacagtggccttgccaagctgtggtgggttccacccagttcgaacttcccactgggtttgtttacactgtgaggggaaaaccacctactcaggcctcagtaatggatgacgcacctcccttcaccaagctggagtgtcccaggtcaacttcagactgctctgccagcagcgagaatttcaagccagtggatcttagcttgctgggctccgtgggcgtgggatccgctgagccagaccactcagctccctggcttcagccccgtttcccagggaatgaacggttctgtctctctggcgttcaggcaccactggggtatgaaaaaaaactcctgcagctagctcagtgtctgcccaaatggccgcccagttttgtgcttgaaacccagggccctggttgtgtaggcaccccgtgaaatctcctggtctccaggttgtgaagacagtgggaaaagcgtaatatctaggctggatagcaccatccctcaccaacggcacagtccctcacggcttcccttggctaggggagggagttcccagaccccttgtgcttcccaggtgaggtgacaccccaccctgcttctcctagcctttcgtggcctgcacccactttctaatcagtcccagtgaggtgagccgggtacctcagttggaaatgcagaaatcacctgccttctgccttggtctcactgggagctgcagccatcttacccgggaatccccgaagccgttattcttaacgagtgtgacacacaccagttttgagcagtagcaaaaggaacaacgtgcatgttggagactcagatcagaacttgaaagtcattggaaaatggaagaaaggacaatatgaatggggatttcagttgaagaaacttttaaaagcagtagtggcatgcatctggttgatgtagaaagaaaagagttcagacaagggtgactaatgagagatagtaaaggaaagtggaatgtatgagtcatgcagtggagaggtttccttttggcaactacacttgctttaagcacaaaaaaagagaatagcttgctgaagacattattatagcattaatatatgagtctgaggagaattttttcccatttgacttgctttctatttattatctttttcttttctagatgattccatgtccaagtatttcagatgccactttcttattctcatttgactgttatttcttaggtatattttctggattaaaatagagtagtttttagtttacatttgtttttgttaatctccataatttgtttatatgtggtcatggtgctattctctggttcagaattgaggtactaaaagaagtaggttttaattagcatgttaaattttggtaatattgaaaggttccatttattaggtatgggattttactgtaagaagttagccttcttcaagatttttctactagtactcctttcactttttaaaccaactttaatatactgctataaattcattatttttctccttctagtctcccctccccgtctctcttgtgagaaaataatttgaaatcagataaggtctttctcctgaaggaactgacaatttagtatctaatacagtaagtgccatgcaagagcaggaaagcaaggaacattaaattctgtggcacagaggacagacattccattaagatacgaagagatatttcagctgatccttgaaggcttgtgacagagcttggaaaggcactctagacagaggaacagcctgaggaaggcatagagcaacccaggtcattcagtgagctgtagcctaaacaaggggaagcctcctacagatttcactgtacctcctgtagacaaacatgagtcagggtgattgcttctaaaagaggagttatagttttaacctgcgactagtgggcagctagtgtcacagtaagactaagaaggaaggacataaaaaaaattctgcagagtggaggcaaagctggagtacaacatgagggaaaaagccacatatacacctatagctctccacctttgagaaaacttgctagagggaactccacgttccatagatgaccccacttgctcattgctggctgtttttctctcagtttttaatgttttattatgcagctatccattgatccttttagtaatagatgtatttattgaacttgtgccatgtaccaggtactgttctatgttctgtatattttccagcttatttaatagctttcttatgatttttactttaatggtcttggtaacttccctatgttgcatagatcacaactattacacagccacctccagctgcagggtaagctgggaaagtgagtatttagcctttcttgccttgatagtggaggccggccacaaaaatggaagttagaaatgagtatgtctgctgcaaaatcacttttcttacttgcttcctttgtttatttctaccccctttcatttctttctcgttgtaaaactaagttgttagttttctctgaagaaactaaaattctttaaagattaagaatcttcactattgtatttgacatatatattaaagttcatgaagaataaattacagcttgggttttaaattttacttgtatagattaacatcaaattttaacattataaaagcaattctacagaggaacatttacattatgctacagtatcttcagttgtaccttcctgttcagcataaacatcatatgccaaagaggtactatattttgttgtatatttcctttgttgcttttttaagacattattattatgaatcaaatgtcagttgtttattttacttacattgaagcttttagttatagtgagttggactccaaatttataaagcagtagaatcatttgataaaagcagttggattagatcattcattcattaaatattaagttcctgttatgtgcctaagggtatggagagatgaaagggttagtagggaattatatttgaggataggctgtctctatgaaaataaaagcaattaccaattttaatttaaaaaacaatacaatatacatagataaacacttataaacaataataaaatataaacccataaacacccatgaacaacaaaatacacacccataagtaagtggatgggtggatggatgaatggatggatggatggatgaatgggtgtgtggacagagactgatagacacttaataaattaagattaatgttgtggttaatggtgtttcaatattatgttgtctaaaagtatgttaacttttttaaaaaattaaggttgacagatttgcaatggaattagaacaaagccgaaatttgagcaataccatagtgcacattgacatggatgctttctatgcagctgtagaaatgagggacaatccagaattgaaggataaacccattgctgtaggatcaatgagtatgctggtaagtaaagatcaaatacaaaaaggaaattttataacgtactcaagtaagctttactgtttcatgaagggggaattctttattgaggtctaccagtttgctgagtatttttctgggtgccttatatatgactcaattactgaatcctttcaacatactttaaggcaggggaccccaacccccagttcacagattggtattggtccatggtctgttaggaactgggcctcacaacaggaggtgagcgtcaggcaagcaaacgaagcttcgtctgtatttacaaccacttcccatcacttgcagtatgcccgagctctgtcagatcagttgtggcattagattctcataggagtgcaaactctattgtgaactgcacatgtgagggatccaggttacatactcattatgagaatcaaatgcctgatgatctatcactgtctcccatcacccccagatgggattctctaattgcaggaaaacaagcttagggctcccattgattctacattatggtgagttgtgtaattatttcattatatattacaatgtaattataataggaataaagtgcacaataaatgtgacgtgcttgaatcatctcaaaactatcaccccaccagtccgtggaaaaattgtcttccacgaaaccagtctctggtgccaaaaaggttaggaactgctgctttaaggtactagtttttatttccatttggcaaaaaagaaaactcagagagatgtttaataacttgcccaaagttacaaacctaataatttccatggcaaattaaatttttccataagtaaccgttctagttaaagagagttgaagaagaaagaaaa

SEQ ID NO: 3045 - DNA, 6000 bp, Homo sapiens
aaaccagacaccaaaggccacatattgtatgattccatttatatgaaatgttcagaataggcaaatctatacacagaaagtagattagtggttacctagggctggggagtgctggggcagaacaggaggtggctgttaatgggcacagggtttcttttggggtgatgaaaatgttctaaaattgactttgatgatggttgcacaactctgggaatatcctaaaagccaccgaattgtgcatgctaaatgggtgaatcatattgcataactgtatctttttttttttttttgagacagaatctcactctgtcacccagcttggagtgcagtggcacgatctcggctcactacaacctccaccttccagactcaagggattctcccgcctcagcctcctgagtagctgggaccactggcgcccgccaccacatccggctaatttttgtatttttagcagagacagggtttcaccatgtgggccaggctggtctcgaactcctgacctcaggtgatacacctgccttggcctcccaaagtgctgggattacaggcgtgagccaccgtgcctggccccaagaactatatcttaataattctgttattagaaaaaaacaaaaacaaaaaacttgccaggtatgatggctcaggagcacagtcccagctactgaagggctgaggcaggaggatggcttgggaccaggaattcaagaccaatctggtcaacacagcaaaaccctgtctctaaaaaaatatatatatttttaattagccaggcatggtggcatgcacctgtggtccttgctactaggaagctaaggcaggaggatggcttgagcccaggagtttgaggctacatgagcaatgaccctgccactacactccagcctggatgacagagtaagacctgtctctaaaaaataaaataaactgaagtggaacagtcacccagcttctgactagtgaatgatcctcccccttcttccttagtgccatttttaacaagtggcaaaggtcctattttaaaatatgccaagtgtgttgtcttatttcaacaacattccatctcaactgtccccatgtggtcttagttaagttacttaactgtgataatcatcaattctcttcatctatcacccacttcttcctctataaaaagagaacaacaggccgggtgcagtggctcacgcctgtaatcccagcactttgggaggccaaggcgggcagatcacttgaggccaggagtttgagaccagcctagccaacatggcaaaactctgactctactaaaaatacaaaaattagccaggtgtggtggcacgcacctgtaatcccagctattcgggaggctgaggcaggagaattgcttgaacccaggaggttacagtgagcagagattgaacccaggaggttacagtgagctgagattgcacaagtgcactccagcctgggtgacagagcgagagaccctatctcaaaaaaaaaaaaagagggcaaaaagcattcttaggaaaaataaatgagctacaaaaagcctctagaataaaaatcataggtgctcattcagtgtttgtagacctaaaaaatgggtctatgcagaataatcaagcaatgaaaggtaggctgccccagaattgtaacattaaccgtggcaaattctctcaagtcacgcctccttgcatgacccctccagaaaggtgaagttttagatttacttttctccttagccacacatctccattcctgtagttatttcatactaacactttcatgttgaccctaaaattcaaattttaccttttatggaaggattaatattttacatatatctccattggacagatacctctatctgaattggaactttttttttttctcattctctttacctaatttcctgaggataatgaataaagatggatttcctgtcttcccttatcacaaattctctggtaccataaaactagagaaaaatctgctcaactgtctatatgcaacaccacctctagaaatccaggaactcaggcactcaggcaggctgggtttttatttatttttgtgctgttttttgtttgttttttgttttgagacagagtctcgctttgttgcccagggtggagtgcagtggcacaatcttggctcactgcaacctccgcctcctgggctcaagtgattctcctgcctcaacctcccaagtagctgggattacaggcaactaccagcacgcccaactaatttttgtatttttagtggagatgggatttcaccatgttggccaggctggtcttaaactcctgacctcaggtgatccacctgccttggcctcccaaagtgctgagattacaggtgtgagcccctgcgcccagcctaggcatgctgtttttattcaatgccttttacatacacaaagagcagctctaagcaaaaaaaagcggggagagtagatctgcaggtcctgatactgaaaattgttcaaaattttctattaagtagaaaaagatagtagcaaattagtatagaatataatataatctgtaaaatatatttaaactaatttttgagcttatgactatgcacatatacacatgtacaaatttttaaaatctggaagtatatacagaacaccaatagcagtgggcctcactcaaagggagggattatggggtctatcactgcctaccttccacatttctgtactgtttgaaatttctgtagcaagaatgttttaattttataaccaggacaaaaatagctagaaggaataaaggagaaagttgggagaactacagctaaattgcagaattgtagctctaccatccccttaacctcctatacacatcaccatcacctatagggggccactctgctcaggaacaaaagggacctttctccacaaagaaaaaagacacaattctaatacgctcttctgccctctggagaattccagaataccagagccatgactgaggagaaaaaagaatcccccacaactcaccagagttgccagacattcccagatcacttcctccttccttttgttggactttctttactttctttttaacaggcccatcattttccaatggtctcttctttcttctgtcaatttctgtagcctatatcgggaaggttagaaaatgatgtgttatctctactctgagaaggcctgacgtatgtgaagcaatttaaaccttacaactgaatgacaaggttccttgccatccactcttcaaagaatcctctacttttagctctggaaaaccctatgggtgaactgtttttaacaccataaaagacaaggtagagtctgatagtcaggagcctcagcaactcaagccgtgtttagaattaattgaaaccaaggctgctaccggtcttgattcaatgagccttcagctttctctaattataaaacttgaatcaccctacttacatatgctaaataaaatacctctaagaaataaacagttatgtagcaaaggcacagaggggaaaagataggtaataaaagaacagtatcatttttgacatgttcactgcaatttaagtgtttcctgtttaaaaggtttatgttcatcactaaagatgtgacaagattatgaattttttcttggcagaaaacttgccaaaagcatacataagtccttcaccagctaccctttaaatggtgggtgcaaaattttggtgaattcatgaaaacgtagctcgtcctcaaaaaaaacagaagaggagtaatcattttaagggagaaatatatacgaaaggaacaagattttgaagcacccaagctgccacctacattaaaacacggtaggtggctaaacaccagtcttcaatgcccttccacagcctcaatctgaaaaatactgtgcaggtgacccaagtgaggggtcacccttgggcttttcctgtggcagtatctctggtttaaaaacaaacaaacgtacttattgcgttgaaggatggcaacaggaaggactccatgattagtcacatctataccatcctaagaaactttatccacccaaactgtatttcagactttataatctaaactacaaaaagagttcactggggaactgcacaatatgactgcttttaaccgtagtgatttcaaatattgagccatgctgttgcagtcttaaaaactggagacctaagggcagctttcttctagtcacccaatccagcacttttttaaaaaatcagtaaaactcttcgaccaccaaggaaaaaaaaaaaggatggaggttaaaagacgcaccccttgcccacaagccccctcatcagaatgggagtcaggagacctgagttcctgtctcaggcctgccattaaaaacctgcataacctttgcctatctcctcaaacggaagtactaaaacctcagcgcttcacccaatttgtagccccggctgggctcttcccaccttccccttcttcagcccgccccttcctcctccagccctatcatcgggcggagggtccccgcctccgcccgccttacccacaagccccgcccccccagccccgatggccctgcccagtcccagacagaacctactatgtgcggcggcagctggggcgggaaggcgggagctgggggcgctgggggcgctgcggccgctgcggccgctgcagccgctgcagcgccagggtccacctggtcggctgcacctgtggaggaggaggtggatttcaggcttcccgtagactggaagaatcggctcaaaaccgcttgcctcgcaggggctgagctggaggcagcgaggccgcccgacgcaggcttccggcgagacatggcagggcaaggatggcagcccggcggcagggcctggcgaggagcgcgagcccgcggccgcagttcccaggcgtctgcgggcgcgagcacgccgcgaccctgcgtgcgccggggcgggggggcggggcctcgcctgcacaaatggggacgaggggggcggggcggccacaatttcgcgccaaacttgaccgcgcgttctgctgtaacgagcgggctcggaggtcctcccgctgctgtcatggttggttcgctaaactgcatcgtcgctgtgtcccagaacatgggcatcggcaagaacggggacctgccctggccaccgctcaggtatctgccgggccggggcgatgggacccaaacgggcgcaggctgcccacggtcggggtggccgactcccggcgagaggatggggccagacttgcggtctgcgctggcaggaagggtgggcccgactggattccccttttctgctgcgcgggaggcccagttgctgatttctgcccggattctgctgcccggtgaggtctttgccctgcggcgccctcgcccagggcaaagtcccagccctggagaaaacacctcacccctacccacagcgctccgtttgtcaggtgccttagagctcgagcccaagggataatgtttcgagtaacgctgtttctctaacttgtaggaatgaattcagatatttccagagaatgaccacaacctcttcagtagaaggtaatgtgggattaagtagggtcttgcttgatgaagtttaccagtgcaaatgttagttaaatggaaagttttccgtgttaatctgggaccttttctcttattatggatctgtatgatctgtatgcagttcccaaggttcatttaccattattaaaaaatttttgtcttagaaattttatgtatgtcaacgcacgagcaaattatcaggcatggggcagaattggcagctgggtggaggcttcggtggaggtgagcactccgaaaggaaaacagagtaggcctttggaacagctgctggaagagataaggcctgaacaagggcagtggagaagagagggtaaaaattttttaaggttacatgaccctggattttggagatctcgaatttaaaggtgatgcaccagggatgaacgctcagattttcagtttgaaagctggcgtgacatgtaaaggagtggagaataatgtaccattgtaatgatga

SEQ ID NO: 3046 - DNA, 6000 bp, Homo sapiens
tgtatgtatagctcatatttacttcagtgttttctattagaagtgtttttggccttcatttagaagtttggtgatgtttttgtgaccagcaatatgccctaggaacttaactcttgtgtacatccagtagcctatggtaaaattggttttgctctacattgtttcacttaaagtcacagtttccaagaactcacagatgacattgaggacttatctatgtgcatagatatgatggacatcctgacatttagtggatctcctttaaaaaactgaacttaaaagtctcttcacgggcaggtcaatttcactggttgaaagtaagagacagctgaaccctcgtggagccattcatacaagtccctatttaaggaacaagtgattatgctacctttgcacggttagggtaccgcggccgttaaacatatgtcaccgggcaggggtgcctctaatactgataatgctagaggtgatgtttttggtaaacaggtggggtaaggtttgccgagttccttttactttttttaacctttccttgtgggcatgcctgtgttgggttaacagtgggggtaataatggcttgttggttggttgtagatattaggctgttaattgtcagtttaatattttggtctgatgtaggcttatgtggaggagaatgctttcatgttacttataccaacgttagttcttctataaggtaatagattggtccaattgggtgcaaggagttcagtcatatgtttgggatttttcggatgataggtgttgagcttgaacgctttcttaattggtggctgcttttaggcctactatgggtattaaattttttactctctttacaaggttttttcctagtgtccaaagagctgttcctctttggactaacagttaaatttacagggggatttggagggttctgtgggtaaatttaaagttgaactaagattctatcttggacaaccagctatcaccagactcggtaggtttgtcgcctctacctatgaatcttcccactattttgctacatagacgggtatgctcttttagctgttcttaggtagctcgtctggtttcgggggtcttagctttggttctctttgcaaagttatttctagttaattcattatgcagaaggtacaggggttagtccttgctatattatgcttggttataatttttcatctttcccttgcggtactatatctattgcgccggtttacaatttctatcgcctatactttatttgagtaaatggtttggttaaggttgtttggtagtaaggtggaatgggtttggggctaggtttagctcagagtggtcaagttgagttgaaatctcctaagtgtaagttgggtgctttatgttaagctacactctggttcgtccaagtgcactttccagtacacttaccatgttacgacttatctcctctatataaatgcgcaggggttttagttaaatgtcctttgaagtatacttgaggagggtgacgggcggtgtgtacgcgcttcagggccctgttcaactacgcactctactcttagtttactgctaaatccaccttcgacccttaaatttcataagggttatcgtagttttctgaagtagaaaatgtagcccatttcttgccagctcatgggctacaccttgacctaacatctttacgtgggtacttgcgcttactttgcagccttcgtcagggtttgctgaagatggcggtatataggctgagcaagaggtggtgaggttgatcggggtttatcgattacagaacaggctcctctagagggatatgaagcaccgccaggtcctttgagttttaagctgtggctcgtagtgttctggcgagcagttttgttaatttaactgttgaagtttagggctaagcatagtggggtatctaatcccagtttgggtcttagctattgtgtgttcagatgcgttaaagccactttcgtagtttattttgtatcaactggagttttttacaactcaggtgaattttagctttattgaggggaattgatctaaaacactctttacgccggtttctattgacttgggttaatcgtgtgaccgcggtggctggcacgaacttgacgaaccctagggttagtatagcttagttaaactttcgtttattgctaaaggtttatcactgctgtctcccgtgggggtgtggctaggctaagcgttttgagctgcgttgctgcgtgcttgatacttgttccttttgatcgtggtgatttagagggtgactcaccggggcagggatgcttgcatgtgtaatcttactaagagctaataggctacgaccaaacctatttgtttatggggtggtatgagcctgtcgaaacattttcagtgtattgctttgaggaagtaagctacataaaccgtatggggtgtctttggggtttggttggttcggggtatggggctagcagcggtgtatatgttgagtaaggtgggcagggagttgcattgatggggttagtagaatgtgagttgagggaggatgatgtgttagttgaggggtgactgttaaaaatgcataccgccaaaagatgaaatttgaaatctggttaggctgatgttagggctctttgtttttggggtttggcagagatctcctttaaaaaactgaacttaaaagtcttaccaaaattcatacttatcactcattacctaaatctaactatttttccctttggcattatccaatttatatccaatatttagttttaatcatttgcaattgtgtatgacatagtaaagattctggggaggccaagatgggcagatcacgaggtcaggagatcgagaccatcctggctaacacggtgaaaccccgtctctactaaaaatacaaaaaattagccaggtgtggtggcaggcgtctgtagtcccagctactcaggaggctgaggcagaagaatggtgtgaacccgggaggcggagcttgcagtgagcggagatcgcgccactgcactccagcctgggcgacagagcaagactccctcttaaaaaaaaaaaaaaaaaagattctgagtcaaagtgctcaagttgaatgcattttgtcacccacaagacaaaacgtgttaaccccttgtggtttactttatctataaaatagagataacaatagttcctgcttctagggttgttgtgggaattaaagacttagaataatgttcagcctctaatcagtgctgtcacaactgtctgatacaattgtattatatttgtgtactttgtagattgatattaaatcatacttttaaaaataggtgcttaatgttccactcaattaccttaaaacatgtttaattatgtctctatcctactcttataacacttctataaaaactttttacatatagcgtccacttttggttcagtttcttaggaaaataactttgagagtcagctatctgaaccaaagaaacattaacattaccagactatattgggatttttgagactggcttttatcaattctttagctacgggctcttgtcatcatctctaccagtgacctaagtgtcaaacccaaatgccttgtatctgtcccattaaagagatgcagcatctgctcctttcttactgtttccatttcctctgccatgcctcctcttacaaccataaatatccaggtctcttaggttttaaacggggcatctctcaacccccacattcttttccttggttattcccttccctccaacagttcaattcacctagatccccacgcctgaaattatcctagatgtcctagaggcgcctcatcattacaatggtacattattctccactcctttacatgtcacgccagctttcaaactgaaaatctgagcgttcatccctggtgcatcacctttaaattcgagatctccaaaatccagggtcatgtaaccttaaaaaatttttaccctctcttctccactgcccttgttcaggccttatctcttccagcagctgttccaaaggcctactctgttttcctttcggagtgctcacctccaccgaagcctccacccagctgccaattctgccccatgcctgataatttgctcgtgcgttgacatacataaaatttctaagacaaaaattttttaataatggtaaatgaaccttgggaactgcatacagatcatacagatccataataagagaaaaggtcccagattaacacggaaaactttccatttaactaacatttgcactggtaaacttcatcaagcaagaccctacttaatcccacattaccttctactgaagaggttgtggtcattctctggaaatatctgaattcattcctacaagttagagaaacagcgttactcgaaacattatcccttgggctcgagctctaaggcacctgacaaacggagcgctgtgggtaggggtgaggtgttttctccagggctgggactttgccctgggcgagggcgccgcagggcaaagacctcaccgggcagcagaatccgggcagaaatcagcaactgggcctcccgcgcagcagaaaaggggaatccagtcgggcccacccttcctgccagcgcagaccgcaagtctggccccatcctctcgccgggagtcggccaccccgaccgtgggcagcctgcgcccgtttgggtcccatcgccccggcccggcagatacctgagcggtggccagggcaggtccccgttcttgccgatgcccatgttctgggacacagcgacgatgcagtttagcgaaccaaccatgacagcagcgggaggacctccgagcccgctcgttacagcagaacgcgcggtcaagtttggcgcgaaattgtggccgccccgcccccctcgtccccatttgtgcaggcgaggccccgcccccccgccccggcgcacgcagggtcgcggcgtgctcgcgcccgcagacgcctgggaactgcggccgcgggctcgcgctcctcgccaggccctgccgccgggctgccatccttgccctgccatgtctcgccggaagcctgcgtcgggcggcctcgctgcctccagctcagcccctgcgaggcaagcggttttgagccgattcttccagtctacgggaagcctgaaatccacctcctcctccacaggtgcagccgaccaggtggaccctggcgctgcagcggctgcagcggccgcagcggccgcagcgcccccagcgcccccagctcccgccttcccgccccagctgccgccgcacatagtaggttctgtctgggactgggcagggccatcggggctgggggggcggggcttgtgggtaaggcgggcggaggcggggaccctccgcccgatgatagggctggaggaggaaggggcgggctgaagaaggggaaggtgggaagagcccagccggggctacaaattgggtgaagcgctgaggttttagtacttccgtttgaggagataggcaaaggttatgcaggtttttaatggcaggcctgagacaggaactcaggtctcctgactcccattctgatgagggggcttgtgggcaaggggtgcgtcttttaacctccatcctttttttttttccttggtggtcgaagagttttactgattttttaaaaaagtgctggattgggtgactagaagaaagctgcccttaggtctccagtttttaagactgcaacagcatggctcaatatttgaaatcactacggttaaaagcagtcatattgtgcagttccccagtgaactctttttgtagtttagattataaagtctgaaatacagtttgggtggataaagtttcttaggatggtatagatgtgactaatcatggagtccttcctgttgccatccttcaacgcaataagtacgtttgtttgtttttaaaccagagatactgccacaggaaaagcccaagggtgacccctcacttgggtcacctgcacagtatttttcagattgaggctgtggaagggcattgaagactggtgtttagccacctaccgtgttttaatgtaggtggcag

SEQ ID NO: 3047 - DNA, 6000 bp, Homo sapiens
caccagtttttccattaataacctctttctgtttcaggatccaatctagcataacatattgcatttagaatcttacatgtaaatacacaattttttatttatattttaaaagtatcactctggctgacatatgagaatagactgtagggaggcaaggactgaaaaaagcagagagaacagaacacaattactataatccaggcaagaaatgatagtgggtaataacaaaaatctgagcaagagatgatcagtatactaatagcagaaatagtagaaaactgttgaattctagatatatttcatagaaaaagccaacagatttgttggaatacaagagaaaggaaggagtcaaggatgactccaaagatttaactgagcaactggctgtataaagttgccatcaattcagatgagaaagaatgggaaaggtttgggaggaaaggagttcggtctgggacatctgagttcaagatatcttttaaatataccaatgaagatgcagaggtagaaaaagaggaattggaacatggagcatagaaaactctttagaggatttttgttgcagagaagagcaaacaaatggggttgaaaatggagaaaggttaagagaaacatttcttaaggtaaaagaaataagacatacattaaatagaagtgtcttttttggtgaaacttctttttttaaaaaatgttaatgtgtatatttgaggtttacaagttgacattataggatacacacagatagtaaaatggttattttagtcaaggagattaacacctatcatctatcttattttttgtgtgtgacaagggcagctgaaactctacttatttaacaaaaatccctaacagaataaaactgtattaactttggtcctcaagtacatttcagtctgaattgaaaagccatgtgggaagggaataaaaacaaggggggagaaaaaaaggacaaacactggaacatgaaaaacctctacctgaggttagggaggctagctgaggataagaggaaaaaagcagaacaattgtctttcaatatatgtgaataacagtgaatgaaaaaaggtaggtaatgtaaaaggtaatgtaaatcaaccctatcattaacactagcaacaaagtaaaaagagaaaatggggagaaagtggtctggtgatacaaatgcaataccaacttaatactaaaaccttttatagcagtcctctccttatccaagggtgtatatcccaaggccccgtgaggaggctgaatccaactgccttcaatctgagcatgcttctgttcacattttctaaccacaaatttaattccttttttatcttaactaagcttttataatgcactatggctataagtttggcagtttgaggtgtgacagtaaaactagcataaatttctttttgcttattcacaattttacagatagatttgttcttaccatagttcttaacaacatcaacataggatttcttttcttccttattaagtggagaactttcctttttttgcttaaaagaggcactttacagctactctttggcataaccaaattgccagcgtcgttactcttgtgctttgaagcaataattaagtaaaataagtattcctagaacacacgcactgtgataccacctccatcaatctgataaccaagcaactaaaaggcaggaagcttatacagcagggatacgctaaacaaggagatgattcatggccccgggctgaatgggataggatggaataagatttcatcacaactcagaaaggcatgctatttaaaatgtatgcattatttctggaatttttttttttttttttgagatggagtctcgctctgttgcccacgcaggagtacagtggcacaatctcggctcactgcagcctccacctcccgggttcaattgattctcctgcctcagcctcctgactagctgggactacaggcacatgccaccacgcctggctaatttttgtatattagtagagatggggtttcaccatgttggccaggctggtctcaaactcctgacctcaagtgatctgcccgccttggtctcccaaagtgctggaattacaggcatgagccaccgcacccggctggaattttctacttaatattttcagactgtggttgatcatgggtaactgaaactgcagaaatcaaaacctcagataaggagggactactgtatttagtgcctaatatatgcaattcaaccattcctccattataattcctcctctccagggacttttaatttagcaaagacaaagccatgcacagtaatagccaacactttctgagtgcttactgtatgccaaacatttgcctagatgatttacttgtaataactcatgtaatcctcataacactgaggacacctgtgcactggcgccacagaaaactacaaatatccactatttttacatacgattttaatatacccatgaaaccaaagttggaaatattcttccagatgcaggtgagataatactttttgaacaggccagacgtggtgcggtggcctacacctgtaatcccagcactttgggaggccgaggcgggaggatcacttgagcccaggagtttgagaccagcctaggcaacatagtgagccctgtctctacaaaaaataaaataaaattagccaagtatggtggcatgcaaccatggtcccggttactggggatactgagggaggaggatagatcgcttctgccctggaggttgaggctgcagtgagtcatgattgtgccactgcactccaccctgggcaacagagcaagatcctgtctcaaaaataaaaataaataataatttttgaacaaaggaataacacagacagattttatttctagtaaggaaaggatccaagatggttttaaatgaggattcactgcaaagctgccagaaagattttagaaattgtgatataatctgaaaaccaaaaagtagggggtttatgtaagacaatggagctaaactaccacctcccaaaaaaaactcaccacgtcagattaactttgatgttttacataaatgcaataaacattatacatatttgttcagcctcatttattggcatatgtgtttctctatagataacttaaaaactggcaatgccgttctttactgttttgaagctcaggtacataagaagtcatagcctaaaattaattaaaatatatagatatagcaaatcaattgtgatctctaacaagttaagctttctgatgcttttcacaggtagcctgaagcagagcttcatacagaagtattacctttatatgtaacaaagatcaagacaatcttcacatgaaaccaagggcagttatgtctacagacacatttactgccctaaaagccaagctcgataaattgcacaacataatttccataactaaaccaggtttgtttaatttgaatggcaagacctaaaaggtataatataaaggaattacaagacagaacattaaaagactttttttatccttaggtggagagtactgtatcttttaaatacctttcttattcccctctcccccaaccttattaaattccttaaaggaacagaccatctttgttcctatgctgcaatctgaagatccatgaataaagcaggcacccagtaaatacttgctaatttgtgtatttgaccaactcttgacaattcaatataacagactcaaatatcaagttagttatagtttaaaacaaaacctttgtgtgccctagtgaacaatgtaaacacaaatagcagaatcccaaatcttctaatcattgtgttgccctaaatacaaaagggtctcataggccgaatacagttcataaaccaaaatctcacgtgagttaccttctctctttctctctatccaccttctaagtccataaaaaattgaaaacattctgaaaagaactctctcctgcctgagaaaaaatacaccacacatttagaaccaaaagcttgccataagggggcaaagagtgaaaaactctcatttctaatactttattagaattccaagaactacgcaaattcaaacatgtcaaagcgcctgtttctccatcgataaaatgcagaaagaaaaacgtgtgtgtgtagtagaacctcacctaatgggataattaaaatcagaaaaagctaaatactactactgattaaaagttgccttgtcatttgtcttgccagttgatctctttaaagtacctaatcaatcgctgcagtccgcaaacggcagttccttcccattggttaccacagaaagttctttcctgacctcaaattgcctagtacgtttcagcctcgatgcctggttggaacccacagtttaccaatatctggggattgaaaggacaggccagtgctggggaaatgctcaaacagcctactcaacactaccctctggattcaaccgtcctcccaatcccacaaccaacacagagcatttcaaaagtgcttcgcattcccaagaatccctcagatgcaaacggagaaactgaaaagggggtgaacaggtcgcaccctgaggataatgccgagaaccctagcatccccaaaagcccacaagaggaagtcgcgggagctcacaaattgagggggattctcgcattgtggagttctaggggtaagtagcagggaacttttttaaaaagaaagcaaaaagataaaaagaacagaacctcagatttttgttatttaaagaggcagccccacttccggatcctacctctccgtgactctacttccggtatcttccaaaacgcccgctttcacagatcaaggttttgcaaccaatgagagtatcagctacttccgccggcctgcgggacgtgatctaaatcccgccttttccggtggagaggagcctatcctagtgtcttaaccgcccgtcttggtaggcggtgccgtgacaagcccaaccggacggctggagagggcgagaagggcagacgggacatgcagcctcttccgcctgagccccggaagggtgatgtggctgcggcatcgccggcctcgctatggtaagaagtggggctcccaggtcgcggttgatcttcgagaaggggttgtggatctagactagggctggagtttgtgcggcagcccggggtgtgtgggcccggagctgagaggccttggagccatgtggtccctccacggccaaccagagagaatcaggacggactgtccgaggaagactgctgggtcggcagcccgcccctcatgcaaagtccgctttcctactttgtttaggaaaaaaaaatgcgttggtgtgttttaacacgttggctacgtagattatgtgtggtcattgaccctttgaagcattagcgcttctcgagtttccgcttgttttgttgcaactccttatctcgccctaggggctttactctggtgttattgtttgatttttggggggagtttcttttggcaccaaactccataccttcattttcatctgtttagtcagtagcctctcaagacccttccaccttcttctcttaactttgaaaatgctgctttacaagctataggttttaatagttaagagttctctgcaaaggtggattgcccttctaggagcttaatgtacttattggagtggtgtctagcctcaggccttcctcctcttttacctccaggtccatgtgccaaatgttatgtatatttctggacaaaggatgcatgcctgcaaatagacccaaaaacaactatgactccaaaaagcttgagtctccatggtgaaaaattatgagcctatgttcacagaagttgctgcagaatcccatatagcaataattcattttcttctctggacgaatttaccacctggtgggaagatggcagttgagactaggaagactgccactcttaattcttatacatctttctagaaactgaagttgaattcttctactcgtagtgcaagtcaaagataactctttttattatctcactgtcagactagctaaaaataagatgcatatactgtgcttaa

SEQ ID NO: 3048 - DNA, 6000 bp, Homo sapiens
aattatcctgcctcagcctcccgagcagctgggactacaggtgcacgccaccaagcccggctagttttttttgtatttttagtagaaatggggtttcaccatgttggtcaggctagtctcgaatgcctgcctcagcctcctggaagtttttctttgcaatcagtattcaaaagctttgctagagaagatcagcacccacatcagattcctattagcctaatgaagtggttatcaaaggtgtggttcatggaaccctttcatgggttcataagatcagaactatttttataatactaagatacttgccttttaactgtgatgccattttcatggatgatgcaaaagcaatattagcaacagaattatctgaactgctacctcctcacccactcctgacataaaaaatttgcttttcttaatatttttgtgcaattaatggtattgttgcatagttgaaagggcacagcatttcgtgacaaattggttccgtttaaatcttagctctgctatttataagcagtgtgatgttgggcaagacacttggctctccgcatctgtttcttcatatgaaaaatgtggccaataatacgactttaataaaaccttgtatgtaaaataaaacacctgtcagagtaggtgcttaacgaaaacagtaagccctcacttaacgtcatccacaggtccttggaaaatgcaactttaagccaaaagatatataacaaaaaaaatttaccataggcgaattgatataaacaagagttaagttccgatggcatatttctagtcacaaaagcatcaccaaacttccaaatcaatatcaaaacccttctaatattcaacactgaagtaaatgtgagttatacatccacttaagaaagattaataaaaacaagtaagatagctggctatttgctatttcagttcagtgttgacggtgccgggagccatcccagtagcctggagtataggacatcattccagtgcagagcactcaaactgggagagtgtagacacctcaacaaacccattgtatatatctctgggatgtagaagggaactggagtaccaagagaaaatccatgcagacatgggaagaacagacatgaagacaacgtgcaattgggaatggagtttcttcctcatacacgttattgaggatctgctgtatttctttcccatccaataaatcatccaagctggagctgtgcttcatcacccttcattaagtatcttcaaaacgattttcctagttttcctttcctttcaacccaactgctcatcagagttgagacattcaatcattgtatacctgaactacagcacttgttttcaagctggtctcccagattctaatcttcctccatttaaatatactctatgttgttaccagttggttttctaaaatgcacaccttttatttccctgctccaaagcctttatcaagtaagcaattaaacatcatcaaaatataaagtctttggcatggcacaaagctcttcaaaatctggccccaatctttctagcctcatctatcaccagtccactatacttgacttctttttattcctgccacattaaggctccatgcaactattgaacttcatgccttttgttcccataactgccatttcctttatctacgggatagagattgctgtcccacctctagctaatgactccttccctaatactctttaaagtacaggtgagagagaattacttctttcttggggacatctctcaagcagttcccagccagtactactccttccactgtgtttaatgattttctacatatcttctgctataagaggagagaaaatacttcacatctattctctggagactcagtttaattatgaaatgtgggcaatcattcctgctttgcagagtttgtgaaaatcatttagtgcaccaagaaaaagacatgaaaataaactcccttagagttaaccaagtaaaggttcggaactggaaatgattctaactctgtttggctcagtctaaacccatgctctctctactacatgtgttgtcttgctacaacatagcagacaacagatggaatttacttatttaataatttcccccactggactgtgaaatccttgaagacactgagcatgtttgtatccccagactctttttttttttttgagatggagtttcgctcttgttgtccaggctggagtgcaatggcacaatctcgacacaccgcaacctccacctcctgggttcaagtgattctcctgcctcagcctcccaagtagctgggattacaggcatgtgccaccacgcccggctaattttttatttttagtagagatggggtttctccacactggtcaggctggtctccaactcccgacctcagttgatctacccaccttggcctcccaaagtgctgagattacaggcccagactcttaatggagtaataactccagctggcactgtgactgtagagattaaaatacctagtctttaagaattctgcctagagagggagaaatgcaggcaacaccttattgctgttttctgtgaaaagggttatgctagagggatactggaagtatacatatgaactaggaatatccctatagatacctaaagagagtagaagaaaatagaaggggttaagggaggctttttggaaagagatgagacatgagagaaatgttgaaggatgttaggtgttggggggaacaaggcattctgaaattctttaaaagtattaattcacaagtgctacaattactgttcatgctgacagttgtaaattattactgctgataaacattttatccttgaaatgctttttaaaaagattcttggctggggacggtggctcacgcctgtaatcccagcactttgggaggctgaggtgggaggatcacgaggtcaagagatcgagaccatcttggccaacatggtgaaacctcgtctctactaaaaatacaaaaattagccaggcgtggttgtgcacgcctgtagtcccagctactcgggaggctgaggcaggagaattgcttgaacccaggaagcagaggttgcagtgagctgagattatgccactgcactccagcctgggcaacagagggagactccatctcaaaaaaaaaaaaaatcattaaaatacagtaattcaggtttattaagtcattaccattgggttacctcacaaataaactaagtttagatgcgaactcaaagatactgagacactaatccatttcttaagctgctaagttagccttcttgaaacctcacttcgtagctctgcaaacaatgtacttttgacatcccaagctcacaggaataaaaaaccacctgccagttgtttccgttttccacctatgtctaatttatgtacttatatttataagaaacaaatcactaagtcttatttcatccttagttatgttgtgtttctatcgataacagcatgaagatttcggggacctggacattaaaataagtttgagtactggctttacaatctactaggtgtgatccgaggcaagtcagtctcttcatgtttcacttctttcacttgtaaacatctattcagaagttgctgtgaacttgatatttccatgcttataaactgattttttgaaaagagcctggtacataggacgtgataataaatgaaagcatttgctacttttggaaaaacaagcatgacaagatagtttatatactgttgatcttaagcacagtatatgcatcttatttttagctagtctgacagtgagataataaaaagagttatctttgacttgcactacgagtagaagaattcaacttcagtttctagaaagatgtataagaattaagagtggcagtcttcctagtctcaactgccatcttcccaccaggtggtaaattcgtccagagaagaaaatgaattattgctatatgggattctgcagcaacttctgtgaacataggctcataatttttcaccatggagactcaagctttttggagtcatagttgtttttgggtctatttgcaggcatgcatcctttgtccagaaatatacataacatttggcacatggacctggaggtaaaagaggaggaaggcctgaggctagacaccactccaataagtacattaagctcctagaagggcaatccacctttgcagagaactcttaactattaaaacctatagcttgtaaagcagcattttcaaagttaagagaagaaggtggaagggtcttgagaggctactgactaaacagatgaaaatgaaggtatggagtttggtgccaaaagaaactccccccaaaaatcaaacaataacaccagagtaaagcccctagggcgagataaggagttgcaacaaaacaagcggaaactcgagaagcgctaatgcttcaaagggtcaatgaccacacataatctacgtagccaacgtgttaaaacacaccaacgcatttttttttcctaaacaaagtaggaaagcggactttgcatgaggggcgggctgccgacccagcagtcttcctcggacagtccgtcctgattctctctggttggccgtggagggaccacatggctccaaggcctctcagctccgggcccacacaccccgggctgccgcacaaactccagccctagtctagatccacaaccccttctcgaagatcaaccgcgacctgggagccccacttcttaccatagcgaggccggcgatgccgcagccacatcacccttccggggctcaggcggaagaggctgcatgtcccgtctgcccttctcgccctctccagccgtccggttgggcttgtcacggcaccgcctaccaagacgggcggttaagacactaggataggctcctctccaccggaaaaggcgggatttagatcacgtcccgcaggccggcggaagtagctgatactctcattggttgcaaaaccttgatctgtgaaagcgggcgttttggaagataccggaagtagagtcacggagaggtaggatccggaagtggggctgcctctttaaataacaaaaatctgaggttctgttctttttatctttttgctttctttttaaaaaagttccctgctacttacccctagaactccacaatgcgagaatccccctcaatttgtgagctcccgcgacttcctcttgtgggcttttggggatgctagggttctcggcattatcctcagggtgcgacctgttcacccccttttcagtttctccgtttgcatctgagggattcttgggaatgcgaagcacttttgaaatgctctgtgttggttgtgggattgggaggacggttgaatccagagggtagtgttgagtaggctgtttgagcatttccccagcactggcctgtcctttcaatccccagatattggtaaactgtgggttccaaccaggcatcgaggctgaaacgtactaggcaatttgaggtcaggaaagaactttctgtggtaaccaatgggaaggaactgccgtttgcggactgcagcgattgattaggtactttaaagagatcaactggcaagacaaatgacaaggcaacttttaatcagtagtagtatttagctttttctgattttaattatcccattaggtgaggttctactacacacacacgtttttctttctgcattttatcgatggagaaacaggcgctttgacatgtttgaatttgcgtagttcttggaattctaataaagtattagaaatgagagtttttcactctttgcccccttatggcaagcttttggttctaaatgtgtggtgtattttttctcaggcaggagagagttcttttcagaatgttttcaattttttatggacttagaaggtggatagagagaaagagagaaggtaactcacgtgagattttggtttatgaactgtattcggcctatgagacccttttgtatttagggcaacacaatgattagaagatttgggattctgctatttgtgtttacattgttcactagggcacacaaaggttttgttt

SEQ ID NO: 3049 - DNA, 6000 bp, Homo sapiens
tggttcacccagcctgcaaggaagagccacagacatgggactgggcaagcccactgcattgcccggtgccttgtatctggacccactggcccctagtaaaatgccccacatgaggtttcacaccaagtacaagctggtaggggcttcagcttggaagaattaagggtggccagcatccacaagaagatggcctggaccattgatttctctattgatccaaggaggtgagacaagtctactgagtccctgcaggccaatgtataacagctgtaggagtactgctggaagcttatcctccttctctagaaacctcagcctccgagaagagagacagctacactgaagaactcaaattggccatcacactgacaggaccggtaatgttcatatgaaatacctatacgaaggagaaagccagagtcatcaccaaggaggaagagaacttcaagactgccacgtcaggccaggtgcggtggctcacgcctgtaatcccagaactttgggaggctgaggcagatggatcacgagctcaggagttcgagaccagtctgaccaacatggtgaaaccctgtctctactaaaagtacaaaaattagccaggcatggtggcaggtgcctgtaatctcagctactcgggaggctgaggcaggcgaatcgcttgaaaccagaaggcagaggttgtagtgagtggagatcgtgccactgccctccagcctgggcaacaacagcgaaagtctgtctcaaaaaaaaaaaaaacaaaaaacctgccatatcaatgcctggctctttggcctctgggcaaaaaggaccaaggaagctgcagaacaggatattgaaaagaaaaactaaagcactgttgaggccttgtaataactctgcagaaaagctgggaaaacgaataaaccactgggaaaataaataaaccaaaaagatgtccatattaatttattcactttattcgtttgtctaataagaacctaccaaacatctgtcgaatgctaaacactatgctgggcactgaggatacagtggccaataaaacacacatgctgtctgctttcgtggagttcacatctttggcaaagactgtgctgtaagaatttgctgaaattggtcccagagaatatattgccatattttcctttttatcctatgatacgttctaattctttgcatctctagataggtagattgttgaaagtttaagggcatgtatataaaagctatctaatttggacatttgtgtttctaatttcactgaaatatatatgtgtgtgtctatatatgtacacacacatatatattactactggtatatatgtgtgtgtgtgtttatgtacagtataaaaatactaggatacctgtaaaacaacaacaatgtaaataagcagtatgaaacaacattgaaaagaatacataaaataatttgtatttgaatcaataaaataggaatgtattcatcatgtatgtgtatgcatatattaagtatatacaacctcagctattttgctttctttatatatctcttgggagcttaaaataaatacaatcccttgttagctcatttgagcagtatgggatgaattaaaaacaatagagaattttgtatgttttgtcttacgtatctaaatttgaagatatgtagtgttttacatttgctgttttattaatctctccttgaatatatcaagtagaatactttcattgggtatgtgtattgcatttctatatgtatttgtgtgtgtgtgtgtgtggtgctcgcttataagaatataactggataagtcgtgttcttgttgtggagcagtttgttgtctagtagataaatcagacaaattagctatgttgccttatcacaaaataagattgtagttgcttttatagtaatattaacatagtactgaggaaacaggctacatttactcttgtttgaaatttatcccataaaaacattcttttgtaaataaaccatatgtatcaataaattatctttaggcattttgattttctaaaggcttatttgtatcagttttcaattttgatccttatctcagtaaataaattacattaataaccaataatttctaattgtgtatttaaccatctttataaaacttccaagtcagtgaaagcatatgtgaaaataatctttaattgtattttccttgaaatcttcttgattattaggctgaattatgttaatgctaagcagaactgcatgactaatttgtttacttatttacttttttagatttgaaaaatgtgtgagtgctaaggaagctttggagactgatctttataagcggtttattctggtgttgaatgagaagaaaacaaaaatcagaagtttgcataataaattattaaatgcagctcaagaacgagaaaaggacatcaaacaagaagggtattttcgctatcttgtttttggatgacagatgaatacatttaagtggaatttcttcccaaagttaatgaacattagatgccaactttttgatcatatgagataatttggtagtctggatgtggatgttcaggctgttagataggggtaccatgggctagagagttctcagcatggtctctctatgtctgctcaactgtgtcacctacacttaaattaaaaaactgacatgaggcttattaaagtattatttaattcttagacattagtaagacatactaatttaaaaaaaaactttcatctgcagaactacaaaagttggatgcatatttgtaatcttgatgtctaggcaatgattaactttagaatcaagtggttaatattaaattccagggagcacttattttatctgattagagtgtgattatcagttttattcttctttcacatattctctgaaagtacatatgtacttgatttttatggaagaatcctaagtgacaaatggctgatacggctttcgacgattataacttttttacgcattagcaaatacaagttagggtctgttgctttgaatcttagtagaagtacagaattaccagtgacgtagtataaaaaaatttgatatcagctagtcctagcacaggtactggtcttgcagtcatacctattagtttatagctttggacaagtcactttatcttcataataaaggtaaagatacccatcttagggttttgcagagatcaaatgaaatgcgaactgttctgagattagtaaaatgttaaatactctgtgactcacagagataatttgttagaaaaagtattttgatggaagaatagtacctgataagaaactgatttaatattaattataataagtactaaattcagattaaaattaggtaaaagagaaacttgttcttaagagagttaatatataggttttaagatgctttcatctaaatcatatatattttcaatatgtttgtctaattagaatctttttctaggaatattttctataattgcttactgataaatctgctgcctagcagggggtgagccagttatttataattctacctttctctgtttctagggaaactgcaatctgttctgaaatgactgctgaccgagatccagtctatgatgagagtactgatgaggaaagtgaaaaccaaactgatctctctgggttggcttcaggtaagagatacatacatttatctcctctgttgaatatcttatttgggcttcttattctaatgacaagaaaccataatggaaaaatgttgtgaaagaccttattctatgaaaattctttagcatttttattttaaaaactcaaatttttaatgttaaaacttaatattatttgtaaaatgcagcaactcattagcacagcagtgtgagcaagcattcatacacatatactccaaggtatactattcctggttaaatataaccaggaaaagcataagcaatgaggaagaaacacctttatgctaaatatcatcagcttaaagctggttgcctttaacatttgagatcttatttagctaaagccatgaataggccactggagcagagtaatcaagaatgctctaaattatactgaagttgaggccttctttcactcttcagaaaaaagattgcaacaagtgagatgtaatagaggaaaagagaaggggaaaaatggcagtttagtacaaagtacctatgacttactcagtcctttggatcaagttcccagcaagtgtttaaacccatgagttattttttaaaatgttttatagatttcctagtgacggtggaaacaggagcctctgaactcattttatacttagatggttttgacctaaaaccaatactattaaaataaatgcttgatttatttatttagaaaatatttttgagttcctattatgtactagaaactttgctatgcattagacagcaaaacacaaaaatctgtgccattgtggagtttaaattgtagtcagggaaacatataagatgaataaatataaaatatgttaggttgataagtgctaaagagaaaaataaaccagagaaggcgttagaaaggtcagggtgagaataaggatgagggttatgattttagccagactatcagaaaaggcctcagtgagaaggtgaaggtgacatgctgtcttggggaagaccatgccaaacagaaaacaaaaacaaaaacaaaaacaaaaaaacactaagtacaaagttcctgacgcgtttaagcaatactatagagtgtaatctggataaagtagaaagatgaagactgggagaattaggaaatgagatgagagagatgatgggacctcatcacgtgtagggcgatataggctaccattagaacttctcctgttactttgaattaacttggaaactactgaaggattttaaacagtcaggtgacataatctgactcaaatttcaagaggattagtctgtgtattgtgttaagaatagactataggatgacaaatgcagaagaagatataacagatgggaagctagtacaacaattcggtgaaggatgaggctggcttagaccagagtgatggagaggcgatgagcaaggagcagattctaggtgtgcttagaggcagcaggatttgctgatgaaggggttatgactgagcaaataagactgagaaggagcagccaggaggtaagaggcaaaaatataaatgtggtatcctgctgattgatggatttagcaatacaaacgttattaaggatcttaatagaacatattcactggattggtgaaggaaggggataggagagaataggagtttcaaagggaatgggaggagagaactggagatgagacaggcaatactttcaacaaatttcactgtaaaaaatgggaaagacatggggcggcagctggaggaggaagtaggataaagaaaagtatttttgtttgttgtttttaaataaaagaaagaatatgtttgtatactgatgagagtaactaaagagagcaggtaaaaccatcaaggcagtagacagaggaaaaactactggaaatctgtctctaaaaatataagtggatgggatccaagggacaagtagtagattagtttagccaggagcatagtcactccccataatgacaggagaaaaggtagaataaacagatgaaggcacaggaaagtatctaactgcagtcacagaaacttattaacattgattaaactggttgattcatctgattctaatcagatttgaattggattacacaatacacacacaatcatacttttgcacttgggaatgaaatttcttttcacttggcagttatgcttgttttaccctagtgtcccatttaaaatgaaattattatttaataatcaaatagagaaaaacttacaaagataatttgtactctttccagtttaaactttcagaatttttattaaatacaatgacctttggtcttgtttcttagtcagagtatcttaccaatatttgaagtaggtgaaaattattgatgagaaaatacgtggttaaatatggctatatgagaaagaggacttttatgtgttcagtcta

SEQ ID NO: 3050 - DNA, 6000 bp, Homo sapiens
caaagccctcttattctccaatcaatcaagctattctacttcctagtctttagacacaccctgcacattgtgcccttttgcctttactcaagcaaatcctatccaccaacagtgccctctccatcagcatcaatacaaattcacaaaaatgttgtatcttccaattagcctatgccatgtgtcaatgaagtaataattaacaatttaaaacattttatggaagccagccagtctgctatatcttcacatgtattaactaatttaatcctcacaaccaccttatgaggtagctacaactattttcttcactatgcaagagatgaaacttagggcaagataggttgaagtgactttctcaaaaatgctttattaatgacactttattaatgaagaatggtgagacagaccttttcaaagtcagctatggagacaggtttcgggaccactgcagtaaggtcttgcagtgggggagtgagattggactcaattctaactccaataaggacaagtgggaatttataaccaagaagcaggttggggagcaatggatggaaaattactaagaggaaacaccaaggataaaggatttctggctaaactgacctgataggattattgctgaaggcaggtcagggtgataagatattgagggtggtctgataccaagggtgggggatattcattaatgtgacgtgtcaggattcttgttccaactggattctacagatggtctccaacttacaatgatttgattttatgatggtgcgaaagccgtatgtattcaatggaaacacttccagttttgaattttgatcttttcccgggcgagtgatttacaatacaaacccgctcctgatgctgggcagtggcagtgagccgcagctctcagtcaaccatgcggtcacaaggaccatgtttaaggtaggctaggccaagccatgatgttcaataggttagctatattaagtgcactttccacttggaatattttcaacttatgatgggttttttgttttttttttttgcatcgtaacttcatcctaagtcgagaagcatctgtactagaatagagaggaaagcccaagatcaggcttagtcaagcagaggactcagagaaaagcctgattaaagttttggtcaaaggagagagtgtgtgtcagccctatccaaggttactgtcattgagaggggattgtattcgtacatgccataattctactatagtccaaggatcctgggacaagaactatgagatagtcatttttgtgaccccatcaccgtatcactaccacctaacaattagtactaggccttgtgtatagtgatttactaatttttgctgaattgaagatggctttataggattttctctttagtatgttgtcatgtcttctttatgccttaatttgaaatagtcttaaagcaaaataaaaaacatttcaattttgagggggtcacatatagatcaacgatattttttaaatgctatttcttcttcttatttcttttcctttagtagtattctattttctagaaaccaggtacttgcttcaggcgactccttttcttctcttagttgtaacttgacatctgagaataaaactaagaaaggattttgcagccaatgctgcaaatacaaatttgttaattgtgtattaaccaaatacaattgcaaagggttattaaatactcattgtaaagctgtattttaaatgtcacgaatccatgtcagtagctgaaggcatacagttttatgttagattttaaagtaagaaagatattgtgtgtttttgtgagcatagatgtggtttggtctcttctatcccttttgtgtgtgtgtgtgtgtgtgtgagtggccctgcaatcagaaatggtgtgaacgtgagtatgctgatgtgtttgggaaatgaggactacaaattaatctggccactttataagatgttttatattagactgcaaaattatttcagttgcaaacatatttactggtcactcccacaaccttttaattccccttttcttccttttctcctaagatcaggcaatatgacctttttacttttatttttccctaaacattaagatcactaggtagaccgcaaagaaggaagactgtcctgaagcaagagaaaggaaatcctaatactcttatgggaaattttggaatagcacgtggataagtacaggacatttctgtggtggccaaacagatgacacctgcttggcatcacctaatctctgattggtaacccttagtttacaggtaatgcctgcaagtcaaaatatttggaatttgtctacaagtacataccatagcacaatttaacaactgcagcacaataaaagagattgtatttacttttaaaagtcattgaaatatttcttaacatttcacttctgagtagtgtctaatgaaatagtgatatctttgtcaacaagctgtgaatttccctatgtcttctaggaagaataggttctgtctggttagttggtttgttcttgtttgaaatatcttcatttagtagcagggacattgtgatttaaaactaatggagttgggaggcccaggcaggcggatcacttgaggccacaagttctagaccagcctggccaacatggtgaaaccccatctctactaaaaatacaaaaattagctgggcatggtggcatgagcctgtagtcccagctactcaggaggctgaggctggagaatggctttaacccaggaggcggaggttgcagtgagcgaagattgtgccactgcactccagtctgggtgacagagcaagactttgtctcaaaaaagaagaagaagaagaagaaaaaaacctaatggaggtgtgggtggagggtagaagggaactggccatgtattgataatttttgaaatatgtttctctgtattctttatatttgaaattctccataaataaataagtaaaaataatagaagtgaagagaaacacttgctactttttagttgaaactagaaatggaaataggtaaaggcacaagttctgcattccagtgtgcctcctgtggtagcaatagcaaagaaacactgtcgcacaacaggctgagtaggagactgtcacagcatccagtctgcttaccttagtaagaaaaaccatacatgagccttaatgttagggcatcagcaacaattgtattcctcagacagttaatttagacagagcccaattcctactacatctgaaaaataagatcaatgtcaattttcatggactaaaatttgttcaaggtttaaaaaaaattacaccagcaatgccaggtttttcatatatttttcctaaatgacattcagaaattttactcatatctctgtggaaatcacagtctgccaactcttttaaatgcctatttttattatcctttacataaaactaaggagttgtcaaatatctttcagaaaaacaaaatgaaaagaatttatatgatatatataacagtcatgaggctaagactttatatagacatttaattatctagatcacttattttcctatcttttgtaccattatgtttttctcttttaaattattctttccccaacatgcaacattttaggttgttcacaattcattgtaatcaatttgccatgccctttgatcttctctttttctctcttttcttagccaatttatgagaccaggttagccacatatgttgagtgtgtggctctccaaaattatataccacaaatggcataagtttgaggaattcagataactgtggcaaactctaacctcagctgtacccaacaaaaatgaaaaagaaaaggctttccctttcttaagcccctaaaaacattttaatagaaagcagagttaaagtcatcctgccacttcttctttttacctgtgtgggcttttcaagacctaaattctctaggtctcatcatctttctctttctttttatttatttatttattttttagaaaagctatttgccatagggaaatccatttttcggattggatatataataaatacatgagagaataaggtatgcctaaatgggacaaaccagaatccatgtaaattttgaacctcacctgcaattttgaaagtcctattaatttaaaaaatagtaaataccttaattttcatgatagcttactgtaaggctccctagaggcaatgaaaatgggaatctcaataaaacgaatactaccatacatcctggcttcagagatgaaaacagagggagaggattggctagttatcaacagaagggtaaggaaaaaaagcacagagaaagaacagacaaggcaacaaaagtggcagaactgtaagggccaatacgcatccactgcttcaagtttttcagccatgttccattctccgagatttctggtagtgcttcaagaatactggtctccaaactcttcctgaaaagggctaggaatgcttctgcctgaagatcttacctattctttctgggccccgtgatctccctacatgattgatcaacctactatttcaactctttcaagccttttcacaaatgtcaacttcagtgaggcctctatttaaaaatgagcaccctacgaaatcctttcctcatttctgattatcccctgtgaatttacatctgcctactccgtaccctcagtttatgccccttgaacactcttgccgggcgcttctcctttaaatcttgcctggaaggggcggagctatgtcccagactcaccgagaggagcgttctctaggctccgcccacttacgtctcagtgggcgccctaacgaacccgggatacggtctgttcctagtccgctccggaaatgcaactgcgtacgggctggccgcgtaatcgtgacgacagcgcgccagcgccggctagccggacgccctaggcttccgcgagatcttcggtgggggtacgggtgttttacgccaggacgctgatgcgtttgggttctcgtctgcagaccctctggacctggtcacgattccataatgtaccacaacagtagtcagaagcggcactggaccttctccagcgaggagcagctggcaagactgcgggctgacgccaaccgcaaattcagatgcaaagccgtggccaacgggaaggtgaggttttcccaacggttgcccagttgcccggtcactaaattctgagcagctgcgggagctcttctggctcccaggacaatctcgctccgtcgtttctctgcctctgcggcgcggagtgcgtttttctatcaaaataagcgagcaccttgccaggttccgtgggtacaaagacgaacaacgccatccccgtcgtcgaatggcagacaagtaaccagtctttgtaacgtagtgaagaagagagtaagtagtgtgctaaggtagtgcgtggcaagagccgttcacttgtcaagagatgatgttggggaaggtttttcccagtagccaatgcggagaaaatgggaaaggaagttccaggcagtcagaaccaccgttcagagtgggagggaggtcagaagttacagagatggtgcgtggacgtgtttgtggtcgtatgtggccgaagttgagtacctgtgcaggaatggctggggagggtaggaagggaacttgtaagtggaagtgaggcgtttaacatttccactgaaaggatgaggaacctttgaaatatttaaaatgggaagctaaccttatcagatttccgttctggaaacagcgctctagcaacctcgtggtgaatgggttggatgagggagggagaccagagaccaagtacaaaccaagtgactgaagatggtttggactatggcccgctagccaagttccttctgttacagctctcggactggtttaatctttcctgcaagctccactccagcaagtgttcagtgcctccaaattaccgatactgagttactttactttctacctttaattcacatctatttcatatcactgattttagcacctgaattagtttcctaagggctgccttaaaaaaatcaccacaaactggg

SEQ ID NO: 3051 - DNA, 6000 bp, Homo sapiens
atattcttaagaggaaaagacatcttttcattttacagcaatatgatgtaaagcaatactctagttatgatgctaaacccaagtgtcctgctttccaatggagccataactcttgttcaaataggctaagcatagttgtcaccaaaaagccagatttgtttgctcagatccttgtccccacatcccaatttcatctttcctaagcagcagcataaagtttttttttttttttttttttttttttttgagacggagtctcgctgtcgcccaggctggagtgcagtggcgcaatctcggctcactgcagcctccgccccctggggttcacgccattctcctgcctcagcctcccgagtagctgggactacaggcgcccgccacctcgcccggctaatttttttttgtattttcagtagagacggggtttcaccgtgttagccaggatggagcataaagtttaattattacttgcaaggcatattcaggatctcaaagcagcaggataatatcctgaaggtgccatgtattcaactcaaattcagaagtactttatgaggatgaacttcactcattttccactagtctttaaatgtagactcttgtagctgattctgtagtgtcagaattctgtttatcaacatactccttttactttttaatgcaaaactctagtttcaaaggaatgaaagaaaaaatagatcaagtctagaaaaaccaaagaaaaagcataaggaaattttaaattaaaaagcatatacgcaatatacatagtaggtaaaatttacaactgcttctcaaatggctgcattctgttatttcacactgggctgtgaatcattttcgcttaaattcttgccacagtggaagttcttaatatttttggttccaaaccttttaacagctccaacagaatgagagcatttgcgtgatatgttttatataaagtaacttattgtttctcctttattattccattccatttagttttgaatagtattttaaaagtaaaaccccaagagattataaaaccatatgtaataacatcaaagagcaaataaactttatataactgctgaaactttttcctttttttttttgatacaggatcttggctctgctggctgcccatgttggagggcagtggcacaatcatggcacactgcagcctcaaacttctgggctcaagtgatcctcctgcctcagccttccaagtagctgggaccacaggtatgcaccaccatgctcagctagttttatactttttgtagagacaagggctcactatgttgcccagactgggccaaaactttttttggtggggaggggacagagtctcactgtctcactatatcgcccaggctggtgaactcctgggctccagcgatcctcccaggcgttgagctactactgtgctgggccaaaactctaattgaaatattttttttttctaatttatcttgcagttttagtccttaagatctctcattccacctcagtttcttttcctagacagttgttatatgtttacttttcttaaagattcagcacacacctattatttgttaaacctttcaactcacccaaatataactgcattccactgcatgatgttgttttcagatggtgcgccactgacacccacaggtgggtcctcttgtaacctggaaatccagcgtggtaatttaaaaagttgaacattaaggccactaaggaggccacgtaaacacctacagacactataccatctattttgagacacagactaactccatttccttgttattgtgaactaaaatgaaccatatgacttaaatatattaaccaggtatatatacttattaaatacctctccaaattatctaaaaattgaaagggcttgagaatcatccctctttcaatattatctcttcaagaattgatgcataggaacacttttacactgttggtgggactgtaaactagttcaaccattgtggaagacagtatggcgattcctcagggatctagaactagaaataccatttgacccagccatcccattactgggtatatacccaaaggaatataaatcatgctgctataaagacacatgcacacgtatgtttattgcggcactactcacaatagcaaagacttggaaccaacccaaatgtccaacaatgatagactagcctaagaaaatgtggcacatatacaccatggaatactatgcagccataaaaaaggatgagttcatgtcctttgtagggacatggatgaagctggaaaccatcattctcagcaaactaccgcaaggacaaaaaaccaaacaccacgtgttctcactcataggtgggaattgaacaatgagaacacttggacacaggaaagggaacatcacacacaggggcctgttgtggggcgggaggagaaaggagggataccattaggagatatacctaatgcaagtgacgagttaatgggtgcagcacaccaacatggcacatgtgtatacatatgtaacaaacctgcacgttgtgcacatgtaccctagaacttaaagtataattaaaatatatttaaaaaaaaagaattgatgtatatagactgtcctcttataccaaaaaaagtttaaaacctcaaaagcaagtaatatttttacagaaccattgattttgctgctctaaacatgcaaagactgtgtatcctaaccaggctacttctgcaaaatggctacaagaaaaaaaaaaaaagcaaacctcagtgtaaacacaaaatgactgaaaacacattaaatttaactaggaaactagtattaggcagcagatttactctattccttttgcttcaaacagcaatggctttaaaaagtaattagtaggttttctgccagtccctattttaaaggctctgcactaacaccaaatccacctctcagatcaggagactcaacacaaggctttccaacattcgtcatagtcaaattcttgtaacctgcagatctctggaaactacaaaaggtgccatgcattcaactcagaattaagcagagcattacagtaaggagccagggcgacaatgacatgaactagtttactatctgaatttgtcatgagtgctaatcaaatacgctgatttcaagctttagaaagatgacttttgcaccaaaaagggcatctcctttcagagactgtaacctcaattaaaaatgctacattatatacacacacaaatacatatgcagttgtttttcatggggcatcataatttgcaactagtccacattaaaaaaatggtttttagtcaatctcaagcaaattaggccaccacgaacagaagccttagaagaactgcactgcttgacgcctacctttaaatggctaagagaagctacgaatgaattaaataagttggccaaatccaagtgcctcacataggctttataatagctgagaggtgacttcctgagcgacaaatctaagtttttatgctagatattttgttcaattagggcaggtgtccccagaaaaaatgttaagaaaaatgtgcagagtatcaaaatgatgttttctcacttattttttctatgtctctaagtatccaataaaaggtaaacaacggaataatcattttctatctcacaaccccaatacctcctaacaaaaccctattttatttaccaaaggaggcccagggagtatcagattagcgccagtctaagggaaggcatttttccagactcgggaggctatagataggggctttcttcaccagccagagctgagttccagaaagcactggcagccggggtggccagctctaaggtcccagatctctaagtcagttcccaaggtcctttcaggcgggcggggacagagtcgggtttcgggggatgggttaacctccgggcctcacgcactggaccccaccctcagggcacaaatggaaaggattggcaggagtcgggagaggggttcgccccaacacggctcctcggagaagacggcggggccgtgaaacaaagctgactggtgctgccggagaggaacaagctcccgcaggagctcactttgaggggacaagaagggggcgccgcagggtgcaggggcgggcggataatgtctgatcgcctgggcgagacgccgggcagctggccgaaatgggcagcagggaaccctagaccagtcgatcgacaccgttttactttttgtggggaggggaagcagtatcaaaatttcttcgggcgccagaacgagcggcaaagcttatgggagtagggccgaggctaggacccggcttccgccagtcccgctgggcccacagccggccctctgagggtcacaaaggggaaggtgtctgggatccacgccctgcagccccgcagctttgaggggccgtcatctaggcgaaggtgaaggcccttaccgcttgaaatcccgcatgagcctcctccgggccggggtcgacatgctccgcagctgccccgcggtcagtctgaaaaaaaaaaagtcccgcgcagcccccccaccccccggcgcggcggccgaatcactgtggatcgccgccgccgccgccgccgccgccgccgccgagactgacaaacaaccctgcaatgacgtctccctccgccgcctccggatccctccgccctccgccgctaccacagtgtgagtgctgggggaggagggggcgggacgcgggagcgcgccttccccgagcccttcagcggggcgcggttccccctgggcttcctgaagtaatagacaaatttgtgttctctgtgttcagactagaggttgtggattcaaagaccacgaaacagaaacactatcccgtctccctccccgtcactagtttaggctcggcggggtggagaaagagggacgcatccgggccagagatttcagggaaaggaggtgggatgatgtaagatcacgtgactgcccgcggccttgtcaacaatccacccctgagtgggagggggagaagtatctagaaccacgtgtccctatgacgcgtttagaacgggtcacgtgagcgcctcgcctggatgtgagtttcagccaggtctgtgaagcgggtttaagagggtgagggcgggataaacctttattagttgttttctgtttatcacaggtatagagacaacattacccaagaggtcatggcagaatcaacagcttgttttgttttctttaaaccgggaccaaaaataattcccctctggttggttcagtggcttattaactctggtacttggggcaagaagagtgagaggatcgcacgatcttctaaggcagccttgaatactgaggcccacacaacaatctcctgaaatggttccttgaagctaccagatagtctttctgctttgcagtggggtttctagtattggaaattctgggcaaatattaaaggatggtgtattatgcagtttttcctttctgggtctgctttcaattgaagatatgtgtcagagtccggggacttgcctatggtgggggagtaccattgtatttttaaggaatgtgggggtgcagtcttccaagcatatcaatgagtggttggttgtcaaagaaacctacaaatatgattcatattctgggggagagctccggcagacatgagtgagggttatatatctagcctgagataacttcaggttttctacactagcaagaaaggtgcaaatgggccagaagggccccccaccaccagggggttcagaggtgttgacctcccaaagaccttgaatattttctgtggtcaccgtccttccctctattgcttccaattcctaccttcaggactttgttatactaaggactctgagtacttttgtatccatttggggaactgttcagttcaacaggtaaagggagggtggaatgaggaccttaacattgcctcagccttgcccctgattccatggaagcagagttaacttttctgactttccttgtacctctttcttcaaaccctgaattccctctctgcttccagtgactgccttggtgatca

SEQ ID NO: 3052 - DNA, 6000 bp, Homo sapiens
tggaaaatgttaaacgtttatacttttatttattaaaactagataatgcatatccacaataaacccacagtctcaaatatagagacattaaaaaaaaaaaaggaatcttttccactgagcctttttgtctttgggaactaaagacagcttgagtaaggtgtccttctgaggctccacctctcaccagaacttaggggtactcctgctgtctcggtcatgcccatcaacactgagactaccacactataagtcaccatccatcaagcatggggtccctacacttcctgtcatgttcctgtcaaataataggttcccgcactactgcagtcgcccacttatcaggcccaaggtcctaaaaaaagcctggtctcgcccgcaactcaaaccacacgtcttaggatgccggaccggcgtcacgccccacgtcccgctgttgactttatccaaacagccgccgccgcctcagcccattctgtggtcccgctggtctggctctgcgtagttccagtggagccaccgaacactgatactactttgttgctcagccccgcaaggaaccggccacttgccaccatggaaacgccggcggagttgctgcgttctagactcgtgcgcaagaccggaacatgggcagggtcccgacccggaaggggaagtgggaagaaacggaaacctactctgggtaggcgcaaggtggaagagtgctgtgcttgggaatgggggaggggagtacagattgctgtcgcagctgagcctcctcacaaggttgcttttgaatgtggataggaaggatctgcatcttttttttttttttttttttttttgagatagtctagctctgtcgcccaggctggactgcagtgtcgctgatcttggctcactgcaacctcctccttccaggtttaagtgattttcctgcctcagcctcccgagtagctgggattacaggcgtgtgccaccacgcccggataattttgtatttttagtagagacggggtttctaccatgttggccaggctggtctcgaactcccaacatcaggtgatccgcctgcctcggcctcccaaagtgctgggattacaggcgtaagccaccgcccccggtcaagatggttcttaaatcaaaaacttttcttgaacacttgccatatgccttttaattttttccaactgctagtaatcttttttaaagaaaaaaaacctccctcaccacatgtcaaactctaggaaagcaagtaattcgaagagttccaccatatacgaaatgatgtacaagagcacggaaataaagaggccagtgtctaactgcttaagtagacatagagttcaactggaatgacagtccctaatgaataaccaccatatcactagaccaagtgcctagggagtgctttctttattgaatagggctttctttgctttcttctataaaatgagttaaatgtaaaaaagcgaaatctcgctatgcttccgctaaataagaggaaaggcattatttaataaatctagtctggtgggtcccacccagcatgcatatttaaatcacacctggagagcttttagaaagcatcccaacccccacctccacacccctgccccaatgccagagcacctgatttaattgggatagcgtaaataaattagtatttttgaagcttctcaagttttttctatgctgctagggtttatattgagagaaaggagaagtggtcatcgttttcattgatcacctaaaatattcagaattgtcttttctttgaaggttattcagacgggcgcagtggctaacgcctgtaatcccagcactttgggaggcccaggcgggcggatcacgaggtcaggagatcgagaccatcctggctaacacggtgaaaccccatttctactaaaaaatagaaaaaattagctgggcgtggtggcgggcgcctgtagtcccagctactcgggaggcggaggcaggagaatggcgtgaatccgggaggcggagcttgcagtgagcggagatcgcaccactacattccagcctgggtggcagagcgagactccatctcaaaaaaaaaaaaaaaaaaaaaaagaaagttattcaaccacaatataaaataccttctataaataagaatgtcatagtaaatcttatagtgggctcaaacttggtgtaagcatattatttgttgtgggctaaatatttgcaaggaggctgcgcacagtggctcacacctgtaatcccagggaggccaaggtgggcagatcacttgagcccaggagttccagaccagcctgggcaagagggcaaaactccatctctacaaaaaattagccgggcatggtggtgcacacctgtggtcccagctacttgggcgtctgaaggagaattactggagcccagaaggtcaaggctgcagtgagccctgttcacaccactgcactccaacctgggtgacagagcaaaactctgtctcaaaaaataaaaaaatttgcccaggacaaagatgaaccaaactgagtccctgccctcaatgaactcataatccagagctacagaactgataacagcatacagttaatagctttaaaattattccttctacaagtaggttatggcaggcctggttaacaaggacagccagtgattcttgctaatacacagctgtaagactttatgatgcacattcactgaatcagttaaaagtgttatatcattttggaaaataataaactgtttccaaaacaattataaatccctgtagtctctgaattccttacctctattgcctccagttcccatcttcaggacttcgttggtgggtcaggaggactctgagcacttttgtatccattcgtcagctcaacagggaaagagggggtaggaggaggacctcagcattgccctaatcttgcccatagttccatggaaccagaaagggttaacttttcccactttccttgtacctccctttcttcaaaccctgaattctgtctctgctttcagtgactgccttgactgataaattacaagggtttttttggttgttgcgggatttttttgaggcagggtctcagtggcatgatgatggctcactgcagcttcaacttcctcgtctcaagcgattcttctgcctcagcctcctgagttgctgggactattggtgtgcgccaccatgcctggctaattttactttttgtagagacaggatctcctatgttgcccaggctggtcttcaactcctggcctcccaaagtattaggattacaggcatgagctaatgccccagctcatgagggatatttttaagatatagtttctctttaccatttttctccatgtaaccctacctgtgtgtcttcctcctttgctattggaagggttaggactgcaatggcagaaaggcaaaaaaattaagaatattcagcttttaacttaaaaaacacattgcgaatgtctaacaggacctatcaagagttaggcctggctaacctgatcaccaaggcagtcactggaagcagagagggaattcagggtttgaagaaagaggtacaaggaaagtcagaaaagttaactctgcttccatggaatcaggggcaaggctgaggcaatgttaaggtcctcattccaccctccctttacctgttgaactgaacagttccccaaatggatacaaaagtactcagagtccttagtataacaaagtcctgaaggtaggaattggaagcaatagagggaaggacggtgaccacagaaaatattcaaggtctttgggaggtcaacacctctgaaccccctggtggtggggggcccttctggcccatttgcacctttcttgctagtgtagaaaacctgaagttatctcaggctagatatataaccctcactcatgtctgccggagctctcccccagaatatgaatcatatttgtaggtttctttgacaaccaaccactcattgatatgcttggaagactgcacccccacattccttaaaaatacaatggtactcccccaccataggcaagtccccggactctgacacatatcttcaattgaaagcagacccagaaaggaaaaactgcataatacaccatcctttaatatttgcccagaatttccaatactagaaaccccactgcaaagcagaaagactatctggtagcttcaaggaaccatttcaggagattgttgtgtgggcctcagtattcaaggctgccttagaagatcgtgcgatcctctcactcttcttgccccaagtaccagagttaataagccactgaaccaaccagaggggaattatttttggtcccggtttaaagaaaacaaaacaagctgttgattctgccatgacctcttgggtaatgttgtctctatacctgtgataaacagaaaacaactaataaaggtttatcccgccctcaccctcttaaacccgcttcacagacctggctgaaactcacatccaggcgaggcgctcacgtgacccgttctaaacgcgtcatagggacacgtggttctagatacttctccccctcccactcaggggtggattgttgacaaggccgcgggcagtcacgtgatcttacatcatcccacctcctttccctgaaatctctggcccggatgcgtccctctttctccaccccgccgagcctaaactagtgacggggagggagacgggatagtgtttctgtttcgtggtctttgaatccacaacctctagtctgaacacagagaacacaaatttgtctattacttcaggaagcccagggggaaccgcgccccgctgaagggctcggggaaggcgcgctcccgcgtcccgccccctcctcccccagcactcacactgtggtagcggcggagggcggagggatccggaggcggcggagggagacgtcattgcagggttgtttgtcagtctcggcggcggcggcggcggcggcggcggcggcgatccacagtgattcggccgccgcgccggggggtgggggggctgcgcgggactttttttttttcagactgaccgcggggcagctgcggagcatgtcgaccccggcccggaggaggctcatgcgggatttcaagcggtaagggccttcaccttcgcctagatgacggcccctcaaagctgcggggctgcagggcgtggatcccagacaccttcccctttgtgaccctcagagggccggctgtgggcccagcgggactggcggaagccgggtcctagcctcggccctactcccataagctttgccgctcgttctggcgcccgaagaaattttgatactgcttcccctccccacaaaaagtaaaacggtgtcgatcgactggtctagggttccctgctgcccatttcggccagctgcccggcgtctcgcccaggcgatcagacattatccgcccgcccctgcaccctgcggcgcccccttcttgtcccctcaaagtgagctcctgcgggagcttgttcctctccggcagcaccagtcagctttgtttcacggccccgccgtcttctccgaggagccgtgttggggcgaacccctctcccgactcctgccaatcctttccatttgtgccctgagggtggggtccagtgcgtgaggcccggaggttaacccatcccccgaaacccgactctgtccccgcccgcctgaaaggaccttgggaactgacttagagatctgggaccttagagctggccaccccggctgccagtgctttctggaactcagctctggctggtgaagaaagcccctatctatagcctcccgagtctggaaaaatgccttcccttagactggcgctaatctgatactccctgggcctcctttggtaaataaaatagggttttgttaggaggtattggggttgtgagatagaaaatgattattccgttgtttaccttttattggatacttagagacatagaaaaaataagtgagaaaacatcattttgatactctgcacatttttcttaacattttttctggggacacctgccctaattgaacaaaat

SEQ ID NO: 3053 - DNA, 6000 bp, Homo sapiens
gtgttgtgggagagaccgggtgagagatcactgaatcatggcggcagtttctcccatactgttctcctggtaatgaataagtttcacgagatctcatggtttgataaagggaaacccgttttgcttggctctcattctctattgttgccgccatgtgagaggtacctttcaccatgtttgtgaggcctccccagccacgtggaactgttaagtccaacaaacttacttctttagtaaattggcaggtctgggctatgtcttcattggcaatgtgaaaacagattaatacaatgtcctactgcccaagcttaaaatcctccaatgcagtaccgtccaaaaattcaatacagcaccatctaagagaaatacaatgctagtcccacatgtaattttatgttttccagtagtcacattaaaaaagtaaaaataaacaggtaaaattacttttacaagattttatttaatgtaatatatccaacatattataattgcaaatttgaattagaaaaaaaacaactctgtctttaaaagttgatatgggttttacacttatttaaactaatcacatttccagtctcaataaccacaagtggctaataactatcataacgaatagtgacacctgggtgcgatggttcacacctgtaatcccagcactttgggaggccgaggcgggcggatcacctgaggtaaggagtttgagaccagcctggccaacctggcgaaaccccgtcgctactaagcatatacaaaaaaatcagccaggcgtggtggcgtgcacctgtaatcctagctactcgggaggctgagacaggagaatcacctgaacccaggaggccgatattgcagtgagctgatattgcgtcactgcactccagcctgggcgacagagctagactacgtctcaaaaaaaaaaaaaaaaaaatgacgctccaaaggattttatcattcgtactctaaaaactgacatctttttaacacacctacacggtccaccatggtctggcacctgcctaccttccagcctcaccattacaactatccccgcttccttctctactaactacatagaccttcttgtagttcctctagttcctctaacaaaccgtgctccctgtagacactgggcctttacacaagctctttcccagtggaaagtgctcaatgcctgggggtctacgatgcttctcaaaggtgttctcttctatgtctgacctatagaaaacctccacatatatttgtgtaacatataaactgatggcctaaatatactgcgaagagaagcacaacaacggtaaatttaatctttattaaaacagctaccatttctcgagcctaccgtgtatcacctcatctaatcttcacaataagcccagtagataggtctgatgaacaccattttacagtgaagaaacaggttctgagaggtaagatcctcagccaagaacacattgtagtaagaaataaggacttcaaacacaactctgactccaaagtcagttctctaaaccagtatgttatacttgtccacagaacattggcttctgggcctaaaatattaaaaactaaaactgaataaagtattatagtcaccaagttgtacgcactagtttccgtcgctgtggagggacctattttctccaactaaaaacagtaatagctcccacttactgagggcttacgtaagacactgtttagcgctttacttacatagatgttttcatttatacccgcatgataccccactgaagtcggatcatctcgacttaacaggaaaaactgaagctcaagtaaatttttctggcgaggaaatacagtctgtcaatttgggtactggaagcagctttccctgctcgcagtccggggattgctcaaggtcttcgaggcaccgccacaaaggcgacactctcatagttatcccgactgtttccctgaagacgcaggcctggcctggcagggcacgagtgccatgaatgggtctcaggacagtggcttttcggtcccccgtcctcgctccctcaacacctgagggctcatcacccccgtgaagatatatccaataattaggagccttcgactcattttctcaggttccccaactccccgtcgcccgcaagttctaacaatattttcttacccagccccgccgcagctagccccaagtccatccgacagaatccaagccaatctcgtaatgtttacttccggcttttcgcctaattccggcggccactgcggtaacttccggatgaccggcacatgcgcactaatttcctggcggggccgggggcggaggggggccctccagtgctcctgcgccgtgggaaacgcgagaactctagctgctgcgtatcgcgctatttacccggcttgtggggagtttcaagttgggcggctactttttggcttctatttaggagctttcttttagaatcggagaattttaggaagttaaaaaaaaaaaaaaaagaccagaacagacaagagcttaagcctcaccaggggactatgaaatgaatggggaagttggtgacgtatcagcttaaaaaaaaaaaaaaagcagttaaacttggcactaattagtagccaggctgtgtaacatgctggggatttggtgaacagtgtcttccctcagatttacatcagagtgcgaaagacaccgaaacaactattcagatttagcagctgtgaaaagttgctatgaaaagaataccaggtgctgtgagaacataaggcatgttatcattagaaaaaaatacgacaatttccattttggagaaacagtatctatgctatcccatcccttctttaaaagtatacatgtgaaataaaacactggaaaataaactaattttcgtggtagaatttcttgtgatttttttttttctttgtgctttctattctggttgttctccccctcccccccataacgtgtatcctttttgaatgtaaaagtaaaagtagctaccattcctgcctcaataaaatagcccaacataatagaatctatttttttcgtattaagaatttgcaatacctggagtttaggaacataaatattaattttgcttttacagggcagtagatgaagaaacagtgtcagagactagcgtgaaagtgaatagagtctatgaatcactcaggctttgtttttttccacttaaaaatattcctgaaatttgcttaggagtgttaaggcctaattagccaaaaccaccaggagagcgcatctcgaagaggaatcagaaagcgcaggacaagacagttgaatcttttctaagacttgaggtccctctggagggttctgaggaaggtctaggaaagccgggattggttctggatgggttgctgtttgtaaagaaggattgggagaaactgattagggactaagtgctgttatgagtgagggtggtttagcaattgagtatttccagtaataggaatagcaaagctggtctgagggcatcattagtaagaaaacagtggttattcagagagggtggttatggtttacagctgctgcatgaccttaggagaaacaatgctttctgttggtgaaaaaaagaagacatcctaagacaaaccttgcacctcaaaacctctgtagatagagaatccccacttggaagctataggtgttgtgcagatttagtcttaaaaattaacactttgagtgctgataatataatatgatgatgtaaaatttaggagatacaggaggaaataaaggatggggataaaggaaaaagaacagtgaagggacaataaaggtatgcatatttttctgtctttcctcttttcttcaccttaagttaggctcttttcttataacctagtataatgtccagcatttaataggtattcaataaatatttgtgaatgaatgaatcattcaatcaatattggtcctgaaatgccagggaaaaagagatgatgaactggcatatattgagaaccatgtctatgtcaggtatagtgtcaagcctttcgtgaaagagtaatatggaatcaactcctctctctcagctgatctgcagcttaaaatgcatatatggtgaactgtgggaagcggagtttgaatgacacaggtcagccttatgttttaatttatatcttcatcttgtagttgttcaatgtattccattttactatagaaacaggaaaaggtcgtcaactttttcaagcaaaatttcttttcatatctgggaaattggaattccttttttatatctttattatctctctgatattctcttgctccctggccaagcccttccaggcaactttggttaatatattattgagatgttagaggtttaaaataaatcactatcaaaggatagaattttaagggaagactaaattatgtattcattagaatcataattttgttcctaagacagattcgtgatggtataatagaaacagtgtcttagcctgaagtattgaggatagtcctaagattagggaacgatcagttcgttcttaatcataagcataagagaatgactcaaacgctgctgtttgatctacctgtacttacatttcttcttaattttaaattcttctctgctagtattctttagacccaacattggttgtttcccctatttcttcaatatttctatttattttccatcctttttacagggtcatctaaataaaaatatcttaaagcaataaaccattgttattgagtcagtacctcagtccatgcagcttaataatatggagagcaaaaaaaaaaagcctctcgatttattttttaatattacacgatcctagttttttcttcccagaaaacgtgccacaaagtttgcaagaaagagcttttggggcggagccctggctgcttaggtcctttccattggttctacttggtgaccacgcccacggccccgcctcctgggcggaagagccaattgggccgcgagttgtggtttaaaccaggagtgcgccgcgtccgttcaccgcggcctcagatgaatgcggctgttaagacctgcgtgagtgaatgggagggtcgcgggtggttagttgagccggctccggcggggaaggaggcgggctgcggctgcggctggggctgaagctggggctggggttgggggactgcccggggcttagatggctccgagcccgtttgagcgtggtctcggactgctaactggaccaacggcaactgtctgatgagtgccagccccaaaccgcgcgctgctcgggaccttagagcctctgactcaggctggaagatttgagagctggattaagtacttgttggctcacgcccgtgactgttccgctgtttagctcttgttttttgtgtggacactcctaggatagaaagtttggtatgttgctatacctttgcttctcccaccttccccaatatctaatatgtatttctcattcttagaataatccagaatggctactctgatctatgttgataaggaaaatggagaaccaggcacccgtgtggttgctaaggatgggctgaagctggggtctggaccttgtaagtatacaaggctgcagtcggatacactggtattgtggacgtggcctggagctggacgagacatttagtgtactttttgggcaattggagtcgtttgttattggtcctttttcatttttaatatcttaatgagatgatttaaggaagttactgaatctctgctattaggcctatcatagccatgccactaccaaaagtggggggtgggtttgggggtgagaggtcaagtttatatacacagtatttaagttgtacaggtattttgctgctggaatattcttatggtaagactttttcttcagcaatcaaagccttagatgggagatctcaagtttcaacaccacgttttggcaaaacgttcgatgccccaccagccttacctaaagctactagaaaggctttgggaactgtcaacagagctacagaaaagtctgtaaagaccaagggacccctcaaacaaaaacagccaagcttttctg

SEQ ID NO: 3054 - DNA, 6000 bp, Homo sapiens
aacatattataattgcaaatttgaattagaaaaaaaacaactctgtctttaaaagttgatatgggttttacacttatttaaactaatcacatttccagtctcaataaccacaagtggctaataactatcataacgaatagtgacacctgggtgcgatggttcacacctgtaatcccagcactttgggaggccgaggcgggcggatcacctgaggtaaggagtttgagaccagcctggccaacctggcgaaaccccgtcgctactaagcatatacaaaaaaatcagccaggcgtggtggcgtgcacctgtaatcctagctactcgggaggctgagacaggagaatcacctgaacccaggaggccgatattgcagtgagctgatattgcgtcactgcactccagcctgggcgacagagctagactacgtctcaaaaaaaaaaaaaaaaaaatgacgctccaaaggattttatcattcgtactctaaaaactgacatctttttaacacacctacacggtccaccatggtctggcacctgcctaccttccagcctcaccattacaactatccccgcttccttctctactaactacatagaccttcttgtagttcctctagttcctctaacaaaccgtgctccctgtagacactgggcctttacacaagctctttcccagtggaaagtgctcaatgcctgggggtctacgatgcttctcaaaggtgttctcttctatgtctgacctatagaaaacctccacatatatttgtgtaacatataaactgatggcctaaatatactgcgaagagaagcacaacaacggtaaatttaatctttattaaaacagctaccatttctcgagcctaccgtgtatcacctcatctaatcttcacaataagcccagtagataggtctgatgaacaccattttacagtgaagaaacaggttctgagaggtaagatcctcagccaagaacacattgtagtaagaaataaggacttcaaacacaactctgactccaaagtcagttctctaaaccagtatgttatacttgtccacagaacattggcttctgggcctaaaatattaaaaactaaaactgaataaagtattatagtcaccaagttgtacgcactagtttccgtcgctgtggagggacctattttctccaactaaaaacagtaatagctcccacttactgagggcttacgtaagacactgtttagcgctttacttacatagatgttttcatttatacccgcatgataccccactgaagtcggatcatctcgacttaacaggaaaaactgaagctcaagtaaatttttctggcgaggaaatacagtctgtcaatttgggtactggaagcagctttccctgctcgcagtccggggattgctcaaggtcttcgaggcaccgccacaaaggcgacactctcatagttatcccgactgtttccctgaagacgcaggcctggcctggcagggcacgagtgccatgaatgggtctcaggacagtggcttttcggtcccccgtcctcgctccctcaacacctgagggctcatcacccccgtgaagatatatccaataattaggagccttcgactcattttctcaggttccccaactccccgtcgcccgcaagttctaacaatattttcttacccagccccgccgcagctagccccaagtccatccgacagaatccaagccaatctcgtaatgtttacttccggcttttcgcctaattccggcggccactgcggtaacttccggatgaccggcacatgcgcactaatttcctggcggggccgggggcggaggggggccctccagtgctcctgcgccgtgggaaacgcgagaactctagctgctgcgtatcgcgctatttacccggcttgtggggagtttcaagttgggcggctactttttggcttctatttaggagctttcttttagaatcggagaattttaggaagttaaaaaaaaaaaaaaaagaccagaacagacaagagcttaagcctcaccaggggactatgaaatgaatggggaagttggtgacgtatcagcttaaaaaaaaaaaaaaagcagttaaacttggcactaattagtagccaggctgtgtaacatgctggggatttggtgaacagtgtcttccctcagatttacatcagagtgcgaaagacaccgaaacaactattcagatttagcagctgtgaaaagttgctatgaaaagaataccaggtgctgtgagaacataaggcatgttatcattagaaaaaaatacgacaatttccattttggagaaacagtatctatgctatcccatcccttctttaaaagtatacatgtgaaataaaacactggaaaataaactaattttcgtggtagaatttcttgtgatttttttttttctttgtgctttctattctggttgttctccccctcccccccataacgtgtatcctttttgaatgtaaaagtaaaagtagctaccattcctgcctcaataaaatagcccaacataatagaatctatttttttcgtattaagaatttgcaatacctggagtttaggaacataaatattaattttgcttttacagggcagtagatgaagaaacagtgtcagagactagcgtgaaagtgaatagagtctatgaatcactcaggctttgtttttttccacttaaaaatattcctgaaatttgcttaggagtgttaaggcctaattagccaaaaccaccaggagagcgcatctcgaagaggaatcagaaagcgcaggacaagacagttgaatcttttctaagacttgaggtccctctggagggttctgaggaaggtctaggaaagccgggattggttctggatgggttgctgtttgtaaagaaggattgggagaaactgattagggactaagtgctgttatgagtgagggtggtttagcaattgagtatttccagtaataggaatagcaaagctggtctgagggcatcattagtaagaaaacagtggttattcagagagggtggttatggtttacagctgctgcatgaccttaggagaaacaatgctttctgttggtgaaaaaaagaagacatcctaagacaaaccttgcacctcaaaacctctgtagatagagaatccccacttggaagctataggtgttgtgcagatttagtcttaaaaattaacactttgagtgctgataatataatatgatgatgtaaaatttaggagatacaggaggaaataaaggatggggataaaggaaaaagaacagtgaagggacaataaaggtatgcatatttttctgtctttcctcttttcttcaccttaagttaggctcttttcttataacctagtataatgtccagcatttaataggtattcaataaatatttgtgaatgaatgaatcattcaatcaatattggtcctgaaatgccagggaaaaagagatgatgaactggcatatattgagaaccatgtctatgtcaggtatagtgtcaagcctttcgtgaaagagtaatatggaatcaactcctctctctcagctgatctgcagcttaaaatgcatatatggtgaactgtgggaagcggagtttgaatgacacaggtcagccttatgttttaatttatatcttcatcttgtagttgttcaatgtattccattttactatagaaacaggaaaaggtcgtcaactttttcaagcaaaatttcttttcatatctgggaaattggaattccttttttatatctttattatctctctgatattctcttgctccctggccaagcccttccaggcaactttggttaatatattattgagatgttagaggtttaaaataaatcactatcaaaggatagaattttaagggaagactaaattatgtattcattagaatcataattttgttcctaagacagattcgtgatggtataatagaaacagtgtcttagcctgaagtattgaggatagtcctaagattagggaacgatcagttcgttcttaatcataagcataagagaatgactcaaacgctgctgtttgatctacctgtacttacatttcttcttaattttaaattcttctctgctagtattctttagacccaacattggttgtttcccctatttcttcaatatttctatttattttccatcctttttacagggtcatctaaataaaaatatcttaaagcaataaaccattgttattgagtcagtacctcagtccatgcagcttaataatatggagagcaaaaaaaaaaagcctctcgatttattttttaatattacacgatcctagttttttcttcccagaaaacgtgccacaaagtttgcaagaaagagcttttggggcggagccctggctgcttaggtcctttccattggttctacttggtgaccacgcccacggccccgcctcctgggcggaagagccaattgggccgcgagttgtggtttaaaccaggagtgcgccgcgtccgttcaccgcggcctcagatgaatgcggctgttaagacctgcgtgagtgaatgggagggtcgcgggtggttagttgagccggctccggcggggaaggaggcgggctgcggctgcggctggggctgaagctggggctggggttgggggactgcccggggcttagatggctccgagcccgtttgagcgtggtctcggactgctaactggaccaacggcaactgtctgatgagtgccagccccaaaccgcgcgctgctcgggaccttagagcctctgactcaggctggaagatttgagagctggattaagtacttgttggctcacgcccgtgactgttccgctgtttagctcttgttttttgtgtggacactcctaggatagaaagtttggtatgttgctatacctttgcttctcccaccttccccaatatctaatatgtatttctcattcttagaataatccagaatggctactctgatctatgttgataaggaaaatggagaaccaggcacccgtgtggttgctaaggatgggctgaagctggggtctggaccttgtaagtatacaaggctgcagtcggatacactggtattgtggacgtggcctggagctggacgagacatttagtgtactttttgggcaattggagtcgtttgttattggtcctttttcatttttaatatcttaatgagatgatttaaggaagttactgaatctctgctattaggcctatcatagccatgccactaccaaaagtggggggtgggtttgggggtgagaggtcaagtttatatacacagtatttaagttgtacaggtattttgctgctggaatattcttatggtaagactttttcttcagcaatcaaagccttagatgggagatctcaagtttcaacaccacgttttggcaaaacgttcgatgccccaccagccttacctaaagctactagaaaggctttgggaactgtcaacagagctacagaaaagtctgtaaagaccaagggacccctcaaacaaaaacagccaagcttttctgccaaaaaggtaagtgttggctataaagacactgtttaaacacttaagcacttttgactcttaaaatgactattggcatcatcctacgtagctttcttccctctgagtagaagggaaatagaggttagcaagcagagtagtggaggagactcagattgtccttgtggacttcttggtaccttgagattggaaatctcagatgcagctaatgcatatttttgcctcatgcatatttttgcctcacctgtccttcactagtgtcgtgaaactggttggtggtgtctacttacagatacatactgagagagagggtgccttaagagaaactggttggtggtatccacttacagatacatactgagagagagggtgccttaagaggttctgttgctgctttaatagcacaggtgctgccattctcttagccttccagggcaagcagcagcttgttaggtgacaatttgctagcatgttgat

SEQ ID NO: 3055 - DNA, 6000 bp, Homo sapiens
ataaagggcagtaagaaaatagagtaaataaaaggttctacttacaatagtaaggaaatatataaaatgtgttagaataaacaatacgaaatgtggcatagattccagaagatgtagtggaaagtcaagaagagagaggaacatgagtttgggttagggggcagtaatcagagtaggaagaatagataaccatacgactaacttttaagatgctgactaaagatggcagggatgtgagtcatgtgggattaactggactcaactgtccagcataccttaggtatgaacatgaaggtgcgcaagatcatgcccaaaggttcactagtagtagatggcttataaaatacctgctcataggcactgcagccaggctgactctacttgtcgttactgacaggtctatttgagtcaccaccgaatctatcctccccattctgactgtggggaaggaagacagagaagatagttacacacttaaaagtaaaccaccgaggccagctgcagacaattaaacagtgaggtattaaaggagaaaatggaagcctaggtttctgctttacattgatttcatttcctgggaccttatactatacgagtttaaatttatttgtatttatgctgatctgaaaagaaagtttaaatttgattggcaaagcaatctaagaggaggggtgatttttgaagtacgtttttttcatttatttttctaccatcaccacctagtggagaaaaccttgaacttcagacagaggggactagggttcaggaaaaaatattactacaggacctactgggtgccaggcactttactaaatactttcacattgacaagttcacttaattctcatgacagaccgtgaggtaggcattcttattcctcctttagatttggaaactgagtgtgagaagttatgtagcttgcccaaggtcacactatggacagctcaaaacccaggttcttgaagtcaaggtctagagtcattttcacctcataggtcatccaaatagctcaacttcatccatgtatgtagctgtgggagacatgcacacacacacacaatctttgctttgtatttttcctttttattatttacataatataggatagaaaagcacaagtagaaaaaggaaatggcattatactatatacattaggttttgtttttattttttgagacggattctcgctctgtcgccaggctggaatgcagtgttgtgatttcggctcactgcaacctccacctcctagattcaagtaattctcctgcctcagccttgcaagtagctgggactacaggctcgcaccgccacacccagctaatgtttgtatttttagtagacagggtttcaccatgttggccacgatggtccccaactcctgtccttttgtgattcgcccgcctcagcctcccaaactgctgggattaccggagtttatattaattctatctctcttaatttttactcccatagtacacaagtttcccatgacaatacttttgaaaaccctattaacaataaagttggacgtaaaattaggtctatatgcaactctactgtctaatcttgaaacacgtcctaagagacttaaggtaccaaaatactaacaatgattacaagtagacttgtagattttccacagcattattttctgaaaaaagaaattttaggccttatattaagagattcaagaaatttgtttccattttaaaattttttggatgggttaattgatcatgtggccacgttatctctataaatgtttaaaatcagtgtactgtatttccacatttagtaacacttttcttgaaaaccttgctttgagatcagccctaaaacttgttttgcaagtattcacttctgtgatgctcctgcaataatccttatgtgctcgcagtcaatgagtttttactctcattaacttgatgaataaacgcatagaccctcacggaaactgttaacagttcttaaacacagtgcagagtttcttctttctggtagcttcctgatctcgccggctcagaaatcaactggcagaccttcccggagaccgttagaggtcttaggtcagcatctcttaagttagccgttcctgccagtgggttcagtgggtttgtggtctgactgccttcagaaataaagctacaagtctccacagtgagtattaccactcattaagacaattcagacccaaacaccagctaatgcaaaaaataaaagaacaaaacacccacacaagcaaaagaaagccaagcgggtctccatcgccagctctagcagcctgcttttattctctcatctggccccacccacaacctgctgattggtccattttacagagagcccattggtctgttttacggagagctgattggtctgatttgacagggtgctgattggtgtgtttacaaaccttgagctagatacagagtgccgattggtgtatttacaatcccttagctagacataaaggttctccaagtccccaccagactcagaaacccagttggcttctcccattaatttctgaactggggctgcagtatagagttgcttgctagtcccacgtaatgagcctgcattgctcagctctggggtggtgaacggccctgggtgccgtgaggcagtaagcagcgcttctcagggaggcttgggccgcgcaggagtccccagttggggggaggctcaggcatggcaggcctgagccttgcgctgcgtggaggcaactacggcctggcgagaagtgctgtcccaagtgctaagctcctcaccgtcctgggccggtggtgcaggccgctccgagcgcgaggcttatctgagcctactcccacccggaactcgcgctggcccgcaagcaccgcgcgcagccccggttcccgcccgcgcctctcccaccatacttccccacaagctgagggagccagctccggccttggcccgcccaggaaagagctcccatagtacagcggcaggctgaagggtttcgcaaccacggccggagtggacgccaaggcagaggaggcgctgagagcgagcgaggactgagagggctgccagaatgctgtcacctctcactgctgagggacaaatgaaaaaaaaaagctcacggtcgggcgcagtggctcatgcctgtaatcccagcactttgggagaccgaggtgggcggatcacctgaggtcgggagttcgaggaagaaaccccgtctgtactaaaaatccaaaaaaattacctgggtgtggtggcggacgcccgtaattccagctactcgagaggctgagacagcagaatcactggaacccgggaggcggaggttgccgtgagctgagattgcgccattgcactccagcctggacaagagtgaaactgcgtctcaaaaaaataatgaaagctcacgatcctcttttggtagtttcacgttacatgatgattaaagtttaacttgtttctctagcgtttctattaatcttatttttgagcctaacttttttagttagaaacaactcttaaccagccagccaggcgtggtggctcagcctgtaaccccaggacgactccaaaggctaaggcggaagggtcccgggcgcccaggagttcaaggctgtgagctctggtcgcggccctgcactccagcctgggcgacagaacgagtgagaccctcaatgtgctcttgcccagatgaaataaaaattcaagttttggccaaatttcggaaaagtcttcattctccctcaattcatttacctcttctagttaccaaaaatgcctgttttgagatacatgttttaaaacgggagacttagacaaaagcaaaaaataacatggtaattcattcaaagatgcagactaccacacttgttttaatctgatattctttccatttctatccgtctaggacgtaattgcacacgggcgcctcccatcatttggttgctaaggagacagaaggctggtgtttccgatttgccactattacacagcggcccgcgagaagcatctcttggctcgaagcgcgctgtaggtgaaccgcccttgacttaaacgccaacacatctaaaagggggcgagggacgctttattttcatttccctgaccactactgaggtgagcatttctttcactcgcgtacttgtttgtattttttctgctgttcacgtccaatagaacactggttttctattggaggcttttgggttttttcccccatttccctttcgttacaaacgacccgctgcggccgcctcctgcttgtccccacaggcccattcaacagcccagcacggaaggccgggaaagcggcgctcgccgctccaacaacctcgcgcagtccgtggctcctccctgccctcgcgcgactcgcaggcctgggcggagggctgcgtccgccaccgcgcaacctcgcgcacgcgcaccacgctcgcctcgcaacccccccccccgcccctcccccgcccccgcaaaggctgttctcagagtcggaaatggacgcacggcagctggggcgaatggccgcggactacacttcccgaagtgccgcgcgaggtattctcggcggtgattggggcaaacggccacggactacacttacttacatgccgcgcgaggcgcctccgccgccggggcaaacggccacgaactacacttcccgacacgccgcgtgaggcgctgccagcggccggccgagggcgggcggacgcgggagctgcggacgtgaggcatgagcggcgccctcctccggcccgcgagcgtcctgctggttccccgagcgagggtctcgcggcgcggggcctagcggagggcatcgaaggcctccgcgtgcgcacgggttgctgcggccgcgccgggcgccggggagggcggcggccgccatggaggtgagcgggccggaagacgaccccttcctttcgcagctgcaccaggtgcagtgccccgtgtgccagcagatgatgcccgccgcgcacatcaactcgcacctggaccgctgtctgctgctccacccggcggggcacgcggagcccgcggccgggtcgcaccgcgccggggagcgggccaaggggccctcgccgcccggcgccaagaggcggcggctgtcggagagctcggcgctgaagcagccagccaccccgacggcagccgagagcagcgagggcgagggtgaggagggcgacgacggcggcgagaccgagagccgcgagagctacgacgcgccgcccacacccagcggcgcccgccttatccccgacttcccggtggcccgctccagcagccccgggaggaaggggtcggggaagaggccggcggccgccgccgcggcggggagcgcgtctccgcgcagctgggacgaggcggaggcgcaggaggaggaggaggccgtgggcgacggcgatggcgacggggacgcggacgcggacggcgaggacgacccggggcactgggacgcggacgctgccgaagccgccaccgccttcggggccagtggcgggggccgcccgcacccccgggcgctggctgccgaggagatccgacagatgctacagggcaagccgctggccgacacgatgcgtcctgacacgctgcaggattacttcgggcagagcaaggccgtgggccaggataccctgctgcgctcgctcctggagaccaacgaaatcccctcgcttatcctgtgggggccgccgggctgcggcaaggtgagtgcggccttggccgttgggcttccgtagttatctcggcggtggatgcagctgatggtcggagagccgggtgtgctgccctcgaaagaagccgcctgcctctcctggataagggggtgcagacttgggctgggctggggcagtgcctggtccacaggtggagtctgtgatgggtgtgaaaagggcacacacccccagattggtaaggcaggcttgccgggtttgcaaaaggacgatgtctgtgaatccatagttttacaagatgtggactcttagatttgatctgcctttatcttccatcggtctcccc

SEQ ID NO: 3056 - DNA, 6000 bp, Homo sapiens
gacagcctataatgtcatattcagttaacattcctttactttcatgaaactgagtttcaactacacaaaaaggattacataattttaaggttacaagttaatttttacttgattttttttttttaacaaaatgctaaactgcaggttaaaaagaaattgaaacatgagtacaatgctcaaaagagttgtatggtaagtctagaaagtatttatctatctatttgttctattcaatgagggacataaagcctttcaaatcatcaataaggcttcccatagaagcctaagcacaaaagcaaacacccaagaaccaaaacaacaaagcaaagttaaagcttgaagaattatagaaacacatattagaggctggaaaatgcatcttcaagtgtgcagggataactttgttaggtataatcgaacatttccctcctcttttattttcattacgggcggatcaacatttcttctctgtccccaccctctcctcactgacgcccggccctttctggccccctgccaggagactctctgggaggtgtgtgcccccaggacgctgcacactgtcaacttactctgagctgctgttgctgctgtggctcagagggtcagtgggacggctagagtctaggacgtggattcccagggagttgatcgctcgcattaaaatagtcaccattgcctctactggaagcttctcaagaacaatcactcgacagcggctcagaagagcagcgttgacctggaaggaagggttttcagtggttgccccaatcagagtgatcgtcccacattccacgtgaggaaggaaagtgtcctaatcatgggaggaaaacagaaaaaagtgattccagtcaacagccacctgcagaatcctatgtaagttggctatcccttccttccttttcctcatttttatctttcgagttcaggaatagcagcagccttatattcactgaatatagatgcaatatttgggggagtacaactcttgcttttaagtctgaaacacatcttctggaatgcccgtccaagcctgatctcttgctggtagactaatagctttaagtagaattctagcttagtttcaacataaatgatttctttactcagaaaaccatcttctaccaaaggctgaactggcacatagcttatatgtaacagctatttatttatagacaagaacacacaaaaacattaacacttccagaatcttcttccacagcaagcactcaatcatattattattattcctattatgctgttttatggggaaaaaatactaagatgagtcagtggtccaatatgaaacctagaatgctaacgcctcgtcagaactttaaaagggtctttttattcaaaaaggttcaaaaaaggctcagtagagttttgtgaaatattctatgtatgattaaaaagttacaaaaaaaaattttttaaagttatgcctaaaaatttaatttttttttatttagagtatagctctcagatctcagcccaataaaattttaatgtttatttttttttaaatccctaagtggctttgtttataaaaatagcttgtgtccttttatttcagaaacccatttaaataaacagtaatcattagctcttccaacattcaccttgaagacagagcctggagttacagaaaataccgattgtttaattttcaaaataaaaatactgttaaagtaatttttaaaaacccattaaaataatgaccttaaaatcattattttactgttcacaatgactcctagtatttagattaaaaattcctaaaactggaaatttgattcaaaggtgcttttctgatacgtatagctcagggatatgccaaccatttcatttatcagatagagaaagcattttcttgttatcaaaaaacactaagaaatgtatggagaaataggcttgaaggagatgggttcacaagcctacgcttctttgtaaacaaagctcgtaagtctctagcgtttgtatagtgatctcacacactttatattgtttgatgttcacaacgaccaaaaggtagaaggaagttaatatacctgctgagatttattgaaccgatgaatctcatcaataaaaaggatggttttccttttgaaaaagctcttttcattttgagcttgttttatgacatctcgcacatcatttgtcttggcatttgttgcagataatgtcacaaaccttatgctatgtttcttgctgttgctggctatgatgtgagccagagtggtctagaaaagatgacatacatggagtttgaaaagctggtaagacacagagagaccagcacccatgggaaccaccacacgcagcatcactatttaccaaaagcaacttgacctcggaagaatgctgagcagcacagaaacaatcaaaaataccacaggacatttaaaaacaacaacaacaaaaatattataaataaaacaggaaagtagctaaaccttaggctaatcctgaccttttctcctctgtccctaaccacctttgattcctttttgggtgactctttaagatctttggaatcccagtaaagaacggctgtcttgatttagcagagtgacagctgtgacctctcaccaaagagaaaattctccctcctctagccgagacagcacggaaggatctaggtgcagaactcatcgcagaaccacagcccgaactggaagctcaggacagctgagaaaaggagagtgagggagcatttgccttgagaccaatgacatccacctagcatttgagatgactgtaggccacttctgcatgttcactctggtaggagatgaagggcagcactgtggtcacattagcaattactagaaaaccaaggagacccaggtaaagcacttcttgggtcctcaacaaatatgtatatgctgttattaatatgaatgttgttattagtactaaaggatgagaagaaaaactgaagactgtttaatgactgtgacaaatctgcacctaaatggaaaggtggtactttcttttctaaaagttgtagagcacccattctgtggctgcttctttcagaaatccccgcctgcctgccttttggaatcaggctcgcaagtcacagatgcctaggcttgcaaatgaccaacgcccatctcactgagcagcctggaccacccaaacctcttgcctggcatttggtaggtgggatgagctcacccactcgtctccctaaggaccttcttgctgtctggggccaccaacagctgattatccattctcatgatcttatgtaaagacttcacaattactaagaatgatactgctcaatcccttaaatggggttaacaactaaatccatggggacagacgtcaacaactcgaccaccatcatcataagatgttatttgggatagatgtggtttattcctggccaaagggaaggcatgagtgcaaacaagaaggcacaaaaagggcaattcattccaggaactggagttaaagggggtgtgcttaagttgtgggagataaagctagaaagaaaaataggagaaaaatcataaaagccttgtgtgcaaacgagtctgaatctcaaagctacaagaactctttacagtttgatccctgaattctccctttcccttcctgatgctggttcttctcccttattatggataaaagcatcctgtatttaagcacttcttagctttctctgttttctggctcacctcctccatttttttctcaagtgtttttccaatgacatgctttctagactcacaatatcctaactgccctcatctggaacgctaacgcctcacgaagggacacagaactggacaccaaaatgcacggatgtttcttctctagagtacaaggcattatgagaaaagttacggaaataccggatgaaaatgacttgcagatgaaaaagtttttatgttagttttgtaaatacatgagtatatttagtaaaatcaatatattctcaagaatataagaatgttaaataaacttattcttaagaataaataccagtctgttaaaccaacaactagtggaaaaggaaggaagcacaacagaattaatttgatttttttcaaagctgaatccgttattatgtacaaacggaatatacaaatgtttctttacaatttaaacatgctgattccttgcgaattcggttactaaatcaaagtctggggagggggcggggagaccgatggaagataaaggcagatcaaatctaagagtccacatcttgtaaaactatggattcacagacatcgtccttttgcaaacccggcaagcctgccttaccaatctgggggtgtgtgcccttttcacacccatcacagactccacctgtggaccaggcactgccccagcccagcccaagtctgcacccccttatccaggagaggcaggcggcttctttcgagggcagcacacccggctctccgaccatcagctgcatccaccgccgagataactacggaagcccaacggccaaggccgcactcaccttgccgcagcccggcggcccccacaggataagcgaggggatttcgttggtctccaggagcgagcgcagcagggtatcctggcccacggccttgctctgcccgaagtaatcctgcagcgtgtcaggacgcatcgtgtcggccagcggcttgccctgtagcatctgtcggatctcctcggcagccagcgcccgggggtgcgggcggcccccgccactggccccgaaggcggtggcggcttcggcagcgtccgcgtcccagtgccccgggtcgtcctcgccgtccgcgtccgcgtccccgtcgccatcgccgtcgcccacggcctcctcctcctcctgcgcctccgcctcgtcccagctgcgcggagacgcgctccccgccgcggcggcggccgccggcctcttccccgaccccttcctcccggggctgctggagcgggccaccgggaagtcggggataaggcgggcgccgctgggtgtgggcggcgcgtcgtagctctcgcggctctcggtctcgccgccgtcgtcgccctcctcaccctcgccctcgctgctctcggctgccgtcggggtggctggctgcttcagcgccgagctctccgacagccgccgcctcttggcgccgggcggcgagggccccttggcccgctccccggcgcggtgcgacccggccgcgggctccgcgtgccccgccgggtggagcagcagacagcggtccaggtgcgagttgatgtgcgcggcgggcatcatctgctggcacacggggcactgcacctggtgcagctgcgaaaggaaggggtcgtcttccggcccgctcacctccatggcggccgccgccctccccggcgcccggcgcggccgcagcaacccgtgcgcacgcggaggccttcgatgccctccgctaggccccgcgccgcgagaccctcgctcggggaaccagcaggacgctcgcgggccggaggagggcgccgctcatgcctcacgtccgcagctcccgcgtccgcccgccctcggccggccgctggcagcgcctcacgcggcgtgtcgggaagtgtagttcgtggccgtttgccccggcggcggaggcgcctcgcgcggcatgtaagtaagtgtagtccgtggccgtttgccccaatcaccgccgagaatacctcgcgcggcacttcgggaagtgtagtccgcggccattcgccccagctgccgtgcgtccatttccgactctgagaacagcctttgcgggggcgggggaggggcgggggggggggttgcgaggcgagcgtggtgcgcgtgcgcgaggttgcgcggtggcggacgcagccctccgcccaggcctgcgagtcgcgcgagggcagggaggagccacggactgcgcgaggttgttggagcggcgagcgccgctttcccggccttccgtgctgggctgttgaatgggcctgtggggacaagcaggaggcggccgcagcgggtcgtttgtaacgaaagggaaatgggggaaaaaacccaaaagcctccaa

SEQ ID NO: 3057 - DNA, 6000 bp, Homo sapiens
gtgtctttcccatgctggtctcatgacagtgaataagtctcatgagatgtgatggttttaaaaatgggagcttccctgcacaagttctcttctcttgtctgccgccacatgagatgtgccttacaccttccaccatgattgtgaaggctctccagccacgcagaatcgtaagtcccataaacctcttcctcttgtaaattgcccagtctcaggtatgtctttatcagcagcgtgaaaatggactaatacatggtggtaccattcaaaagcctgggagctggacagcaatggtaaagattcccatctgagtttgaagacttgagaaccaggagcaccatgggcaagagaagatcagtgttccagctcagcagtcaggtcaggagtaaatatcaccttccctcatacttttgttttatccaggtcctcacagacgggatgatgcccacccacgctggtgagggtgatcatcttcattcagtccaccaacttaaatgctcatcatttctggaaacaccctgacagacacacccagaaatgatgtattaccagatatccaggcatcctgaagcccagtcaaggtgacacataaaattaaccatcaaaaataaaggatgcccagaggcctctaaaaatttttagaggcatcgttcaaggacccttccaatccagcatctgcttaccggtctagcctgaacagttactccaaagaatcatgctctcttccactttgcagcctttgcatatgcaattcccattgctcagaactctccctcagttttccaccccaccactcacctgaccaactcttgttcatccttcaagtctcaacttgaacaccatgacctcttggaagcaatctttttttttgagatggagtctcactctgttgctcgggctggagtacagtggcacaatcttggctcactgcaacctccacctcccaggttcaagcaattctctgcctcaccctcctgaggagctgggattacaggtgcccaccaccaccacagctggctaatttttgtatttttagtagagatggggtttcaccatcttgaccaggctggtcttgaactcctgacctcgtgatctacccaactcagcctcccaaagtgctgggattacaggtgtgagccaccgcgcctggccaggtgccttctctgcattcttatcatgccttccacttcctgatctttgccttatcgcaaaattgttctagtgtctttcctctcaagatactctaagtttgatgggagttgttcatcaatgtgtccccagtgcattgtacagtgcctggtgcatagtaatggctcaataaacaagcgtggtaagtgcaagacatacatagatatgagaggtatctatagagagaacaaaatgcatgcatagcacctgcatcacttcatttaccacatatttaatatcattcacacctaagtttaaaaccctatcatattctgaaatagaaagttaaactcttctaaaactgaaaatttgcagatgatggcactgctaagagcaatctgatacagtaacagtttctggcatatgcagctcattttaacagatgcccatatgacatacagaaagctgtcaggcatgctccaaaaagaaaagccatccagtttatgttccacttgccaaattaatttcatttgacatttaatttatatcctaaggtactgtggatttaaaacttgactatgataatagcagattagagaagtgttctatttgacaaaatcaattcatcaagttacttttattatgagtaaggctgtgttgatatagatatttcagatcaaatatgtagatcatctaaaaatacatttattgattatttctaataaaatataagctttctcctctttcttatgtctaatgttaagtgaagtaaagcttgcacctgctcaccgtaacaacagagaaaggagacattagaaaatcagaacagtgtggatttaaaagccaggaagcagagttgaaattctgcatctgccatagggggtttcaaccctggccacatattagactcagctgaggattaaaaaaataataataatagcacccagtcccaccccggataaagtgaatcagaatctccagtatggcatggatttttttttaaatccccagatgattcatgcacagatctattagttatgtgaatttgggcatggaatttaatacccatagtatataaaatggaatgtagtagacatttgccacaatcatgatgtgacaatccacttaaaaaaattaacagtttattagttggaaccagacttgaaaaaaagatttatatattgcaattggttgacagttcccttataatgctttcaacttacaggttcacttctctctgcctcttctttttgctttgcaatttacttgttgaaacaactggatcatttgtcctatagttttcatgatctagaatttgctcattgcatctccatgacatcatttaacatgatcctctttcctgctattatttcttgtaaattggctgttagatcaaaaggcttggtcaaattcagattcgattggcaagactgggtgatgatgtacacctctctcagaagcaatttatgtctgtttgtctctgtttttatgatgtgaatagctattgataattgtcacctagattcattattatatccgtagctgcaaaacaataatattctattgttctgtttttattagttagaattctataaagacatttttcctcattagagtttagtttccctgagatacagtttacataggataatcatgaaaaaatatattggtttcttcatgtgttttctttatcctttttcaaaataatgaattggatctctagtatcctccaaaggtaacgaatgagggttattttgattttgttcttgttttttttttagtatcattatgaactcatagacttaaacatattcaacatgtttcaattcattgcaattattcttatcgactctcagcttgtaatgactattattgaccctcaagtgatctgatcctaccctttgactcccctcattactcttagatactttcttttctttctactataactagatggtccagactgatctccccgcaaggtttggattcagccggtctccaaagagcccccatttctttttgtgggaaatagtatttgaaaccagaatctgggtgctggggtgctcattgctactgagttgtccttgtttctaggccttttaagtaaacagagctaggtaggaaatacttttcattttccttaagataaaagcgtcataagttcatattgatattacaattcaaattcaggaccagaaagttttgatttaacctcatctaccttacaactcctcttttgggcaacaccaaacacccaactttccagcaacaccacatgattgcatctttgctttattccacagtacatatacagcaccataccaatgctgacactgccaagatgctaaccaaaccaacaaacaaaaagaaccaaaaacaggttttcatgaattttgtccttaaagcatatcttactaagagtatacaattaaatgactgtgctataaagtcacttaaaagaggtccacactgggtgatgatgtcatcaatttgatgtacaatatgctttgttctgctttcagttttttagggatttcttttttaatttgatatttctataattatgcaaaggccaaaccttattttcaatataccacccattggcattggataaatgttaatttttttaaaaaatgttttattacaagcaaaaagtgtacctaaaccctgaaaatggatatgtgaattatcttagagggttggtcttttaaaaagtagtagaatagtcattccattatctgaatatggaaagtaaaacagataatttagtgcctaacaatccacttatactgaaatttcttttgtattttgttatgttgatttggcaaaagtttcttttccttatgtttacttctgctgacagagtaaactcattaagtattctgggatagggaaggtgtaacacagtaacaacattccccactaaactttgatatttctgattcaatgatgagttaccttgtaggattgttctatttctctcagactaatacacactttgtttattcattcttcaaagtggaaaatattttgtattttcacaaatcttttggaaatattcaacatatactactaattttctttctttcttcctttctttcttttttgaagatacaagaatgtagcaagttagtggggcaaagttatgcaccttgtttatttatataccaaaacttcataaattatgtaaccagccttctggtactgcaaaaaaagatcattaatgccattaatggcttatttccttgagctgtaattatttgacccctatctgacatactccgtgttctgtgaataatctttaaatgtataattctactgctagtgttgagctgtagatcaacagtagaaaaaccagtttttcgaattcaccactacaacacaattaaaatcctcatgaattatgctacacgttagaaactcctaatggactgtgaactttttgctattcaatttgattgttcaaatttacagattcctgaaccaaactaaggcaaatttcagttcccatcatatataaattctcttagactagcaaatgagttaacgagttaccgctggcagccatgtcaatagattgccatttagagatccagatccagtctactgcagccaccgaagcccggccttggggcctttctaccagtaactagctccccaacagttcgagtggaaatttaccatcacttctccacctgtctcacaccccgccctcagccccgccccttccaccggccccgcctcctgtgctttggcgcgcgctctccacgccccttccgttcagccaatcgccgctgaagtttgcaggagtgggacttctgtttccaccaatgcgggaggttcttgttctgcaggtctcgcgtctgccaggagctacggccggaagatggcggcggccgcagagttgtcgctactggagaagtccctgggactgagtaaggggaataaatacagtgctcagggcgagcgacaggtgagaaggagaggcggcgcggaggggaagaggtggacgggagcggggcctgccgagccctggcaggacccgggccggccaccagatacgggcggagtgaggatgctgctacccagctccccacgtgtctgcgccgctagccggctggcgcctctgggcctcggcccctgccatcctacctcctggagggaggggttaaccagctcaggttgggcttggcctgaacttcacctcctgggaaattgtcatcatcccattatgaggaaacaaaaccagttggaggagggtcctcacagggctcttagaccaacctggaatgtattcagtaactggcttttttttttttcccgtaatcgcacctttcattcagttattgcgcagcgactccgttatagctaacagggtgccaggtagcaccgtgctgggtctggggaatacaatgatgatttaggggaacatgcttcctcctctcaggcagcttgctttttggccaggtggacaaacattgcaaccatttaaattggaagagtgccacgttgcaccataaatggcagagagaacacctaaggagtcttggcccaatctaggggattcggggaaggcgtttctaaagccttggattatcagtttaagtgttacgacccacagtgaatgcgggaaacatcacaaggtatgagattgcctggttaggcactgttagaacgtttgtgttttatagttgtttgtcgtagaaggaatgtattagagaaggaaattggttgtaggaagactactttggatatatgttttttttgctcctttgagattttttccaaatgatgtttggtttttgtctttaattttttctcttcttcatttggtccatgtgaagatcttgtctagaaagtagtagtatagttttt

SEQ ID NO: 3058 - DNA, 6000 bp, Homo sapiens
ccagtggacgagcgcagtcctctttgggagttgtagtcccctattgttgtccatgctgcaaaatgaagtgacgaatgggtgggtaccggtttggttttcatggggtttttgttttgtaaatgaaaaacgaccttgcgcaagattcctttcctctatgcctgaggtttttgtacaaaaagtgagcagttcttgggggtacaggaattgagaagtctggggttccagaagttgggtggtggggaagacacgccctgaaagctcccagctgcagtacctctaggggagaaaggattgcttagttcagcgaaaaatggggagaagtctggcaccgtgctctgcctcccctggcctttggtgacccaaggcatgaacttcagtaagcttctgctccctcaaatacttcaagaagggaatcgccctcttgctatttccttggaaattttcgagccattgttttgaaagagaaacaaaattgcagcaagggcttttcaggatagcgatgttgtctggagagtatgttcaaagaataaaatagtttagagaaaccgacatcggggatttgtgaaactagaagtctcctacgtgggtaggagatctggaccttagggcagactttgaagacaccttggtcttcttgtcaaacagggaactatggaatgagatgcctgatagattttcagttttttcagcctgcctctttagacatgttaatgaagtcagtggtttttcaattcgctgatttcactgaccaggtggccgccactgcaactctgcaagagacccagtattgaaaaacgagagaggggtaattgatgggggaaaaattgagtgggttcaagacggagtccatctgcttcttcccatagatttattattcacttatttgatagttactatgtatccaccaaattaggagctatggttacaaaatgattaagaattagctccctgtcctccaggatgttgcagtctggtgagaagcatacaatcaataaaatgtggtaaccactcagaaatgtagtatcaagtcaacgtcattgttaattcacattcgatcacacagatcaatgtatttcttttttttttttttgtatttttagtagagacagggtttcactgtgttagccaggatggtctcgatctcctcacctcgtgattcgcccgcctttgcctcccaaagtgctgggattacaggcgtgagccaccgcgctgggcagatcaatgtatttctaagttgccttctaaatgagggaacatcaacttgtgtaagccctctctacccacttaaaatataatgctttacgttttagggaaatgaacacagtcattttgtgggagtagaaataactcaaaatacacaatcagataacttgtttcaatttgtctctatattagctgtaggatcctaggaaagtcctttaactttgcagggctccagctcctcgtttgtaaaatctgcttatttgactgttgtgcacagaattgagataaccaacagaaaggactttatgaattatgcaagtgttatagttaccattttcttcatgtcttattgtgagataaaataggccgggcgcagtggcttacgcctgtaatcccagcacattgggaggcccaggcgggagaatcacctgaggtccggagtttgagaccagactgaccaacatggagaaaccccgtctctactaaaaatacaaaattagccgggcgtggtagcgcatgcctgtaatcccagctactcgggaggctgagacaggagaattgcttgaacccagaaggcggaggttgcggtgagtcgagatcgcgccattgcactccagcctaggcaacaagagcgaaagtccgtctcaaaaaataaaatatagatggccgcatgcggtggtttacgcctgtaatcccaccactttgagaggccgaggcgggcggatcacctgaggtcagaagttcgagaccagcctgaccaacatggagaaaccacgtctctactaaaaatacaaaaataagctgggcgtggtggcgcatgcctgtaatcccagctacttgggaggttgaggcaggagaatcgcttgaacctgggaggcagaggttgcggtgagtcgagatcgcgccattgcactccagcctgggcaacaagagcaaaactccatctcaaaaaatagataaattagttaattaaaaaataaaaataaatgattttatgatccttccctcgcccctcgaaaggtggggacagcctttaagacagagagcaaaccagttttctctgttcgactacagatctttaggatcttggatttaagaaaatgacctcaaaatgtccgtcagagacgtattcccaggaagaaagatattacttctactacaaaccaaatcaaaaggaaatgaaattccaatgcaacaggagtgaactgccacgcctacgggctgttctccaaactgcagcctccagccacgactgcaacgcgcaacccactttcatttctcatgagtcagcggacaccatgtctaggaggaccgaggaaaggcgctctggccttaccagacacgtcggacgtctatgacacagcccctctatccgttgccggcagctggcgccagactctctggtcgcggtttggaactgcgcgggaagtgggtggtgggcgggcaagcggtagtgggttgtcccttggagctgcccaatcgacgtgcattattctgttggcgcacggcggccttcaattaccgtctcattaactgatctcagcagcctgggagacaccacctatttgaactctaagggggcggggctttgggtgtgcctccgctcgactggctgcggttgtgaaagacagcggcagaagccaatcagcaaataagctctttttcggcacacgcagtcgctccacctgggtcgcgaccgttactggtggcgcgcgcggggacttaaagtaggtgagttctaggggcctggcccacggctccccgggagccatcttggttcccccagaaggcgggaggggcgtaccttgggtgcgactgggcggaggtgacttggaagttcgcttctcggactgtaatactcatccttacctggcgccccgctccgagtttaggtatgaagacacagggagacgtcgggccacaagggaacccactgaggtggggaccaaagatggtggctctttgaattggagccaagcgtggtgggcacccgctgagttggcctgtcataaagacggagttgacactttatccatggggcatcctactttccctacctgtcaacagtttccctctagagtggcatattttcaggtgaattccatttatgctattttctttccatctcatttgttccttcatcagtaggctcggtgatgagccttcccgagggcagggtcgatttcatgtttggttcacagatgtataccaaatacttcaaacaggtataccataaccattgaatgaatatgatggaccctaggggaaagacacggttcccctaatccagtcctggaggtgggtgagtgtgaaggcagaaatggaaagtaatggttacaatatagcgagagatcttagagtaagcacaaatccattgaccactgtggaacaggcaggatacaccaggaacacgagaaggcagggaacacgccaggaaagggtttgctgagaaagtgacatttgaggccgggcgcggttgctcactgctgtaatcccaacactttgggtggccaaggtgggcggatcacctgaggtcaggagctcgagaccgtggtgaaaccccgtctctactaaaaatacaaaaattagccaggcgtgatgccgggcgcctgtaatcccagctgctcgggaggctgaggcaggagaatcgcttgaagcctggaggcagaggttgcagtgagccaagatagcaccactgcagtccagcctggacgacagagcgagattccatctcaaaaaaaaaaaaaagaaagaaagtgacatttgaactgaatcttaaaggatggtagaagttggaccagaaaactaggtgggaaaaagccaaggaattgggctaaggcatgaagatgtgggaagacaagaacagtgtgttcgaagactggggaaaatgtctggctgaaccataggcttttgcgggcgaggggtaggcgttacaagatgtgaagttcagatcatggagggtctcgctaaggagtttagattttattctgtgtgcacgaaaaaccatcaagattttagaggagagacatctgagtgatttggggcaagtcttaaccttatatatgcttatgtatgtttcaaggagatctgaaaatcttaacccagctatgttgcagtttctttatctgaagaaatggaagatagtaatactactttacaaggttcttgtgaagattaaatgagtcagagtcgatataaagtaattagaacagtgcttgacacataggaagcttctatatatgtcatcttttattatcattttttgcagttgcatctgatcaaactgaggtggtctggtaaaagtataaaaagcatgggctaaaaaagaaagaaaaacaacggggcgcagtggctcacgcctgtaatcccagcactttgggaggccaaggtgggcggatcacccaaggtcaagagttcgagtccaccctggccaatatggcaaaaccccatctcttctaaaaatacaaaaattagccaggcatggtggcaggtgcctgtaatctcagctacttgggaggctgaggtgagagaattgcttgaaacccgggaggcagaggttgccgtgggcccaagatcttaccactgcatgccagcctggggagcagaacgagactccatcacaaaaaagaaaaaaatgttttaagtgcttcagaaggttaacaacagaaagattggtggaaagagaagcatcaacgttcataatgatccagtttaccccctagttttcagtctgataactctgatgctgtttgtgtgaaccaataatgaggataattgataatgtgtatccttcccagatcatggaggacacccaggctattgactgggatgttgaagaagaggaggagacagagcaatccagtgaatccttgaggtgtaacgtggagccagtagggcggctacatatctttagtggtgcccatggaccagaaaaaggtcagagggtattggatgttcaagtattgatatagatcttttatttttgtggtaaggtatttggagggttgcaagaagcttatgtatgtttcaatgagatgtgaatttttttttttcatgaatggaagagatggggccgattgagttgatagttgcagactactaccctggactcactggaagtgattttactttgataaaagaaaattaagagattgaaatgaagctgggtgcagtgactcacacctgtaattcccgtgctttgagaggccaaggcagaaggatcacttgagactaggagttagagaccagcctgggtagcatagcaaaaccctgtctctacgaaaaatttaaaaattagccaggtgtggtggttcatttcacatctgcagtcccacctacttgggaggctgagccagatgatcacttgaacccaagagttcaagattgcactgatctatgatcatgacactgcattctagcctgggtgacagaatgagaccctgtctcaaaaaaaaaaaaaaaatcaaataaaatccaattgtgtgctctggagatggatggtagtgatgattgcacaacagtgtgaatgcacttaatgccactgaactatacacttaaaattattaaggtgatacattttgtgttatgtgtattttataacagtaaaaaaacatccattgtggatggatggggtatcgcatatactctttcagtgcctagatgtcctagggccttttatttttctaatgcatatggaggccttgagtgagtagtagagtacctaataggcactttttcctaatgacaggccaggactctgatcttggagcttatctacctctctaattcttagatttc

SEQ ID NO: 3059 - DNA, 6000 bp, Homo sapiens
aagggtgagccaccgcgcccagcttcttctaatttttaagacagggtcttcctgttgcccagcctgcagtgcagtggtgcaatcacggatgactacagcgtggaactcccaggctcaaccgatcctcccatctcagcctctcgagtagctgggaccacagacgcgcgccaccacgcccagctaattttttacttttattttttgtagaaacgtggcatgggggagggtctcgctttgttgcccaggatggtctcgaacccctgacctggagggatcccaattcgcccacctcggccccacatctcccattttaattccacaagcgctcaggccgttgttctagggcatggcatcccgtgggcctgccacacccttcccctagacactcgctcccccgagaaagccacagctttccctgctctggatatgtgcagcgggtcccaagtgctcggtgggcggatggaggtcgaccacacttcgataagcgccgctctccttcccccaagctgggcaccgccccaccgcgcggcgcacaaaaggctgggggtctgaggaaagagctgccgccgcagtcgaccaccccccccgccctccacgtgactgcggcgcacgcgcaggtcgagccgccgacaaaagacttcgcgcgtgggcggggccagggacaaaaattccgcgcgcgaggggcggggcccaaggtagcgcgcccctgccggcgggcaacgccgcattgtccccgcgcgcccacggcgccccggccccgccccgcagggccccgcccttctgctacaacgtagcagccgcacttcctcccgcccctcccccgctacactgtaaccgcgcgcaaaaaaaaaaaatcccccttggcctcggaatttttattccttcgctacatttctaccccttgatttaaaggattctttctctcccattaagtcctgagggactcattaaagaaaaccacacacccccattttctcgacatatctgttcacgccctaaaaaagtctctcttaggggccatgaaagcaagtaaaattaatcccgttcttattctccttccacccaggaacaaatacaggaccggccctctggggtcgcgggcgcgttggggtccctggtcttttgtgaaaggtagcgcccagcgcagcccaccctggcgcatcgccccccacccttgcgctggagctctctgcagccgcccgatggcctcaccccttcccgctccggtttggccctaagtaccccgcaggggggttgggcgggatgcacatgggcaaaacctcgccccgctttgtctgcgaccgtttccgcatctctctccctgcccggttctcggaccgttagaagcccttttaagtaacatcttataagtcctcggtcttcccgcccccaaacccgaagagcccttttactagtttctccaaaatgtgcctgccaagaaaaatgattcccagctttccaaaggcaaatgctagctacaattgttatatatataaatgtaacaaacttgagaggggcaaatcttgattaaggatagcgggtgcaaatgccccacaaccattttttcataacttacctggatttttccttgtaaaaagaaataaaagaggtgtaaaattcttaccttggcaccgatctggttgccacactgaccagcctggatgtgcacgatttccctcatggttaaaatttaatttttttgctcgcctcaaggtatgtatggggcaagaaaataagtaattttttttctccgcaggtcgcaggctggaaggttggaatgcgccccagaggctggagcagcgaggtgcaaacgcgacggcaggaaggttctgagagggagaaaggagaggggagggcgcggagggaaagcaggctgggcggggcgcgcgtgcgccggggctgggaggcgggagaatcggccccgcgcgcggtagggagacaaagcctcatcgagcctggccctgattagtcgatgccggtcatgtaccaggcgtccattggcctctgagccagtggacgagcgcagtcctctttgggagttgtagtcccctattgttgtccatgctgcaaaatgaagtgacgaatgggtgggtaccggtttggttttcatggggtttttgttttgtaaatgaaaaacgaccttgcgcaagattcctttcctctatgcctgaggtttttgtacaaaaagtgagcagttcttgggggtacaggaattgagaagtctggggttccagaagttgggtggtggggaagacacgccctgaaagctcccagctgcagtacctctaggggagaaaggattgcttagttcagcgaaaaatggggagaagtctggcaccgtgctctgcctcccctggcctttggtgacccaaggcatgaacttcagtaagcttctgctccctcaaatacttcaagaagggaatcgccctcttgctatttccttggaaattttcgagccattgttttgaaagagaaacaaaattgcagcaagggcttttcaggatagcgatgttgtctggagagtatgttcaaagaataaaatagtttagagaaaccgacatcggggatttgtgaaactagaagtctcctacgtgggtaggagatctggaccttagggcagactttgaagacaccttggtcttcttgtcaaacagggaactatggaatgagatgcctgatagattttcagttttttcagcctgcctctttagacatgttaatgaagtcagtggtttttcaattcgctgatttcactgaccaggtggccgccactgcaactctgcaagagacccagtattgaaaaacgagagaggggtaattgatgggggaaaaattgagtgggttcaagacggagtccatctgcttcttcccatagatttattattcacttatttgatagttactatgtatccaccaaattaggagctatggttacaaaatgattaagaattagctccctgtcctccaggatgttgcagtctggtgagaagcatacaatcaataaaatgtggtaaccactcagaaatgtagtatcaagtcaacgtcattgttaattcacattcgatcacacagatcaatgtatttcttttttttttttttgtatttttagtagagacagggtttcactgtgttagccaggatggtctcgatctcctcacctcgtgattcgcccgcctttgcctcccaaagtgctgggattacaggcgtgagccaccgcgctgggcagatcaatgtatttctaagttgccttctaaatgagggaacatcaacttgtgtaagccctctctacccacttaaaatataatgctttacgttttagggaaatgaacacagtcattttgtgggagtagaaataactcaaaatacacaatcagataacttgtttcaatttgtctctatattagctgtaggatcctaggaaagtcctttaactttgcagggctccagctcctcgtttgtaaaatctgcttatttgactgttgtgcacagaattgagataaccaacagaaaggactttatgaattatgcaagtgttatagttaccattttcttcatgtcttattgtgagataaaataggccgggcgcagtggcttacgcctgtaatcccagcacattgggaggcccaggcgggagaatcacctgaggtccggagtttgagaccagactgaccaacatggagaaaccccgtctctactaaaaatacaaaattagccgggcgtggtagcgcatgcctgtaatcccagctactcgggaggctgagacaggagaattgcttgaacccagaaggcggaggttgcggtgagtcgagatcgcgccattgcactccagcctaggcaacaagagcgaaagtccgtctcaaaaaataaaatatagatggccgcatgcggtggtttacgcctgtaatcccaccactttgagaggccgaggcgggcggatcacctgaggtcagaagttcgagaccagcctgaccaacatggagaaaccacgtctctactaaaaatacaaaaataagctgggcgtggtggcgcatgcctgtaatcccagctacttgggaggttgaggcaggagaatcgcttgaacctgggaggcagaggttgcggtgagtcgagatcgcgccattgcactccagcctgggcaacaagagcaaaactccatctcaaaaaatagataaattagttaattaaaaaataaaaataaatgattttatgatccttccctcgcccctcgaaaggtggggacagcctttaagacagagagcaaaccagttttctctgttcgactacagatctttaggatcttggatttaagaaaatgacctcaaaatgtccgtcagagacgtattcccaggaagaaagatattacttctactacaaaccaaatcaaaaggaaatgaaattccaatgcaacaggagtgaactgccacgcctacgggctgttctccaaactgcagcctccagccacgactgcaacgcgcaacccactttcatttctcatgagtcagcggacaccatgtctaggaggaccgaggaaaggcgctctggccttaccagacacgtcggacgtctatgacacagcccctctatccgttgccggcagctggcgccagactctctggtcgcggtttggaactgcgcgggaagtgggtggtgggcgggcaagcggtagtgggttgtcccttggagctgcccaatcgacgtgcattattctgttggcgcacggcggccttcaattaccgtctcattaactgatctcagcagcctgggagacaccacctatttgaactctaagggggcggggctttgggtgtgcctccgctcgactggctgcggttgtgaaagacagcggcagaagccaatcagcaaataagctctttttcggcacacgcagtcgctccacctgggtcgcgaccgttactggtggcgcgcgcggggacttaaagtaggtgagttctaggggcctggcccacggctccccgggagccatcttggttcccccagaaggcgggaggggcgtaccttgggtgcgactgggcggaggtgacttggaagttcgcttctcggactgtaatactcatccttacctggcgccccgctccgagtttaggtatgaagacacagggagacgtcgggccacaagggaacccactgaggtggggaccaaagatggtggctctttgaattggagccaagcgtggtgggcacccgctgagttggcctgtcataaagacggagttgacactttatccatggggcatcctactttccctacctgtcaacagtttccctctagagtggcatattttcaggtgaattccatttatgctattttctttccatctcatttgttccttcatcagtaggctcggtgatgagccttcccgagggcagggtcgatttcatgtttggttcacagatgtataccaaatacttcaaacaggtataccataaccattgaatgaatatgatggaccctaggggaaagacacggttcccctaatccagtcctggaggtgggtgagtgtgaaggcagaaatggaaagtaatggttacaatatagcgagagatcttagagtaagcacaaatccattgaccactgtggaacaggcaggatacaccaggaacacgagaaggcagggaacacgccaggaaagggtttgctgagaaagtgacatttgaggccgggcgcggttgctcactgctgtaatcccaacactttgggtggccaaggtgggcggatcacctgaggtcaggagctcgagaccgtggtgaaaccccgtctctactaaaaatacaaaaattagccaggcgtgatgccgggcgcctgtaatcccagctgctcgggaggctgaggcaggagaatcgcttgaagcctggaggcagaggttgcagtgagccaagatagcaccactgcagtccagcctggacgacagagcgagattccatctcaaaaaaaaaaaaaagaaagaaagtgacatttgaactgaatcttaaaggatggta

SEQ ID NO: 3060 - DNA, 6000 bp, Homo sapiens
cactatataccaggtattgaaattacgacatattatatcttacttaatacaacaatatatgaagtagttaaaattactttgcacagagaagaaaattctgttaggttaagcagcttgcccaaagtagcagtcagtcaacagtaaagcctgtgggaagtgggtctgtgggctcctggctctctgttcctttttttttttttttttttttttgagacaaagtcttgctctgtcacccaggctggagttcagtggcactatctccgctcactgcaacctccgccttctgggttgaagcgattctcctgcctcagcctcctgagtagctgggattacaggcacctgccaccatgcccggctaatttttgtatttttagtagagactgggtttcaccatgttggccaggctggtcttgaactcctgatgtcttgatccaccctcctcggtctcccaaagtgctgggattacaggtgtgagccaccacgcctggccctggctctctgttctttctctccaggatgctgcctgagaggaggaggtcatgagctccctatcacaggaattttcttttttgaactaccatgcccactaacatgctggccaacacggtgaaaccctgtctgtactaaaaatacaaaaaaaaattagccaggcatggtggttcacgcctgtaatcccaactactcggaaggctgaggcacaagaatcgcttgaatctgggagacagagattgcagtgagccaagattgtgccactgcatttgacctgggtgacactgtaagactctgtcccctcaccccctccaaaagaggtgtgcctatttcaattttttttttttttttttttttttttttttttttttaatttgagacagactctcattttgttgcccagtctggagtgcaatggtgtgatctcagctcactgcaacctccacctccagggctcaaacaaccctcctgcctcagcctctcaagtagctgggcctacaggcatgcaccctcatgcccagctaatttttttattttttgtagagacagggtttcaccatgttgcccaggctggtctcaaacttcggggctcaagtgatctgcctggcttggcctcccttcaaagtgctgagattacaggcatgagctactggacccggcctcaattttcagcaaaagtgtatgagtatgctcctataccctggtcaacattgaggttgtcaatccttaatttcttttttgctgaacttttatattttaattttatttatgtatttattttgagatagagtcttgctctgttgcccaggctggagtgcagtggtgtgatctcggcttactgcaacctcagcctactgggttcaagtgattctcctgcctcagcctcccaagtagctgggattacaggcgcccgccaccatgtctggctaatttttgtattttcagtagagacggggtttcacccgctcaggctagtctcgaacttctgacctcaagtgatccacccgcctcggcctcccaaagtgttgagattataggtgtgagccactgcctccggccgatttatttatttttatttttatttatttatttattttgagatggagtttcactcttgcccaggctggagtgcaatggtgtggtctcagctcactgcaacctctgcctcccgggttcaagtgattctcctgcctcagcctcccaagtagctgggattacaggcgcccgtcaccatgccagctaatttttgtgtttttagtagagacaaggtttctactaaaatgttgaccaggctagtctggaactcctgacctcaggtgatccacccaccttgacctcccaaagtgctggcattacaggtgtgagccatggcgcctggcctatatatttatttttaagagacagtctaattctgcggccaggctggagtgcagtggtgtaactgtagctcactacagccttgaactgctggactcaaccgatcttcctacctcagcctcctgagtagctaggacttcaggtgtgtgcataccgagctaatttctttttctcttttcttttcttttcttttcttttttttttttttttttttttttgagacagggtctcactgtatagctcaggctggagtgcagtggcatgatcacagctcagtgtagccttgacctcctgggtccaaacaatcctcctgcctcagcctcctgagtagctgggaccacagaaccaggcctggctaattttttgaattttttttttttttttttgagacaaagtctcgctcttgtcccccaggctggagtgcaatggtacgatctcagctcactacaaactccacctcccgggttcaagcgattctcctgcctcagcctcccgagtagctgggcttataggcgcctgccaccacgcccggctaatttttgtatttttaggagagacgggtttcaccatgttggccaggctggtctcgaactcctgatctcgggtgatccacccacctcggcctcccaaagtgtcgggattacaggcgtgagccaccgtgcccagccaattttttgatttttgaaacatttctgatattctgtttaactttctttttgctttggccaatctttctttctctttccttctttccccctccctaaccctcccttcctctcccctccccaattctcccctctccagttctcccctgtcctctcctctcttcccctctccttttgggacagggtctcacactgttgctcaggctggagtgcagtggtgctatcattgctcactgcagcctcaatctcctgggcccaagtgatccttctacctcagcctcttgagcagctgggaccgcaggagagcacaccactacacctagctaatttttgttttgttttgtttttgtagcgatagagtttctgtataatgcccaggctggtctggaactcctgagctaaaatgatccaccttctttggcctcccaaagtgttgggattacaggcctgagccaccccgccaggcctctttcttttctttttcttttcttcttctttttttttttttaagctgctccttgctgagcagggctaactagtaagcagtggtctgtcccaatctttctattatgtttctttttcttattgctttgtaacagctttttgtattttgtttatttcatcaaccatttcttcctagattgtaaattgtctttcaaccttacctaaagtttgccataaagaagctctgtcaatttttagcttttctttgaagattttaaaacattaattgctaaaaagacagggacaacagaaaacatgggtgggctacaaagtataaaaagtcttgcatagtcattaccattttgatccctggttgcttgcaaatgtgcttcaaatcccagcttgggcacttcctgtctgattgtagggattttttttttaatttttttttttttagagatgggcatctcaggttgggctcagtggctcatgcctgtaatcccaacactttgggaagctgaggcaggtgggtcacctgaggtcaggagtttgagactagcctggccaacatgttgaaaccctatctctactaaaaataccagaattagccgggcgtggtggcacacacctgtagtcccagctacttgggaggctgaggtaagagaatcgcttgaacccgggaggctgaggttgccgtgagctgagatcatgcaactgcactccagcctgggtgacagagtgagagactccgtttcaaaaaaaaaaaaaaaagagagagagaaatgggggtctccctctgtcacccaggctggtgcgatcatagctcactgtagcctcaaactcctagtctcaagcgatcctcctgcctcagcctcccaagtagctgggggtcacagctctgagccacctcgccaggctgcaggcaaatttcttaatcttgccgggctccagtcttccagtctataaggtgggaataacaaaatttgcatataggaatttggggaaacgtgtagttctgggtttgggtgaagacctccacttttgtagtaggttcataaatcaaatcagagcaaatagttggtgtcttaaaaactgtatttatctgggtcttctaagtaaacggtttgaggagtggtggaggcagaaattaagatttactgagtacttagggtcaagtaaggtgcactggatcgtgttaatcgttaactcgtggaaaccgcccagagtgtgtacgctttctttcttttctttccttttctttttttttgagacggagtttcactcttgtcgcccaggctggcgtgtaatggcatggtcctggctcactgcaactccgcctccagggttcaagcgattcacctgcctcagcctccagagtagctgggattacaggtgcccaccaccacgcccggctaatttttgtatttttagtaaagacgggggtttcaccatgttggccaggatggtctcgaactcctgacctcgggtgattcgccgcctcggcctcccaaagtgctaggattacaggcgtgagtcaccgcgcccggcctggagtgtgtattatcccaattttatggggagtaattgtgctcactcggctcaccaccaagtcgccagagcgcgcctccgcaaggaagccctccaggcacttctactttcccggacccgcctcccgctccagccggttacacgcgccgttagcagcgtgggcggagttggttctgccttcgcggaaccaactggtccagcttctggtgtctcccctcgctcaattaaaagccagctcctctcctttcggcttccccacggtgcctttcgggatttgtagtcagacgcgcttcagccggctctaaggagagcaaaggcaagactccaattcccagcatcccccgcgcccggagagtgcagcgtctattctcatcctcttcacttttccactcctccccttacctcccttctcttctgaattctccattctgggctcttgcctgtgaaatctttctttgctttccccatcttttcctcgcattttttcaccatctttccctcaatctccaggagccaatgcgagactttggctccgattaagcgacggcccgagactcggggtgcgcgaggaggatcgacagagtggtgaggggacctaggagggcgggagtggcagaggtatgagagagagagaggtgagtgggaggcgaagagtgagaggaaggcagggagaagctaggagatcggaaggcgtgggtcagggtgaatgacgtgaagtagacttgggaagggaaaagaggtggctttagatttgggaagcatggaggggagaggttaccgccgtacttagcagaagtgggctaagagatagaagataggaaggacgggcagatttggagcttgtagactggtctgaccaggatgggatggaagagagaggtgtgggctcaattttctttgtccctgtttagccaaagatgagacaagtcattgaaatacaaaatgatcttgcaaacactggacagttaacaattctgtcacttggtaattgagggaagactggagttgaagggcagaaatagggtgaggaggcaagaaagggagggagattggtcaggtttgggagaaaccagaggagatgagtgacatgggaaaggagaccacagaaaaggtggggttattgtggggactgatggatctggaatcagttagaaaggtcaggggtgacactggcatggatggtgaggttgcacttctgacgtttgcattcctcaggtgatggagagcaccccttcaaggggactgaaccgagtacacctacaatgcaggaatctgcaggaattcttagggggcctgagccctggggtattggaccgattgtatgggcaccctgccacatgtctggctgtcttcaggtgagaagccccttcatggcagggaaatgtaatggggtctgcggagtggaataaaatatcataggtaaaagtgtagcagcctggagtcggggtggggactgggggcaagggttggaaattgc

SEQ ID NO: 3061 - DNA, 6000 bp, Homo sapiens
gagtaaaaatagccccggaggcgaatgtgagagtgaggtggggaccacacctaagggggcggacccaagcaggctccgacttccctgggcccagggagagggaatggctgcccgagaaacccaagcagaagggagagggagacacaggcagagacacacaaagatgagagaaacaaaaggggggaaggggaaagaaaggcggcaggaaagtggagagtggggagacgtgcgtgccaacggagagacacaaacggagcggggagaagaggacactgttaaggaagggagggaggggcacagccaggaggtcccaagactgggaaatgaatgcagcagcggtagggaggggagcggccgctgcaatcagaggggggctgggtgacaccgagaagcctgctgcctgcagttttgctacccaaatgccataggaccatctctccttacccacacccgcagagagaggagagagttggggcaagtcttctacttctccaacccccaaatcccaaaatgccctaaccgagctcttctcctccgtctgatctctctcccacccatccttgtggtagctacgttaaactcacgtcttcttgccacctccccttctgtccctttccccagtcctggggatattcaatgccacccgatcacctctccagctctgcttttcaaactccgatcccagtctcctgttttgttccgcccctccaaagcttcccaatttacttgctctcactctcaggcctccctcaacacaccgtcttccctgaagcgtctccatccacacacacacacacacacacacacacacacacacacacacacctctcctactgcactactcaccctcagatcttgtagggacacatgtcctaactgaggttcccctctgtcccttctaaaccctgctgggcccccactgtcccttcaccagctcgccctctaaccccaccccagtctcacttttgggaattctcctttttctccacttcccttcctttagtctgctagaaacttgcacttttacaaacttttcagggttgatcctagaattctcattacttgctaacaagttaatgtcttcccctctcaaaaccacccctcaaccaaagagtgcacgtgggattgggggtgggagtcaaggagggaagggattggggagttaaggctggaccgggggaaaggtgagagttggcttccaggaatttgggtggctgaggagagaagtgttcttaccttcacgaacaattcgacctgcggttgttcttcagccatggttgcgtcggggaccaggaagtggccgtccctgggggaactgggaggggctgggaccggggaaggcgggtctcacactcagggactctctcccctagacccagggctgtcccttcagcacaacacaagctcaatcagacctacttgcacccaaactaggcctccccaccagcccaacgcaccccacacccagctcctccagctcggtcctctcccgggctggatcagagagccgctgactcaccgaccggccccgccctgaacctggggaggggactggaggggggcgggactcgacgatgtagggagtgagtccggaaggggaatcctcggatctcccacaggatggggatgggggtgttaaggaggagtcctgaaaacctccttgtttctccgacctctcctgaacacaggactcttttctgcctcagtttccctgcttcattaatctgagtacaacccgactgaccctcatataaaaaacttgacactaacagcttgggcacacccgtgaagattcagggatggggacttcaaatggaaaggtggtcgtttaatcattctgcatttcttccagactccaatccaaattctgggttgctgggactgtggtctgagagaagaactcggaagtggaaggctgggactgcagataggaaccgttagccatgcagcctgggattagggaaggggtgacgccagcactccctgagctgcccagactggtgtctcagtaggtcctgtgccccccgcagtctactgtctccgggcccagctcagcactaggacttgcagtccttgtggcctacacttgggattgggcataggaaatagagttaggggccgggtgaggtggctcacgcctgtaatcccaacactttaggaggccaaggggggtggatcacctgaggtcagggagtcaagaccagactggccaacatggtgaaaccctgtctctactaaaaatacaaaaatttgccaggcggggtggtgggcacctgtaatcccagctacttgggaggctgaggcaggagaatcaattgaacccgggaggtgaaggttgcagtgagctgagatggtgccattgcactccagcctgggcaataagagcgaaactccatctcaaaaaaaaaaaaaaaaaaagaagaagaagaaaagaaaaagaaagtagagttagggatgggaagggagatgacgaagtcttttgcgaaggaaacataaagccgaggcaaggggctttgttgcagggaggggtctgttcctgtagcttggtcagctttgtgcttccacttatgtttcctattggggccccttcctgtgccctttgtcctcgtctcactgacaggttgccttggagatggggcagaggggtgggattatcatggcccgatcctgaagtatgtgtatagggggtggggtaggggtgttgttagctggtcctgtcatggggataaagaaagatcagacagaatagtgggagtagagtccttggggacacctaaataaataagcagggaggacataggaggagcagctctctctccagtaaccttgatttctattaaacctttatgacctgctgaaaaaataaacccagaattccagcctccatatcctgaatttctctcctgtccaaccatcccttctctatcctcctcatcaccctctgtccaacaaaagacctacagttccagaaaaccatggtggagtgcaagaacacagaactaaaacagagcttgaaacttaaagaaagggagagacttgggggaggagtggggtggagtgacgtgatgtgctgctggaaaccagcagttggtggtttcctcttgtgcttcctcttctgtgggttttctcctgcttgtgggagggcctttttctctcctcccgacagaaaggctatctttggtgttcgttcccttgaactgtaacatcctgtaagggtatgattccatgcctctgtgtgggtgtgaattccctcatggtgaccctcaaaatctgcacacaggaccccttcccattgaggggaggggatcaaaacaactctacttctcagggtcctctcctgttccaactggtctgtgtccaagagaagccttaggtaaatggggccagcttgaagatcaaacaggtttggcagcctctcccggcctctcttttctctcctacagctttatagctacagctgccttgatatcaatattgactttggctggctggcatgactacccacagggtatcgtgccttaatttaccaggtgacaggcaacgctgccctctcctggaaccatccagcagagccagggctgtacccccaaatcctgcaacagaggtttccctccatctcacctccctgtccctgcatttctcctatctcagtagctcctctttccctctctgggcttctctttccactccctccccttcctgggcttggtaaactagtccctaatctcttcacaccccagattggaaggtgggtccctccctgacactccccagagctgtcaccaacctcctccaagtttctatagctccattgctcaacagatttgccaggggtaaccattaacccagcccttaactctgttcccccacctttcttgctggaggggattttccaattactggttagcacagctaggtcatctcacccccaccatctttcctaacttcttgggttggggggctggggaggaatctccccatctcagggtactaggaacaaagctggggaggatggtgcatttaaagggattatatatatatatatatatattttttttctttctccctcataaccccacccccgcaacacacacacacacacacacacacacacacacacacacagacgcacaaataagctttatggagcagtgacttcattatgttcaccgctttgagtccaacccctggcccaaaataggcactaaatagttgccgaatgcatgaatgatagatacctctctgtcttcaggggtgtgtagaagtgcgaaggggtatgggcatgtcccagtaggggtgtgagtgttctgatcagaactacttctctctgccagaatttgatgtaattcgaatgcttccacctctgcttgaagggtttaaataataaattaggccctgtcgtgccattatgggggtggtcataccctgtacccaggaaacaggcacggtagggctgagacagaagtcctgcttgtttccgcttatttatttgaaacaccgctcatttaggtcttactttgtttgccaggcactgttctaagctctgtataaatattaactcagagggtacaaatattaacttaagagttgttgcaggaaaaaaaataagcgcctctggctctttaagtttggcctccccctcaaaacccccgcaacggtcccaaaccccttccagggactgggactacggaccctggtccgaccttctcgcgggcttcccactgcgccaatcaaatcccagaaacagtgagtgctagaggcccggctgctaagcaacggcagagggcgggaagtttgaacgttctggacccgccccgaaggcaaataggccaatcagcgtccagactcttcagctacggcagtccgcttctcctcctcgccctgtcggatctctaggctggatccgggcctctccaatcaacagcggttaggagggcggggcgcgtgcgcgcgcacctcgctcacgcgccggcgcgctccttttgcaggctcgtggcggtcggtcagcggggcgttctcccacctgtagcgactcaggttactgaaaaggcgggaaaacgctgcgatggcggcagctgggggaggaggaagataagcgcgtgaggctggggtcctggcgcgtggttggcagaggcagagacataagacgtgcacgactcgccccacagggccctcagaccccttccttccaaagggtaacctccgcgtgacaggaatgagggtggggcgcgtggagtttcccacaatctgtactttagttaaatacccgagaattcacctcctgtgtccacagctctccacgcccctcagccctgccccgcagccctgtagcagaagtacttagtgctttgcattctgcgcgccaccctaccccggcctcctctgtgaatcgttgcttccgaaccgccctcactttttgcatccgcagagcctccaagctcatggcctccttaggagcgaacccaaggaggacaccgcagggaccgagacctggggcggcctcctccggcttccccagcccggccccagtgccgggccccagggaggccgaggaggaggaagtcgaggaggaggaggagctggccgaggtctctgaggggagtagaaacttgaatggagagttgatgggaagttagaataaaagagggttgggagccgggcgcggtggctcacacctgtaatcttagcactttgggagactgaggcgggcggatcacctgagctcaggagttggagaccagcctgggcaacatggcgaaaccccgtctctactaaaaatataaaaattagccgagcgtggtggcacgtgcctgttatcccagctactgggaaggctgaggcaggagaatcactgtaactcgggaggcggaggttgcaatgagctgagattgctccactgcacttcagcctgggcgacagagcaagactccgtctcaaagaaagaaagaaaaaaaaaacagggttgggaagagctgggcaagtctcttacctcctgagtgg

SEQ ID NO: 3062 - DNA, 6000 bp, Homo sapiens
ggggacaaaggaagtggagttgtggaacgaactcagactgcttcctgcttttttgttttctgtcctcaggactcatctggtgaacatagatcaagacacttacaggtaaagaggtggaggcatgctgctgtctctggggagggagaaggattaagtttaatgccccaataatcctaatgaggctctagtttccctaatcctggggctattaagatctctctccttgaaggaaagggaaggggggttttgagggaaagagaggaagaaaagcataaagatactagctttcttttctatagggagaaactgaggcaaagaaaagtaagggacaaaccttacatcaagatatgatctcggctgggcgcggtggctcatgcctgtaatccccgcgctttgggaggccaaggcgggtggatcgcctgaggtcaggagtttgagacctgaccaatatggtaaaaccccgtctctactaaaaatataaaaattagctgggtgtgttgtgcgcctgtaatcccagccactcaggaggctgaggcaggattgcttgaatccaggaggcagaggttgcagtgagctgaaattgcaccactgcactccagcctgggcgacagagcgagactccatctcaaaaaaaaaaaaaaaaaaaaaaagacgtgatctcaggaggatatcccctgtccccattccatttatcagtcctcaattcttattcccttcaaaagtccaagttaccccaaactcctccatttctcctcgacagtgttctacagatttttaagagtgagtctcacccctcagtgtacaaagtggccagtggactgaaggaggggctcagcctctttggtaggtgtgccccatccctcatctcacattacaaagacctaccagaaaagcaattggctccaaagatgtgtcccagcctcccttcccacttcactcccattgtcagatatctctttcatgccaatccaaatttcttacctatttgtaccccccgccccccaagcttgagcatcttcccatactttgtggctgtacagtgttgttgcatatcagccattactttaccaattctgtgttccttccctgggtttgtatgaatgtttctactagttgggtacctgttagggactttgggagaccttgtgtatagagaagagttttgtaactgcataactgcctatttgatttgtatagagtctttatcagttgtctctggctttagggtatattagggacatctccgcaaatatccatatagtttcatatctcagtaagttgtgtccaggttttttttttttttttttttgatacagagtctcgctctgtcgcccaggctggagtgcagtggtgcaatatcagctcactgcaagctctgcctcctgggttcacaccattctgctgcctcagcctcctgagtagctaggactacaggtgcccaccacgatgcctggctaatttttgtatttttagtagagaacgggtttcactgtgttagccaggatgatctcgatctcctgacctcgtgatccgtccacctcggcctcccaaagtgctgggattacaggcgtgagccaccgcgcctggccagttgtgtccagttttgtgtgtgtgtgtgtgtgtgtgtgtgtgtgtgtgagacgaagtctcgctcttgtcccccaggctggagtgcaatggtgcgatctcggctcaatgcaacctctgcctcctgggttcaagcgattctcctgcctcagcctcctgagtaactgggattacaggcacctgccaccacgcccagctaatttttgtatttttagtagagacggggtttcaccatgttgcccaggctggtcttgaactcctgacctcaggggatccactcgcctcagcctcccaaggtgctgggattacaggcatgagcgaccgcgcccggccgtccagttttttacatatgtgtgttgggctcttgagttttttgtttgtttgtttgttttttagatggaatcttgctgtgtcacccaggctggagtgcagtggtacaatttaggctcactgcaacctccgcctcttgggttcaagtgattcttctgcctcatcctacctcagcctcctgaatagctggaactacaggcctgcaccaccatgcccagctaatttttttgtatttttagtagagatggtgtttcgccatgttgcccaggctggtctcaaactcctgagctcaagtgatcctcctgccttggcctcccaaagtgctgggattataggcatgagccaccctgcccggccagctattgagtttttgtatttttggaggggcgggagggctcttgagttttttgtgttttgtttgtttgtttatttgtttcgttttgttttgagacggagtcttgctctgtcacccaggctggagtgcagtggcgcgatctccgctcactgcaagctctgcctcccgggttcatgccattctgcttcagcctcccgagtagctgggactacaggtgcctgccaccatgcccggctaattttttgtatttttagtagagactgcgtttcaccatgttagccaggatggtctcgatctcctgaccacgtgatccgtctgcctcggcctcccagagtgctgggattacaggcgtgagccaccgtgcctggccagttcttgagttttaactaggtctgctttgtgtatttttctggctaagtgtccctgtgagtgtccatcccttcccccatctccatgtacggtaatcccagctcatatttgtggccaggcaccagctttggctgcctttgtgccctcccaggccagcttcctcaacaaccagcacctctgacctggatgcctcagcttagacacataaacacattccattccctgtccctgccttgtaacaagttcactccctgccttatccctcacaggaatcctcaacagatgccactgtaagtggggagagaagctgctcaggtgagtgggtcccacacatactacacactaatgcatgaattccatatgcacactacatactaaagcctactaatggcagtatacagattctcacatacaccaccccacctagtagtagtaaagcaactgccctttactgagcactggctaactgcatttcatccttataacagctttgtgtagtagctgatatgcatctcattttttgttgtcagcgcaggtacacatatacccattgatgatacacagacttgcacacatacaagcagcaggaaaaaacacaaaatgtaaggccgggcacagtggctcacacctgtaatcccagcactttggggggccaaggtgggtgaatcacttgaggtcaggagtttgagaccagctggccaacatggtaaagccccatctctactaaaatgcaaaaattagccaagcgtgttggtaggtgcctgtaattccagctactcaggagactaaggcaggagaatcgcttgaacccaggaggtggaggttgcagtgagccaagattgtgcactgcacttcagcctgggcaacagagtgagactccgtctcaaaaaaaaaaaaaaatgctaatgtaacacatggctatgttagcatggttatctttagttatagaaaacacacttcacatttctgtgatgactctcaaatttgtgtctctagttttgaactccgtatgtgaatgttaattgcatatcaccacctgcagttttcacaggcagctcaaactcagagcatccaaactgatgcccaccagatctgttcctcttcctgcattccctttgctggttaatggcattgctggcagtacaccttctcaagccatgaaccttggattgatgctagaaacaaaaaacctgtcattccaaaacagagatctaagcatgtcactcctttttttttttttttttttttgtgactgagtttcgctcttgttgcccaggctggagtacaatggcacgatctctgctcactgcaacctccacttcccgggttcaagcaattcttctgcctcagcctcccaagtagctgggattacaggcgcccaccaccacacctggctaatttttgtattttcagtagaggcggggtttcaccatgttggtcaggctggtctcgaactcctggtgatccgcccacctcggcctcccaaagtgctgggattacaggcatgagtcactgcgcctggccgtcactccactttttaaatagcctaagtagaaagaaaataacataaaccttaggaggttttcccattaccttcaggattaagattagcatcttaagcagtataatgatgttcagggtccatcacgtttaccccagttttaatttccagactcaccttccaaagccccttctaagtcctttcctactggatctaccttatattctagtcatttagggccacttgccattatggaaacatgtcatgcctgtgtttatgctgctccttctggaaagtctttttttttttttttttgagacggagtctccctctgtcacccaggctggagtgcagtggcgcggtctttgctcactgcaacctccacctcccaggttcaagcaattctcctgcctcagcctccggagtagctgggattacagggacccaccaccatgcctggctaatttttgtatttttagtagagatgggatttcaccatgttggccacgctggtcttgaactgctgacctcgtgatctgcccacctcggcctcccaaagtgctgggattacaggcataagccactgtgcccggcctggaaagtcttttccttgttctgtacctatcaaaatcttacatccaggtcaggcgcggtggctcacgcctgtagtctcagcattttgggaggctgaggtgggtggatgatttgaggtcaggagttcaagaccagcctggccaacttggtgaaacttcacgtctaccgaaaatacaaaaattagcccagcatcatggcgcatgcctctagtaccagctactcaggaggctgaggcaggagaattgcttgaactcgggaggtagaggttgaagtgagcccagattgccccactgcactccagcctgggcaacagagtgagattctgtcttaaaaaaaaaaaaaagtgcatcctcttcaaggtgcaatccaactgttaccctttggcttttacaggtacctgtaaggagttgatgtgcaccttctttgtgctcacatagtgcttgtttatgtttttctagttgcactgtcacatcatgttagaattagcagtcagtgaatctgcttgcctccatagctatgaactctatctagtagctatacctgttacctcagtgtctgacacatggtcttgtacatagtagcactcaatgtgtgaacacaacgcaaatgtaaacgcactggtgacatcatctctaaacagagtggaaacctttgctagcctcaggtgcacaatccttcccctacctcacctcccgctgcaatatgtatcttgtaggagttaatttaggataatctctgaggtcatctccaggtaatcagcatctccaggaatcggcagggtaatttaattacccacacattcttcagtgcttcaggtgcagatctttaatctcagccacagatgggagggagagaattctcagtggagaagagagctggatttaaggtcggggaggaatgcgtattccccaaatggaatcagacagggcatgagatcatataacttgaagaatcatcatataatctaatgaactaaggacaggtgacatatttattaatatttctgtatacgaatttattttaatttattaggaaatacctctaacgtacaaaaagatgtaaataataatatagggccagatgtggtggctcacgcctataatcccagcatttgggaggctgaggcaggaggattgcttgaggccaggagttcaagaactaaaagctgtacaggcaccaagaatatgactgaatgtcacagtatgctctaaagggcactgtcctaggagtctggagacatgattttgagacttagctgttctca

SEQ ID NO: 3063 - DNA, 6000 bp, Homo sapiens
ggctggggaagtggaggggtgacccgtgccttccccgttgggtggagacgtgtctttgcaccaaggtgtgaccgagggctgccggaaaatgaatccgtgttaggagtgggggccccagattcaaatcccggctaggccactctgtttcctctgctgtgaaatgaggggaatgatggcccctccctcacagggctattgtgaggaccaaacgagataaagtgtgtgaagagctcagggcagggccggccctctgcccctaacctgcttctactgatcatggccatagggtgggcatggtggctcccctcacacctcccattcccggggccaaacacacacacacacacacacacacacacacacacacggcctgcagaggttgtctgtccctgaggacctaagtggtaacacccttgcttcccagtcagtggggccatctgccttccagagagagtttatcacctcccagattttgcaatctgtggctcaacagctcatcctcccacattcccggctgtagtggtctgggccggcccttctaccccagtatcttcagctgttggggagcccgacagggcaggctctgatgcaacgacctgaactggatccaacacccaggctggaagctcccaggtggggctgggagctaggggccaggtcaggccagcagggatgtgatgatagggaagccacaagccgcctagccacaaggcccccccttgctgcaaagggctggacagtgacctctctcagggcatgctccatcctgcactttctagggagtggggcggcggggaggagaaggaaggggaaggtgctatgccaagctggggtgcagcgagaggggagcccagcatgggaggaggggctttactggaacctgggcaggtctgtagccgccacccatgtttacactgtgggaaggggtgatgacatgtcctagaatgaggtggaggttgttgtctctagggcaggaacactgggtcatgggagcagggacaggggcagctgttgaggagggatgatgccacagagccacagcaaccgagccaaaggcccccattaactggggtcagggagaggaaaggaaaccgctgttgtgcaagccagagcatggcgagcccaggagggaaagccagagacccagaatgtgtccacgtgtttatccactcattcattcattcaccaaacaagtactggaaggctggcgctgggttacatgctgaggacatagcgttgagcaaactgagccaagtcaccatccccaaggaagagagacaggcaaggagcaagtcacacacataaatatgcaactacagctggcataagcacttctaaaaaaagggacgaggtggtggactgtgtcagaaagggcggggagggcttcctggaggtggtgacactggagctggagctggcatctgaaggatgaagaggagttaaccaggtgtgaggtggggctgaggaggtgggcaggggctgaacgctgggggtgaaatttggactttattctaaggatggagccactgaagagtattaagcagcaaagtgacgtgacttgaattgtttctaaacatcactctggggagaatggcttgtaggagcaggcttgtaaagagatgtgggagaacatgaggagctactgaagtcatccatgaccacatggtgggccaggccagggccatagagatggagaaaaggggactaatttgagaaatgtttgggacatgaaatccacaggacatagtgatggatgaacagccagggaaggcagcagtgaagtgggaagtcctcaaaggtcagtccaggctggggagggagaggccaagggggagctggccagagagagacctgcccaccaaatagtaagtgcatgcctatgagcccaaggggttttctcctccgaatggtggcatctaagggctggcctaggatgctccagtccacagaatagtgagtgccacgctggtcaggactgatttccagaagtcaggaccaggctaggccactcttgtttcctccactgtgaaatgaggggaatgatggcccctccctcacaaggctattgtgaggaccaaacaagataaagtgtgtgaagagctcagggcagggccggccctccccctaacctgcttctactgatcatggtcatagggtgggcatggtggctcccctcacacctcccattcccggggccgcgcgcacacacacacacacggcctgcagaggttgtctgtccctgaggacctgagtggtggcacccctgctgcttcctagtcagtggggccatctgccccactgactaggaagcagcagggagcaaggtgggtcacagacatggctatggaaagatgcatagcagcaggcatcttggaagggaagctgagctttggggaaacgaccatggagagaaattggctgaagttggaaaacagaaataaagtgccctatttgattgcataaggaaagtaccagttctggacggtggggccctgtgtgtgtttactgctgtatgtctcagatcacatattaagggctcgaaaatgttgttacataaatagaagaataagaagtcaatatggaaccttgctctttacaacagcagcaaaacaaacgcagaaagcaggtggtggaatgtggacaggccctcctggagacctgggggccagggcactcactggccatcttgctcaagtgggaagtccttccccctctagaacctgaagggcctcctgctcatccctgtggtggttctgggattcccagaatagggatgtgagtccagcctgatagggagaggagaggtggcgcagggctggggggaaaggaggtcataccctcttccagggccaggtaaccggagcccagcacacagctgggcagggggagggacagagcacacaagaggccatgtgccttccctggtgaaatgtgatcagtcagtcaccctgcaggggggagtcagggggcagggaggggaggatcggatccccaccccactttaaaccaggcttcagggcaccccaggaattcctgttatttctgtggggctcttccctctctgggtgtggggaggcccacgtccatccacacagtggagatgggagaggagctcagccacccgaaggcagctgggcaggtaggtagccccacacaggctgcagcctccccatcacgggaggctttttttttttttttttttttttttggagacagggtctctctgtgtcgcccagctggagcgcagtggcatgatcaattatggcttaccacagcctcagccttctgagctcaagcattcctcctgcctctgcctctgcctctcaaaatgttaggattacaggtgtgagccaccgtgcccagccaccccttgttctcttgccgctaacacatctgctgagcggctcctgctgtgctgagcgttgaagtgggcgtagagggcactgaatggacaatggctggcgggtgagggccaggagaatgggttcagtccacctgccccatcttacctctgtgaaatgagcggtgagggagaaggggccgtcctggaacatgttctccatggacatgtggaaatggagtaagtactacaccaacaggtctggagggaccagaagatgggtaagggggtcctgggggatgagtccgagagaggctgaaccagaccagtgggcaacctgggcccgagtggagcaagcagcatctctggccagagaggaggctgagcccctcatccacatatggagcagcccaggaaaggcaggtggggcaccagtgcccaggggaacttcagccagatgtccagggtagcttgatcttcctaatactggtccagggttacttggacctgaagcctgtcccctgatgaaccctgtcctttgctcccaccccctctctcccggtccaccagcctgattcctgaacatctcaggaactcgccgtctccttccccacactgccccctctcccaaccaggctaggactctcccagaggacagcatctgtctgcccacctttgagagttttaaacacaagcctgagccgactcttcctggcataaagcacctcagttcctcccagaggctgaggacagaggctggtgaggccacctcgtccctgccccatctctccccagtcccactccctgcagcttccacctccctgaccctgctcccacctgcctctgggcctctgggcctctgggcctctgcacagcctctcctgtagctagagcccccttctcaccaccctcccccactcaaccaaatgaccctgtttctccttcagctctcagccggtcagctcctccaggatgccctcctcactctctgcaaagtcctctattctctcaccagacacttatcctggagttgccctctgacttgctgagccccccagctgtaatcccctgacactgggggtgcttggtcagccctagcagggggtctcaaaaaatgcttgttgatggcctgattgtcctcagtctaactgactgttgactgatggaacgtcttgccgcctgactttccttctctggcagccacagtatggggtaagctgcagtgaggttcttgcagagaggatggggcaagaagcccagcagaagggagagcatgaaccccccaacccgagactcacccctttccttttgaattaggaatcaaaaaataaccagggccttggggtgatgggcccttggtgcccaggtcctgacatctacgtgggcagctgagctgaactctcccctgcctcagaccagtcctcctttcctcctcccctcttctctctcctcctctttgtcccctcccttccagcccctctggccctgccccagagcagcagaacacccagctgacagctggacatgccagtccccaccagcccttccccagagggtcaggtgacccttccctccccaggccacggcagcccggccctcccgggcagacctcccgcaccagggctctggtgaacagcaaatgctccacgctgggacgggccattgcctgatgcctgtacatggtgggcactgagagacaagattcctgggccctgccttccatacactccccacgatctcggaggaagctctggtgagtgctgccttgtaggcagggatgggcagggccagcctctttgacggggcctgactgaggggagagagggtctcgtgttcacagggcctgtctgtaccctggggtcttgtctccattccaggctggccaggagtctgccccacggaggtgccagcgtcttcgtggaggtctgtccatctgtgtgtggcgggggtggggtagggcgttgggacagttcagtgtataggaattctggcatctgttcctctttcatccctctcccttctcccaggggaattccacccctccccttccaggggtgcctggagccctctcacttcagggtggactgggactacagaggaagctggggggaggggcaagtaccgggggctgcgttaacccttaacagaggccggtgtccaagaaacgcgggcagcatcccctgggcacaggaacagcatgtcctagcccagcagccccagctttccacgggagggggcaggaggccggcaccaggctggatgacatcagcatctacagcagctgcctggggcctggtgcagggtggtggtagaccacgggatggcggtcatgggggtgggagacatgtctccaccaaacggtggtccctgatgccctgggcagtggtggagtcttggcccccacccatgactcttctaggtaccctagtgaacctgagaactgagcttgccttgggggccttaaaccccccatgccaggccccttcccctgaaattctgatcccatagggagggactctgccttctacatttttaaaaagctacccatttattttttaaccttttattatgaaaaacttcaagcatacaaatagagggaatgatctcatgcacacttgtacatcctgcgcctgatttcagcagtggcccgagttttgtcg

SEQ ID NO: 3064 - DNA, 6000 bp, Homo sapiens
ggaattagctgcaattccaagttcctaactccaccttcccaaagggtttactacacttgatctatgcaaagtgtatttgggtaaagggagggataaagaaggaggcctcgtcttcacccaggagatagtcaggcgtgttctggagacacctgtgaacgctaatagctgcatcaacaaaattactgaaggaaacactaactcgagtgactcttacagaaggggaagtatttaagctgtgcatgggaagaacagggttcctcaggaggagaaaaaagagggtgtcccaggcaaagagagatggaagtgaggaaatacagttgacccttgaacaacttaggggttaggggcaccgaaccccatgcaatcgaaaatccatatagaatgttgttgttgctgttgttgttgttgagacagagcctcgctctgttgcccaggctggagtgcagtggtgcaatctcggctcactgcagcctcagcctcctggctcaagcaatcctccccagtagctggtactataggcgcgcaccaccatgcctggctaatttttgtattttttgtagagacagggttttgccatgtttcccaggctggtcttgaactgctgaggtcaaacgatccacccgcctcagcctcccaaagtgctgggatgacaggcgtgagccaccacacctggccatgtataacttttgactcccccaaaacttaactaataacatgccgctgaccagaaccctttcggacaacataaagtcaattaatacagattttatatgttatatgtattatataacataatatgtattcttacaataaagtgagctagagaaaagaaacgttaaaatcataaaggagaaaatatatttactattcattaggtgaaagcagattaccataaacgacttgatcctcattgtcttcacattgagtagaaggacgaagaggagggaattggttttgctgtctccaggatcttgtctgcgtataagctgccccaggcaattcaagcctgtgttgttcaacagcaactgtactggcagctgggccaccagttggaagtttcccaaggggagcgctcaggactggatgtgataggagatggtgtagatggaggtttattgtgtgacaggctttgtatctcgtaaactgcatgaggcagggactcttactatcctcatactgtagaagaagaaactgaggggctgggcacggtggctcacacctgtaatcccagcactttgggaggctgacggggaggaactcttgagcccaggagttgagaccagcctgggcaacatggtgaagccccatctctacaaaaaatataaaaattagccaggcatgatggcacacgcgtgcagtcccagctactcaagaggctgaggcaggaggatcacctgagccccaggaggtcaaggctgcagtgagcgtaatcatgccattgcactccaacctgggtgacagagcaagaaccctgtctcaaaaaaaaaaaaaaaaaaaaacaaaaaggccgggcacggtggctcacacctgtaatcccagcactttgggagggcaaggtgggtggattatctgaggtcaggagtttgagaccagcctgagcaacatggtgaaaacccgtctctactaaaaatacaaaaaaattagatgggcgtggtggtgggtgcctgtaatcctagctacttgggaggctgaggcaggagaatcgcctgaacttgggagatggaggtttcagtgagcccagatcatgatactgcactccaacctgggcaacaaatgtgaaactccatctcaaaaacaaaaaaaagtctggtatagtggttcacacctgtaatcccagcactttgggaggctgaggtggttggataacctgaggtcaggagttcaagaccagcctggccaattttgtgaaaccccacctctactaaaaatatgaaaattagctgcacgtggtggcatgcacctgtagtcccagctactcgggaggctgagacaggagaattgcttgaaccccagaggtgggtgttgcaatgagccgagattgcaccactgcactccagcctgggtgacagagcaagactccatctcaaacaaacaaacaaacaaaaaacccaaaaaacaaacaaaataaaccagaaaaatgaaaggaggttcccagggccgctgctgttgctggctcagagactgagaagtacagaaaggggccccttaagatactttactgccatctgctggaagatagaataaatgtaaaagctacactatgatgctagtggtgtccgcttagatgcggggctttggtgctgtgtacaacctgcccaaccttatgtgtcagccttgagtgccccttgttcttggggtaacaggttttgaaggtgatggtcgtcgtcttctctctcatagccagatccgatgccggttcttcgtgcgagggaatggccgctgccccttcaaatctgagtgtatctacctgcaccagctcccagctaaggctgggacctccggtcctccctggcctgagagagtgcaactggcctctgggagtgaggtggtaaccgcaggggtatggggcaggggaggctgctggtcatggcttataataaatgtttgtgataaatatgaaacctatggatggtatctatgatgctaatatggtgcctacttagatgtggcacctttgtgctatgtacaatctgcccaaccttatatgtgagtcttgagttcctccattcctgaggcaaccagtgttgaagttgatgggttttcactgatttttctctctactcccaggtgctgggcccagcattgttcctaaggggtgctgagccagaggacaatgtgctcttcacagacggtgccctggccatgaccttctggggttcagaactcctgcaggaccccaacagttcttaccatggccttctgtaatcaggatcaacttgaggaaaattggggtgaggggaaggagtttctaggtggtaggtctttcccttttagggtttggtgggggggcaaaagtagcaagccctccacccccatgaactgcagcagtgacacagctggggacatggaggaatgggggagggctcctggaatgaggaaggttcaaaccctcttgccagggccttggtttttaactttgctcttttgtagaatgactctgaaagaaaaccaataaaatgcacctaagttatcattgctggtgtctgaagagtggtccgctcatagcccagccccactgccaagtgcaataaggctgcttctgcattcaatctgttgcaatattacttgtcacttagcttctggaaaacttcacagtgcatttttgcattatgaaaatagtaataacctcatgaatcttgtgaaagggactcggggatccaccagggtccttgagccatgtttagaacttttcctccctgttccctttcaggtggccagaatacagaccttggtgggtgggagccacagccactcagagtaaagctgtaggtgaggatgcacagggcattgcaggctttttagcattcttggccctgcctgctattcatcaggtcccactcctctaacagcttgtcattcgaagacccaaaacatcccctgtaaagttagagctgcttacctgaaacagaaggtgtctggaagaaacttctttcttgctattttggcatttgcaaagcagccattatctaagaaatatcactagtctttcccgacatctcccttgaaatcattttggctcaaatggagatcagatcaagctcaagatactcccatggctttccatactattcagagtgaaagcccaactcctttctgtgacctcaggcctcttaagatctgacctggttcccactctgatctcaactcctattactatccagcaagtgccctccgttccagccatgcttttgccccagagcccccccgccctccacagggaggactgaaatggtcttctcacagacttctatctggcttgccaacctcatcttcacattcatcttgcctgaccaccctatttaaaagcacttcgtgctgtgtgtcggtgttatgttctttttgaacacatcacaaacattgtttaattagctttccgtctctccccagttgtgtgacaatgagggccaggatctttgttttgttcccagtatccccagtccctaggtgctcagtaaacatttcctgaatgaagggctgtgtgtggcagcagagctgggacaggaaatacaagctagcccccaaagcaaggtttaggaggcactgtggggctcttctcgcttatttcctacgctttgcagtgatcccacccttggctggaagccaagttctccagcggacttccttaaactgaaccctaggaagtggagccacacctggccccctataaacgacccagagcaaggttactgcttggtctttgggaggaagttcagaagaaagtctttggccgtattaatagtgttaggttttactgtgaccatgtcattctcagggatgtttgtatatcaaatactatttctggagaggactgaaacccaaatgatagcacttttggcctgtggaagagatgaagctaagtggggtggtaaattgtggtcaaattctatggtgaagtccatgacaagcaacatgccgtcagcgtaaatacagcgcgggtcctctagcacaacagaacccctgacatccactccattccactactttggggagtgatgaagaaagggagagggttggggtcgtcagcggcggatccacccctccatcaacccccgcccccgccccgctccaggctccctggcccgacaccgcccacaaactaaccacttgttttgtccacgccccctcccatgggcacgccccaggccttggccccgcccacctactccggctggacttgtgcccggccctgccccttgcgaccggccctcgcgccggcctcacgttcaggctccgcccccggccgcgcctccctccttccctttccgacagcgcgggaacggctgcggcttcgggcggccgggtttctccggtctcccaacgccgaggagagcttgtaacaggcgctggagctggcccgccaccgccgcgtcagggacggcgctggagtcctccgttcccctcagcctctgagctgaggccccacaccagagtagggggcggcgcggcacccgtgccccggcatggcgacaccggacgcggggctccctggggctgagggcgtggagccggcgccctgggcgcagctggaggcccccgcccgcctcctgctgcaggcgctgcaggcggggcctgagggggcgcggcgcggcctgggggtgctccgggcgctgggcagccgcggctgggagcccttcgactggggtcgcttgctcgaggccctgtgccgggaggagccggtcgtgcaggggcctgacggccgtctggagctgtaagtcctcgcccgcggccccttagcaggtatgggaggcggggggctgtcgggggaacgacacacacagaggtgaaataagccccttcagcgacggcctgccgcgcaccctatgagcaggggcacccttcactgagcacttgctgtgtgcgggacatcgaggatccgggaactcgaggcacacgccttctgttcgctgtaaggtatagtgatgataagtggaggcaaatcacttttgatcgcgtacttccatctctaaaaaactggactcgtacgtccagtgtaagtatacttatgtataaagtgtacacatgtgttaaaatacgtacattttaaagtacaaaaatagatacttaaaacgtgatggtggaatacgtatccgctatcctggtggctgtatgctctgcttttcaaagcataacgttcactttaaggcaagattgctttctctaagaatggtaactgtgaatccatattttagtgttcttgataatttctggctcttggatgacattgaactttttttttaacctctctgtggctgacgaaggattcctactaggagcagaggt

SEQ ID NO: 3065 - DNA, 6000 bp, Homo sapiens
gtccgggagggaggtgggggggtcagccctccgcccggccagccgccccgtctgggaggtgaggggcgcctctgcccggccgcccctactgggaagtgaggagcccctctgcccggccagccgcccagtccgggagggaggtgggggggtcggccccccgcccggccagccgccccgtccgggagggaggtgggggtgtcggccccccgcccggccagccgcccagtccgggagggaggtgggggggtcagcccccctgcccggccagccgccccgtccgggaggtgaggggcgcctctgcccggccgcccctactgggaagtgaggagcccctctgcccggccagccgccccgtccgggagggaggttggggggtcagccccccgcccggccagccgccccgtccgggaggtgaggggcgcctctgcccggccgcccctactgggaagtgaggagcccctctgcccggccaccaccccgtctgggaggtgtgcccaacagctcattgagaacgggccatgatgacaatggcggctttgtggaatagaaaggcgggaaaggtggggaaaagattgagaaatcggatggttgccgtgtctgtgtagaaagaagtagacatgggagacttttcattttgttctgcactaagaaaaattcctctgccttgggatcctgttgatctgtgaccttacccccaaccctgtgctctctgaaacatgtgctgtgtccactcagggttaaatggattaagggcggtgtaagatgtgctttgttaaacagatgcttgaaggcagcatgctcgttaagagtcatcaccaatccctgatctcaagtaatcagggacacaaacactgcggaaggccgcagggtcctctgcctaggaaaaccagagacctttgttcacttgtttatctgctgaccttccctccactattgtcccatgaccctgccaaatccccctctgtgagaaacacccaagaattatcaataaaaaaataaatttaaaaaaaaaaaaaaaagattctttcactcaacaacaatcaataaggtagacttctgtgaccaaatgtgtgaggatttctccccaccaacaaacaagcaatcaattctgcagcagacaccaagtgggtatcctccaattcgagtctgacattatctacctggagaaagcgtcagatctcacaggttgatggctcagtcccacaagactgccccctacttctgatgccaatcacaagccacaggttgttttacctgtgcttctaactgactggatataaattgggaatctcatgagcccctctttgggttcagttaatttgccagagtggctcacagaactcaggtaatcaaatttactagtttattataaaggatatacagatgaagagatacacatggcaaggcatgccctccctgggaacaccactctccaggaacttccttttgctcctatccagcagctcttcgaaccctctcctcttgggccttttatggaaacttcattggataggcatgactgacatccgtgtagaaatgtgactggacaaaaaagatatgatctaatactaatagactggggaaacccagcaaggcctgtccagattcttcctggcctctctgggtagcattcctttctccagggtatggggtaggaactcttctgaaatgaaagtcttatgacccataatcagaaaggcaggggaagattagagtcctgctttgggcaggtgaaaggagggcagaaggccagagagagattctgttttctgaggcttgcttcaagagctccaacattataacgaaagctaggggagttatgagctaggaaccgtggacaaaaactaacatacatatatcacaatatcacagatactcaacctgtactgctggcataaggataaattagtacaattttatgaaggcaataggtattaaaagctttaaaaatacttatccttaaaagaactaaccacaaaatacaaacatagccaattggcacataaaaataggctcaccatcattagtcatggggaaatggaaattaaaatgcacatcaccaggggaagagaaccaatacggaatcagttgacagacaaatctcaagtataaattcagagaaaagagaaggagaaaataatatataacatcatagcattcatgaaaaatgtcaaccttttactctgaaatacttttagacttacagaaaatcgcaaaaatggtagagttctcctactcccagtttcctgatgttaacatcttacttaacacaattaccaaaatttaaaaatgaacattggcatattattaactacatactttactgccccccaatctgtggcatttcctcggttgttccttgtttttcatgaccatgacacttttttttttttgagacaaagtctcgctcttgtccccccgccaggctgctttaaatactactgatatttgacttccacaactatatatactaacttaattggtatgggtatgacctgggcatgagttttttgttgttgttgttgtttttgagttagagtttcgttctcgttgcgcaggctggagtgcaatggcacagtctcggctcactgcaacctacgcctcccgggttcaagcgattctcctgcctcagcctcctgagtagctgggattacaggcgcacgccaccacgcccggctaatttttgtatttcgagtagagactgggtttcaccatgttggccaggctagtctctaactcctgaccttaggcgatccacccacctcggcctcccaaagtgctgggattacaggcgtgagccatcgcgctcggcctagcatggggatttttttttttcctagacagagtctccgtctgtcacccaggctgaagtgcagtggtgagatctcagctcactgcaacctccatctcccggtttcaagtgattcctctgcctcatccccattagctgggactacaggcgcgtgccaccccgcccggctaattttttgtatttttagtagagacggggtttcaccgtgttagccaggatggtctcgatctcctgacctcgtgatccgcccgcctcggcctcccaaagtgctgggattacaggcgtgtgccaccgcgccaggccggggatttttaaaagctctccaggtaattccaatatgcagcagtttgggagccaagacctaaataagacaatcgaaacaccagcaatccatgatttaaatacgagaaacacaggttatacagttgagtgagcacccaactgtattctaaaaaaagtttttcaaaaactaacattcaccttgaaaaaaaaaacgtcttacaactgcaaagcaggaaggtgagtggaaagaaaaataattaaaatcagagcagtcaaagcattaattccttataaattccaatcgaccacgcctaaaacaggcagaatgtgatactttaaacatttacaagttaaaactataacatgccagaagtccctctactttgaagtggcttttcagtagtactggaacagactgagccaacaaatagtattgtaacacaaaaaaacacaggctaagcaccatattagatccaaataccagaagtggagcaagaataggaagcagtgatttatgttcagcacacaatttactaagcacacaatcacaaaaacagacatgcagactttaacagataataaagctgttgaggttttccgtttatgtatttactggagaaagcaagagctttatttatttatttttgagacggagtttcgctctgtcgcccaggctggagtgcaaaggcgcgatctcggctcactgaacctccgcctcccgggttcaagcgattctcccacctcagcctcccgagtagctgggattacaggcgcgcaccgccacgcctgtataaaaatactaaaaatgcaaacataatttttgtatgtttagtagaaacggggtttcaccatgttggtgaggctggtctcgaactcctgacctcaggtgatccgcccgcctccgcctcccaaagtgctgggattacaggcgtgagccaccgcgcccggccaagagctttataaagatggaaaatgaagaagactttctgcccaagccatgcttttggataaggattacactactttgaaaccttatacatagcacttggccaattatcaaaactgcacaaaccttcactgattgcaattattccctttaaacatctcgagttaccccaatccgcacaaaacaagtttagtgcccaccaggtaataatacatccaggaaagtaattccaagagagaggtttaacaactacagggaaaaacatacttttttctacaagaaaaatcttagaagacagtaccagggccttatccctgttagcatgatttatatttcacgcaaccttggcccagtcactgctacattataaaaccaatagccaaggcaacatagaaagtctgaacacagtgacagcgaacggttctaaattttcttaccaaggtaacaaacacctggcaaaactgccagcagcggttgccgaaaatgctgggttcggtgcctactggaaggaaaatggaagggctcctgaatatcttttcgcctttctaggagcggtccagtgagtttcgagcgagatttattccctgtgacgacggagaaaccgagaagggatcgtaaaggatcctgcccgggcaaccgtccccagcagggatcagacgagagcggcgcgcccagcaatgcagccgccagactgaggtctgacagcgcgcccgctgcgaagggccgttgacgcggctgcgcaccgcggcccttccgcctcccgccccgcccacctaggctcaacctgcacacgggagccgccacttccgcgggcgcgtgcgcagtggcgggccgggcgcgtgcgcagcgccggcttcttcccagcgcgagttgctgctaacgctcctcctccagcttcccacccccgccgcccgccgcggcccggtaccaacgggtggtctcgccgagggagctgtcgtgcctcgtggtcccgggactgcagtggtgtgcgctctcggcgcgtggcgctaggcatggcgatggatcaagtaaacgcgctgtgcgagcagctggtgaaagcggtgacggtcatgatggaccccaactccacccagcgctaccggctggaagccctcaaggtagctggggtcctggcgtcctgggccggtcccgacaccctctcccagccccagcagctccggcgccgcctgtaactggggtagtctcccgcccacgcggcccctggacctcctttcccaactccccgggaccttcccctcgcggccctccgcgcctctcccaaatcgccgccttctctactcgccgctcctgtcctttgcctgggacactccggtccctatgctgcttctcatctcgccgcagcttcccacagccctctcctccccctttcctcgcttctgtgcactcttgtccgcaacatgaccctcgcccattttcattccccaagcccgacatcccctcgccttcccgaggcgcacgtgtagatcccgcccccaacaccagcttcgttctttatggtctctcctgcactaaacgttttcctgctggcccactcccctggccctgaccgagctccagcccctctggtacccttatgcttatatgctttaacatctcgctaactttcgtttgtgtcttggacattttccggggaaattctcgcacccctacttctcccatgtttttgagtgtaatatttttaggctattttgcgcaaagataacttctaccacttactttgcattttaacaagggcactttggtttcctgaaagtagtttgcgtgagacccgaatgctctgctcttgggactgacttatgttgcagtttgggggtgttaatacaattcaagcttacttgcccataaaacaacgtgtgtgggctgtgagaaatggccatttaggagaaaatacttgtgctgtacatttttaaagtgatgttaacttcaaaaaagagagtga

SEQ ID NO: 3066 - DNA, 6000 bp, Homo sapiens
tttacaaaatgaaaagattctcatattgattgtttcagtttgcagaaggccagggaggaagagtatagaaataaggagtatagtgagtagctggtaaaatggaagggtatgaaggggcaaatgaatattttaccaatagttctaacactagaagacgcagaagtattagaagatcccatctctcatgtctgttatttaaaaaaaaccaagaaagaaaaaaggctacaattttgaacatgtttaaagtcatattctgttttgtgtttaaagagacagtcatccagtcatcacacctgtaatctcagcattttggaaagccaaggtgggaggattgcttgaggccaggggtttgagaccagactagcctgggaaacacagtgagaccctgtctctctaaaaaccaaaaacaaaattagctgggcatggtaccacatgcctataatcccagctacttgggaggctaaggcgagaagatcacttgagcccaggagttcgaggctgcagtgagctatgatcatgctaatgcaatccagccggagcaacagagactctgtctcaaaaaaaaaaaaaagtcatattctaatacttgaaacaaattcattctgcatacttaaaattctgcatgtttttcatcattagtatcacatagtagttgtttggaataaaagaaaatagtgtttcaatctaatttagatctaagaatcttattgatttgttgaaaatatttaatcccctctgccctgtctttataatttaaaaaatagaagtcaatacataagcatgattaattaaacctagtaagagacatatgctgaattatgctttctgcttttgttttgttttgtttttgagatagggtcttgctctgttgcacaggctggagtgccatggcaccatcacagctcactgcagcctggacctcctgggctcagaaaatcctcccacctcagcctcctgagtagctgggccacaggcatgcgccaccacgctcagctaatttttgcatttttggtagagatggggtctcactgcattgcccaagctgctctcgaattcttagatgcaggtgatcctcttaccttggcttcccaaagcgctagaattacaggtgtgagtcactgtgcctggcctaaattatgatttcttgtgctgtctgacctatttagaagcagtgaatttttacacaaactccctattgaagaagtcacgctttgcctaaactaccttggaaacatgtctcccaaccacccattccttacatttgcaatcagctccatgacactgttcttcagatacaccttctccaatcgagacatgccgttccaccgaaacctgaccaccaaaatgcataaagtcaatagaaccactttagaagtcttgtctttacaagagaatagcatggatttctacatttgattacactggagatttcattaagaaattatacttttgattttgtacctgtcaatgaatgggcaaaaatgatctacatttaaccaaaatactaacacaaaaattcttgggaaaaggttttatatatgcagtggtccattaactggaatccgcacaagatttgtaccacacgtcagctttgcctcatgattttattgatgggccaaaagtgaatatacatctaggtcaactgcaacaatgtacttgcttttcagaaaatgcagttttgacatcagtcattttctgtgctggcttacaaaacaattctggaaaaactatggctaagtcttaaaggctacctcttctgataggtgttgagggtaggacaatcaagttaggatgggttttcagttattctcatacaatcctgctttggatgtaccacccagagaaggcacacaaactcagaaagacagagagaaaaaagaaagccacagtgcctaatcagagattcattgacctatacattgcattactctaaaaaggcttcgagggctaatgacatatagtcagagctcagtaagtattggctaaatggcaggtaatatttgttgaatgggtaatatgtaccacacactttacatggatgaagaaactgaagaaaagaaaggttaaatcttgaatgagagctcctgtgaggttctgataacatctaggggatcattcctctcttcttggagattgctcttctctactcacctaaacagcatctctataggttatataagatataaagatctgttctctcagacttcagtggtaatgtccaagagctccttacttgacaacgtgttccaggatctgaaggccaaaatgtctgacgatggcaacttgtgttttctcagccaacctcaagccacaggggacacagataggacacttttctttaaactcctcacaaaactgaaagaagaaaagttagtgtttcctttcgagggctgagagaatagggactaaaagaatttcatcttaagaaactccaaccagggccgggtgcggtggctcacacctgtcccagcactctgggaggctgagatgggtggactacttgagtctaggagtctgagactagcctaggcaacatggcgaaaccccatctctattaaatatatatatatatatatattttttttttttttttttgagacggagtctcactctgtcgcccaggctggaatgcaatggcatgatctcggctcactgcaacctctgcttcccaggttcaagcagttctcctgcctcagcctcctgagcccatgtagctgggactacaagtgcacgccaccacacccagctaatttttgtatttttagtagaaacaaggtttcatcatgttgaccaggctggtcttgaactcctgacctcaggtgacccacctgccttggcctcccaaagtgctgggattacaggcgtgagccactgtgcccggcccactaaaaatatttttttaaattagccgggcatggtggcaggtgcctgtaatcccagctactcaggaggctgaagtggtaggagaatcacttgagctcgagaaatcaaggctgaagtgagccgagatctcaccactgcacgccagcctggacaaccagagtgagaccctactcaaaaagaaactccaacctaagctatatgtttaaagttgcaaaacctagatcaatattatgtggatctccaagcacagttgctttaaaaatatatatttaatataaaaataaaaatataaaatatataaaagttacacatatataacatttcctccaagtggtgttcactctattttatgtgtatatattatatatatattatgaataaagaactgataaacattccttccagcgtgatggttccagattttttccatgctacggccaacagtagccctactagtgttggaaaaaaatggacacaaaggaataagaaattatttgttagagacatccccctgacgtacataggggtgaaataacaatttctagggtttcttttaaaaaccttcgaggcagggagagaggataggcggtggaaaaagtaaatgcggtaaaatctttgattgctgaatttaggtgacaggaacatgcagaatcactgtcgtattctctccacttttgtgtctattttaaatattaataataaaaaccaaactaatggaacccaattgtttctgattccaaaccctgtggcagacatctacatattgtaacatttcctccaagtggtggtcactctcttttttgaagttaacatcactttaaaaatgtacagcacaagtattttctcctaaatggccatttctcacagcccacacacgttgttttatgggcaagtaagcttgaattgtattaacacccccaaactgcaacataagtcagtcccaagagcagagcattcgggtctcacgcaaactactttcaggaaaccaaagtgcccttgttaaaatgcaaagtaagtggtagaagttatctttgcgcaaaatagcctaaaaatattacactcaaaaacatgggagaagtaggggtgcgagaatttccccggaaaatgtccaagacacaaacgaaagttagcgagatgttaaagcatataagcataagggtaccagaggggctggagctcggtcagggccaggggagtgggccagcaggaaaacgtttagtgcaggagagaccataaagaacgaagctggtgttgggggcgggatctacacgtgcgcctcgggaaggcgaggggatgtcgggcttggggaatgaaaatgggcgagggtcatgttgcggacaagagtgcacagaagcgaggaaagggggaggagagggctgtgggaagctgcggcgagatgagaagcagcatagggaccggagtgtcccaggcaaaggacaggagcggcgagtagagaaggcggcgatttgggagaggcgcggagggccgcgaggggaaggtcccggggagttgggaaaggaggtccaggggccgcgtgggcgggagactaccccagttacaggcggcgccggagctgctggggctgggagagggtgtcgggaccggcccaggacgccaggaccccagctaccttgagggcttccagccggtagcgctgggtggagttggggtccatcatgaccgtcaccgctttcaccagctgctcgcacagcgcgtttacttgatccatcgccatgcctagcgccacgcgccgagagcgcacaccactgcagtcccgggaccacgaggcacgacagctccctcggcgagaccacccgttggtaccgggccgcggcgggcggcgggggtgggaagctggaggaggagcgttagcagcaactcgcgctgggaagaagccggcgctgcgcacgcgcccggcccgccactgcgcacgcgcccgcggaagtggcggctcccgtgtgcaggttgagcctaggtgggcggggcgggaggcggaagggccgcggtgcgcagccgcgtcaacggcccttcgcagcgggcgcgctgtcagacctcagtctggcggctgcattgctgggcgcgccgctctcgtctgatccctgctggggacggttgcccgggcaggatcctttacgatcccttctcggtttctccgtcgtcacagggaataaatctcgctcgaaactcactggaccgctcctagaaaggcgaaaagatattcaggagcccttccattttccttccagtaggcaccgaacccagcattttcggcaaccgctgctggcagttttgccaggtgtttgttaccttggtaagaaaatttagaaccgttcgctgtcactgtgttcagactttctatgttgccttggctattggttttataatgtagcagtgactgggccaaggttgcgtgaaatataaatcatgctaacagggataaggccctggtactgtcttctaagatttttcttgtagaaaaaagtatgtttttccctgtagttgttaaacctctctcttggaattactttcctggatgtattattacctggtgggcactaaacttgttttgtgcggattggggtaactcgagatgtttaaagggaataattgcaatcagtgaaggtttgtgcagttttgataattggccaagtgctatgtataaggtttcaaagtagtgtaatccttatccaaaagcatggcttgggcagaaagtcttcttcattttccatctttataaagctcttggccgggcgcggtggctcacgcctgtaatcccagcactttgggaggcggaggcgggcggatcacctgaggtcaggagttcgagaccagcctcaccaacatggtgaaaccccgtttctactaaacatacaaaaattatgtttgcatttttagtatttttatacaggcgtggcggtgcgcgcctgtaatcccagctactcgggaggctgaggtgggagaatcgcttgaacccgggaggcggaggttcagtgagccgagatcgcgcctttgcactccagcctgggcgacagagcgaaactccgtctcaaaaataaataaataaagctcttgctttctccagtaaatacataaacggaaaacctcaacagctttatt

SEQ ID NO: 3067 - DNA, 6000 bp, Homo sapiens
gatcagtttaaagttcagtgctaaaaggatcttaatgtacccaaaacatgatgttgaaaagggaaaaagtgcttagcagacaagctatgtagataaaaacaggaagatatgagctggaggagaaaaatctagacaaaattagtaagcagaagtagtcttataaaccagcatttgttctaaatgaaacgttttaaatgacaataggggatttttcaagaatgcttaaaccacataaatgtaacaaatcccactcccactcttaaaggagttctttggtttaatggctaaaaccattactgtatgttttctaaccaattactgcattaagtataattctgattccaatgaggagatgtgcaaatctatagtacagggtttaacatgtggtccataaaagtatgattatgccttttaacctaattactgctttttctactaaaatatatctattccttgtcatgaattgattatactttttaaagacctaatgcgctcagggaagccacttggtcaggagagcagataatctgagatttatctcctaaatttcaaaaacaagagtttgaggcatgattgcctccctcaaggaacttaactaccatactggagagacagaatccactgtcatcttctacacttctctcccttcccattgttccgaagactgccctcttgccttgccaagattgcctcagcagcctaactcatctccttgcccctagttttgccccttgcaatatatttttccaaaccttagctgacatgcaaatctgatgtcactctacagtttacaactttcagtaactccacagtacccttaagaatgaaatccgtattctttaatgaagcttaacactccctcattactgcttatctttttttttttttccctgttgccaggctagagtgcaatggtgcgatcttggctcatcgcaacctctgcctcccgggttcaagcaattctcctgccccagcctccagagtagctgggactacaggcgcacaccaccacgcccagctaatttttttgtattttcagtagagacggggtttcaccatgttggccaggatggtttcgagctcctgaccttgtgatccgccctgcctcggcctcccaaagtgctggaattacaggcgtaagccaccacgcccggcctactgcttatcttttacctaaactccttccgttactctccttaccctcttttccagacccattgagcttcctgtattctgcttccctaatggatcactctttcctttttctgggcctctgcatatgctagatcttttacttagaactctgtgtctattctcccaaactctcccccaaattttctttccaaggcctctctactaatactctaagctgtagctcaggtgtctttttccttcaggaagcctatcttgaaccaccattccaagtgcagagtcccctaatatttcatagttctctgttaaaatcaagtcatttgacaccactctgcttttacatagattatcagcttgctcttcagaaaaataaggctgagtgcattactgctaaggacagatgtagaggcaatgaacctcactttgatacagttgagtaagttgaccaaaatctttttaaaagaaaggaaatatttcagaattactattacttcttggattaaatgtcaggattcttcctgagccaagttcgtaccactgcactccagcctgggcgacagagcgagactccgtctcaaaaaaaaaaaaaaaagaaatatcaaaattaaatgtttaaatagcagactttgtaaggtagctctggcctgtactgacaacctgtggtaaatatcaaaaacacagccctttgtaatcactgttctgtgttcaggatgttcatcttttcagcagatgtttatcgcatgcctgtatgtgctcagccctagaggttgagaggagcagcaccttcagaacatcaggcctaccttcgaaatccttggaaaatactttttattgaattgtttgaaacaaaacatttcaaaagttaaatctgcacaatgatagatgcaggttaattaatacatttattgggctgggtgtggtggctcacacctgtaatcccagcactttgggaggcaaaggcgggaaaattgcttgagtccaggaatttgagaccagcctagacaacataatgagaccctatctctacaaaaaatttaaaaagtagccgggtgtggtggcctctgcctgtagtgccagctactcaggaggctgaggtgggaggatcacttgagccctggaggtcaaggctgcagtgaactgtgataatgccactgcactcatcctggctgacagagcgagactctgtctcaaaaaaaaaaaaaaagaaaaaaaattttaaaaatacatttgttggaactcttggttactgtaaatttatttggaggcaacctttttatgttggagaatagagtgactaattcactctagtgctctatagcagagaacaagaaattagtactctttgaggaatttaggtcagtctttatagagaccataaaggaatcttgacatttaatggcttgaaggttctccataaaccactaaattagaatattaaattaaaattatttttcttttcacataaggcagcattaaataataatttgaaactatctgggggaaaaaggaatcctaattggagcttcctatacaatttcagtatatctgaaatatttcttcaataaatatttatcaagcactaagtatcagcctactatatgcatgcagttagcagttttcacttgcatttacttattttaagccacttttgatttaactgaatgcatgcttttcccttgcctctcattagaaaatggaaagataagcattcttcattttacaaatgtcataactaagattatgccctactagacaactaaaactgtgattccttcagaaataaaatcatacctcaactcttctagaaccagagtcatcatttttcacatacttctacctaactagcttttgcagctcacaatcccatacatcaagtgcatttatgtgtccaactcattcatttacaaccagtttatcttgcagggtatgtcatattgctgcaaattgcatgatgtactgggtttgttttgtttttgtatttgcttacggctgagtgggcatttgattgtactgtttgtttttgtggctgtgctcagtggatgagagcttggaagcctctgtagccttttcttctatatcgacattaactcaatattgcttcttttgaccagtaaaaaatattttgggtgcattagctattttttaaaagcagtatagagaacatatatcatttatcttatttattaggagataaataaaaagtaaccattttgacatgccactttaaacatgatagttgaagagctaaaagagtaacttagttttcactgagacacggtagcgtcacttctaagactgaaacttattttcatttatgagtcctgttctgtggccataactactgctataaattccacttgtttccttgtcagaatgttccaactttttttgttttttaacctgagcacttaagctttgaaaacagcataaacatgcaaaaagagatctaatttaggaatttgtttcttttaaagagagagaatagagttatgtaaagaaatagtactgacacaggactggagggatctgggttctgggcccaacaatgtcagttgtttttctcctttgtaacctgtattttcccaagttcctcatccgatttcagagattgaaattctgtctttataacccagggagggcgcttatgaaggaatattagaaattgtaaagccttcgaatatacttgagaggaaaaaagacgattcagagataggctaccaaggtttattatctgtgtaggggagtgatatttatagcttttacgtagcttagcaaaatgaattttgcattgattataggccaaagtcctgcattctgctgccgattcagcgtcgtttgggcattatgggaaaggaagaagggaaatttcaatagtttatcgaatttagagaacttcattactcctggtgctgtcagaatcagtctcgaggttggctgctgtttggttctaggtaaatggccgagcaggggtgtagggggcagattcccctgtccctgaagcccgaagactcgtgctgcaccttcctgacagtgcacgctcacctcgcggccctccagagcccattccgtacctgagaattagctgttcgtggggaacctgggcccccaaggtgatttttcacctcgccgcgtcagaccgccagttcccagcctccgcgccggaggggcggtgctttgcggggacgcgagcccgcattggcttgcgtggccgccagggcggtgaaatgacgggcgcggggcggggccgcgcggcttgtttgtcggcgccgccccgcccccccgccgtccgtgctgactgaggcgctgcagccaggagccgcggccggctgcccagcgctcgccgcctccgcgcgtccgcagccgtccccgcgccgacatgcgcttggccgccgccgcgaacgaggcgtacacggcccctttggcggtctcggggctgctgggctgcaagcagtgcggcgggggccgcgaccaggacgaggtacctgggcgaggggctgagcgggccgctgggtacctgggcgggtgggcacccggccgagctgccctgtgcaacacggaggtcacgttgcctcctcacagtcgctcccggtcagcatccgaaaacgctccccagatagggcgggctcccggggagcagcgtcccggccctcctgcgcccctcgggggaaggggttgcctgcggtgggtgggagacctgcgcaccgtgagtcgtccctgggcagaaaatgctaagctgggagagactgcggccgcggtcatgtaaatgaaagtctccaatacgtaaataacattgtcgtctggacaagtctccacaagtcagaaatccagcagacctcgagtcttgagggtgaaacagcctgtggatatgccccctcgattgtcttgtcttgtgaaaacagattatttagccaccttcatcccctttgcctcctacttaaaagagagagaaagaaaaaaaacacatttgactcagggaagagatgatgttgcctggaataagtgtgtcctgcaagctctatgacgttatgcacagcgtttactcttgcgtattaagccatcccttttctgaattgtcctttagaaagaggtacttaattgtaacattttgtgtttttttctaagtggttgcaaataggaaaccatttgaaagttactaatgtaaccttaggtaaaactcgaaccttaaatttggattgaaatcaggtgctgtcagagtgttgccttagttcaagaaatctaaatgtgaattattttttctgcagctttactcactaaaatgacgtggtttcgtgatttctttaatggagtctattatcagtatactatgtatattcatagaaacttaaatgaagacactttgtcatgaaggttgtaaagcaccaaatatttttttgagattttaacatttatggacatattagatgttccttgtttacagataataaaacaatctttaaaaatctcttacagtatcgctttggaaactttaccaaaaagtgaaaacagtatgaaagtattgaattaacatttacagtttctgtttgcgggtcataatagatcttttctctttttgagtagaagtgagccccaatcatcatgcttgaatagatctgttatttctgctgatgtttgtgtgcagagtcctggttcttgctcagatctagaatttctaaagatagctttgtaaactaaaagataaagaaatagattttggcttgcatattgttacagcgcttatgggattgtgttgaggaaaccgggaagctttgtatagttgtatttcatttttaatacatcccaacatgtgagaagataacttaggaaggaatgctttataggaaaactatt

SEQ ID NO: 3068 - DNA, 6000 bp, Homo sapiens
ctcatatagtgactgctgctttggattctgacagacctgagttctaattccaggctgaattttacaagttttataactttggtcaagttgcccatacttttagtttctatgtcacaaatttgtaaaataaaaataattacatctgctttatacatgtaaagtgttgtgtctgatacacaggagttaacaaattactggtcttattattatcagcctagaaaacctgaccgttatttaacacattgattttggggtaaaagcaacttttaaatttaaaaccactgacacttcttggaatactacttatttacaaatattggtgatgcctcatatttctaaacagctatgtagaaagttaaaacactacatttctaaaagaggaaactctaaatgagaggaaaataccaaagacttgtcaacattcttgctcctttaaagtgatataattctaaaaattgaagaactgaaaaaaaaaaaaagtatagagcaaataagaggatcagtttaaagttcagtgctaaaaggatcttaatgtacccaaaacatgatgttgaaaagggaaaaagtgcttagcagacaagctatgtagataaaaacaggaagatatgagctggaggagaaaaatctagacaaaattagtaagcagaagtagtcttataaaccagcatttgttctaaatgaaacgttttaaatgacaataggggatttttcaagaatgcttaaaccacataaatgtaacaaatcccactcccactcttaaaggagttctttggtttaatggctaaaaccattactgtatgttttctaaccaattactgcattaagtataattctgattccaatgaggagatgtgcaaatctatagtacagggtttaacatgtggtccataaaagtatgattatgccttttaacctaattactgctttttctactaaaatatatctattccttgtcatgaattgattatactttttaaagacctaatgcgctcagggaagccacttggtcaggagagcagataatctgagatttatctcctaaatttcaaaaacaagagtttgaggcatgattgcctccctcaaggaacttaactaccatactggagagacagaatccactgtcatcttctacacttctctcccttcccattgttccgaagactgccctcttgccttgccaagattgcctcagcagcctaactcatctccttgcccctagttttgccccttgcaatatatttttccaaaccttagctgacatgcaaatctgatgtcactctacagtttacaactttcagtaactccacagtacccttaagaatgaaatccgtattctttaatgaagcttaacactccctcattactgcttatctttttttttttttccctgttgccaggctagagtgcaatggtgcgatcttggctcatcgcaacctctgcctcccgggttcaagcaattctcctgccccagcctccagagtagctgggactacaggcgcacaccaccacgcccagctaatttttttgtattttcagtagagacggggtttcaccatgttggccaggatggtttcgagctcctgaccttgtgatccgccctgcctcggcctcccaaagtgctggaattacaggcgtaagccaccacgcccggcctactgcttatcttttacctaaactccttccgttactctccttaccctcttttccagacccattgagcttcctgtattctgcttccctaatggatcactctttcctttttctgggcctctgcatatgctagatcttttacttagaactctgtgtctattctcccaaactctcccccaaattttctttccaaggcctctctactaatactctaagctgtagctcaggtgtctttttccttcaggaagcctatcttgaaccaccattccaagtgcagagtcccctaatatttcatagttctctgttaaaatcaagtcatttgacaccactctgcttttacatagattatcagcttgctcttcagaaaaataaggctgagtgcattactgctaaggacagatgtagaggcaatgaacctcactttgatacagttgagtaagttgaccaaaatctttttaaaagaaaggaaatatttcagaattactattacttcttggattaaatgtcaggattcttcctgagccaagttcgtaccactgcactccagcctgggcgacagagcgagactccgtctcaaaaaaaaaaaaaaaagaaatatcaaaattaaatgtttaaatagcagactttgtaaggtagctctggcctgtactgacaacctgtggtaaatatcaaaaacacagccctttgtaatcactgttctgtgttcaggatgttcatcttttcagcagatgtttatcgcatgcctgtatgtgctcagccctagaggttgagaggagcagcaccttcagaacatcaggcctaccttcgaaatccttggaaaatactttttattgaattgtttgaaacaaaacatttcaaaagttaaatctgcacaatgatagatgcaggttaattaatacatttattgggctgggtgtggtggctcacacctgtaatcccagcactttgggaggcaaaggcgggaaaattgcttgagtccaggaatttgagaccagcctagacaacataatgagaccctatctctacaaaaaatttaaaaagtagccgggtgtggtggcctctgcctgtagtgccagctactcaggaggctgaggtgggaggatcacttgagccctggaggtcaaggctgcagtgaactgtgataatgccactgcactcatcctggctgacagagcgagactctgtctcaaaaaaaaaaaaaaagaaaaaaaattttaaaaatacatttgttggaactcttggttactgtaaatttatttggaggcaacctttttatgttggagaatagagtgactaattcactctagtgctctatagcagagaacaagaaattagtactctttgaggaatttaggtcagtctttatagagaccataaaggaatcttgacatttaatggcttgaaggttctccataaaccactaaattagaatattaaattaaaattatttttcttttcacataaggcagcattaaataataatttgaaactatctgggggaaaaaggaatcctaattggagcttcctatacaatttcagtatatctgaaatatttcttcaataaatatttatcaagcactaagtatcagcctactatatgcatgcagttagcagttttcacttgcatttacttattttaagccacttttgatttaactgaatgcatgcttttcccttgcctctcattagaaaatggaaagataagcattcttcattttacaaatgtcataactaagattatgccctactagacaactaaaactgtgattccttcagaaataaaatcatacctcaactcttctagaaccagagtcatcatttttcacatacttctacctaactagcttttgcagctcacaatcccatacatcaagtgcatttatgtgtccaactcattcatttacaaccagtttatcttgcagggtatgtcatattgctgcaaattgcatgatgtactgggtttgttttgtttttgtatttgcttacggctgagtgggcatttgattgtactgtttgtttttgtggctgtgctcagtggatgagagcttggaagcctctgtagccttttcttctatatcgacattaactcaatattgcttcttttgaccagtaaaaaatattttgggtgcattagctattttttaaaagcagtatagagaacatatatcatttatcttatttattaggagataaataaaaagtaaccattttgacatgccactttaaacatgatagttgaagagctaaaagagtaacttagttttcactgagacacggtagcgtcacttctaagactgaaacttattttcatttatgagtcctgttctgtggccataactactgctataaattccacttgtttccttgtcagaatgttccaactttttttgttttttaacctgagcacttaagctttgaaaacagcataaacatgcaaaaagagatctaatttaggaatttgtttcttttaaagagagagaatagagttatgtaaagaaatagtactgacacaggactggagggatctgggttctgggcccaacaatgtcagttgtttttctcctttgtaacctgtattttcccaagttcctcatccgatttcagagattgaaattctgtctttataacccagggagggcgcttatgaaggaatattagaaattgtaaagccttcgaatatacttgagaggaaaaaagacgattcagagataggctaccaaggtttattatctgtgtaggggagtgatatttatagcttttacgtagcttagcaaaatgaattttgcattgattataggccaaagtcctgcattctgctgccgattcagcgtcgtttgggcattatgggaaaggaagaagggaaatttcaatagtttatcgaatttagagaacttcattactcctggtgctgtcagaatcagtctcgaggttggctgctgtttggttctaggtaaatggccgagcaggggtgtagggggcagattcccctgtccctgaagcccgaagactcgtgctgcaccttcctgacagtgcacgctcacctcgcggccctccagagcccattccgtacctgagaattagctgttcgtggggaacctgggcccccaaggtgatttttcacctcgccgcgtcagaccgccagttcccagcctccgcgccggaggggcggtgctttgcggggacgcgagcccgcattggcttgcgtggccgccagggcggtgaaatgacgggcgcggggcggggccgcgcggcttgtttgtcggcgccgccccgcccccccgccgtccgtgctgactgaggcgctgcagccaggagccgcggccggctgcccagcgctcgccgcctccgcgcgtccgcagccgtccccgcgccgacatgcgcttggccgccgccgcgaacgaggcgtacacggcccctttggcggtctcggggctgctgggctgcaagcagtgcggcgggggccgcgaccaggacgaggtacctgggcgaggggctgagcgggccgctgggtacctgggcgggtgggcacccggccgagctgccctgtgcaacacggaggtcacgttgcctcctcacagtcgctcccggtcagcatccgaaaacgctccccagatagggcgggctcccggggagcagcgtcccggccctcctgcgcccctcgggggaaggggttgcctgcggtgggtgggagacctgcgcaccgtgagtcgtccctgggcagaaaatgctaagctgggagagactgcggccgcggtcatgtaaatgaaagtctccaatacgtaaataacattgtcgtctggacaagtctccacaagtcagaaatccagcagacctcgagtcttgagggtgaaacagcctgtggatatgccccctcgattgtcttgtcttgtgaaaacagattatttagccaccttcatcccctttgcctcctacttaaaagagagagaaagaaaaaaaacacatttgactcagggaagagatgatgttgcctggaataagtgtgtcctgcaagctctatgacgttatgcacagcgtttactcttgcgtattaagccatcccttttctgaattgtcctttagaaagaggtacttaattgtaacattttgtgtttttttctaagtggttgcaaataggaaaccatttgaaagttactaatgtaaccttaggtaaaactcgaaccttaaatttggattgaaatcaggtgctgtcagagtgttgccttagttcaagaaatctaaatgtgaattattttttctgcagctttactcactaaaatgacgtggtttcgtgatttctttaatggagtctattatcagtatactatgtatattcatagaaacttaaatgaa

SEQ ID NO: 3069 - DNA, 6000 bp, Homo sapiens
ataccaacctttcctctctctcccattcacaaatctgcagattttcccataatagtaaatggcacttcctccattctagttactcaggttagaaactttgaagccatttttgactcttactctcacacaatctgtcagcaaagtctgttggctatactatcaaaatgtatccagattctgtcacctggattattactttagtttcctaaccagtctctctgcttccacccttgcttccctatggtctatgctcaacacaatttaaaagaaatattcacttcaggccagttgcagtgggttatgcctctaatctcagcactttgggaggctgaggcaggaggatcacttgaggcaatcacttgaggagttcaagaccagcctgggcaacacagtgagatcctgtctctacaaaaagacaaaaattatctcagttatgtaatttcagttaaaaaaaaaaaggaaaaaatacaaaattagctgggcttgttggcacgtgcctgtagtcccaactacctgggagactgaggtgggaggattacttgagcccaggagttcaaggatgcagtgagctatgactatactccagcctgggtgacatagtcagattctgtctcaggaaaaaagaaagaggccgggcacggtggctcacacctgtaatccagcactttgcaaggctgaggtgggtggatcacttgaggttaggaattcaagaccagcctgaccaacatggtgaaaccctgtctctactaaaaacacaaaattagccaggtatggtggtgcatgcctgtaatcccagctacttgggaggccgaggacgaagaatcacttaaacttgggaggtggaggttgcagtgagccaagattgtgctattgcactccagcctgggcaacaagagcaaaactccgttgagacagagggagagagagagagagagaaagagagagagagaaaagtagtcattttttaaaagtcagatcatgccctcatctgcgcaaaactctccaatgctttcccaacccaattaaaaatgttagtcctttcagtcacctacatgttctcctaccattacttcctttctctgtgacctcatgttattctcctctttgtactcattgtgctccagccacactagccttcttgctatttctcaaatgcgcactcaggcttctgcccaaggcctttgcactaattctcttcattagaatgttatttgcccaggcatctacatggtttattccctcccctacttcatatctcaattgtccccttctggattatgtcttttctaacaaccttatttaaaagtgaaccttgcccctcacatcctggcactccccattccccttcccagttgttttattctccactgcatttgtcttcatttcatttactaagtgttttacatatttatttattatctctcctcagtagaatgcaagctctatgacagtaggaatttttatatattgtggtcaatgctgtatcttcaatgtcctgttatataaaagggactcaacagagatttgttgagtaaacgcgtgggtgaaatggaatatgagaaccaatgactgaaaaatggactgtatggctgatctggagggcaatatatgaagttagtctgaaagagtaccagatgatgtcaggctttataaaggagttttgtctttaacagtagtaggacaccactgaatagttttaaccaagagaaaatctgatcaaatctgcagtttcaaaaaatcattctggcagatataatggagaactaatggaggagggtcattgtgaataattgctactgtagtggtcttgagagattatcgcagtttgaagacaggtggagagaaaaatatatttgaaggatattttgagagataaggttggcagaacttcataataatttggccatagaagtatgaagggcaagaagaaataaagaataatgtttagctttcaaattttcacaagtagatggatagtagtgtcctttgctgaaataaggaacactgaaaaagaattagattcataagagataactatgcatttggttttaggtatgttgagtttgagatgcttttgagatatccaagaagaaatatccaagagatattgtgaaagctgagaggtgaagctgaatggagctattcatttgagagtcataggtgttggtgaagccatgggtatacatgagatcatatttaactacggcataaaaaggcacccagccttaagaaactacccgaccctttatgggctggatagagaatgaagatcccaaaaaggagatgaaaacggaatggtttttgttttgctttttcaatcacactcataagttattccctttttaaaattcagattcaaactagaagtgtcagaatgtaacaaggcttttgaaattagaccaattcatcagaactatgcatctattcaaaaatagctcacttacagaaacgatgtaaagaattcacaatacctgtctctttgtagcttctaagtgcatcaatacacaaaaagcacccttcccgtcccaccccacaccgccaagtatgcatgatttggcttactgacgtttcctgaaagtaccctatctctcactctgggccttagcatatgctgttcttttggtcttcatttcccctgggatgaagatttccctgactttccaagattgggctaagtcatctccttctagacatcccagtgatatcatgtattattgtaaccgtatgtctaacaactagttcctctaactagtaagactgtctttttcattgttgtatactcagtgcctagcaagacgaaatttttagaatttagtgcaatgcaattctgcaatgtaaagaattaaaatctacaccgattatcagtccactgatggccgttcaaacctcgacttttctcaaataataactttttaaaagcaaactaattttaagcaaatgactgaatcttttgaaaaagtcgactaagttttggagacttttacggttttgctttctttttcctgctgtatccttaaagcctgcaagaattcctatctaggaatactggggattcttttacgagatggatttgacaacttgctttcaaagccctgcctaggatttcatttgactgagcaaataaagcccagaacatccctaagcaaaggcaaacaaaggtgcaaatgcgcggagatcccaaatccaccccgcgtgtgtccacaaaaaagggcggaatcagaggcagcagcgcgaagctccagtttccacagcatccttccttcttggccttacttaggccgctccctgcgacccttgggatcaggatcccaaatccttgcctcacccaccacaccccgcgcttgggcagctggactagtccttcccacgcaagtcactggaaaaagtccttggactaagggaggccaccctagatggctttgtctccaaaatcccagaggaaatggaggaaggaaaaaccctgtcaaggaaaggtgacaacccagcttacagtgcttaccaagcagacgctctcagtcagcccctgccaccgctaaccgttggttcgcgggcacccacaggcaacgtcgcggtggcccctgggggttgtagtttctgtcgcaaacaaaacgcgccggcagcatcgaaactacattccccacaagtcaacgcgaagacgtcctaccgacttaaatctggggtttggagtaatgaagaggccgtcactacttttagggtgatcttaaatgtagactcaatttcttccaggagtcccttcgcgccctctttctttgtcgtgcttgttttatgtgtgacgaagtctcagtgtacttctacgtcttactttttccttccccttctccaggacagagtccaaacgtccgggaacggaaaccgcctcagggcgcaagcttagcgcctccgggggcgcttggcccagttcgcagtcacgcatgcgtagcagccggcagtggctggcagccgcgcgcggcgcacttggggtccggagggtagcctgccagagggcggggctttttcctaaggctttgcctcggcgggtcgcgtctgcctgggcggggaagaaggcgctggggccggggcggctcccggtttgtgccgggcggagaaaggggaggggctgggggtgaggaccccgtctccactccctgctcccgccctctgggctgatccccaccgatggggctgggcgaagggcgggctttgcgcctcgggccccgccgccccgccagctccgcggcccagcctggcgctcgaggattgccagggccgccctgtgccctctggctcggcggtggtgggcgagggctcagggatcggagaagtagcgtcttcccgggggtgccgaattggcggggctgggggacgctttttttcaccgccgcccgccgagactacggctgcccgagactgccgccctccgacagcgcccaagcctccggccgctgcggccagtgggccagggttcggcgagccttccctgccggcgccggccggctgctgaggcgctgggaggagctgcggagggcggggactggtgtcggagaaggggcggggtgggaacgccggagagaacccggtggctgcacagacaaaaaagccccgaatggctggagggcgttcagctgttaacagccttttggggcagagcacggatttgacagctccacaacgtgaggatatccactgaccccgcgagacggaggagaacgcttccccgaaattctctgcccaccaaagccagcgctgcaaggttgcaactttcaaactttgtttttccagaaagaagactgccctttcgtgtacaaggagagggtgagagggtgacctagcttgtagatcggctgaaggcaccagtggttccaaatgtcacccagatgtgtgttttcatgacgatttgatttctctgattttatttttacatttttcattttaaaaatacaaagcaatttttttggggcatgctgaaaggtaactgaagaccgcaaaggaaaaactattgtcatggctgaaggagagaatgaagtgagatgggatggactctgcagcagagattcaactactagggagacagcattggaaaacattaggcaaaccattttgaggaaaaccgagtatcttcgttcggtgaaagaaacacctcatcgtccatcagacgggctttcaaataccgagtcttcggatgggttgaataagctacttgctcatctgcttatgctttctaagaggtgtcccttcaaagatgtgagagagaaaagtgagtttattctgaagagcatccaggtaaggaagagcattttaaatacaactatgtctctactacagttaaattttacttgccgttattcacgttgtgtttgtttctattaggttgttatgtaaacttttattatgagtttacatctttagagtgttctgtaagtaaacaagtagtgtttttctagagttttaggcagaaactgctttgctcctggaagaatatatgaaaactacagttaattccaagtaaatacttgtttttccttatatttctttttacatgttgttggaaaatgtagccagtgtttttttttcacattgtcacagtgttctgagtgtaaaggctcacatttaaaagcctctaaaatgataaaggatattaaatgtttcctagtcagcctgttcaagataattggtggaacaattttctcttatttttaaaaacaaaacaaaccaggatgtgttctctaaatgcaacctctcttttttcaagaagagaattatataaaataataaaaacctatcttaaaagaagctaatatcttcatgttgaaaaggtggacccaggtggggtatttgatagaaacacttttatggcaaattgctcaactagctttctctgtgtttgcctgaattgtttctttttcacatgtgtagctatttaagatacgagtgcagcaggttaaaaatattatagtttttcctccatttcgttcataatttatcctgttttattacaaggtg

SEQ ID NO: 3070 - DNA, 6000 bp, Homo sapiens
ccattgttgggcacggtggctcacgcctgtaatcccagcactttgggaggccgaggcgggtggatcacgaggtcaggagatcgagaccatcctgcccaacatggtgaaaccctgtctctactaaaaatacaaaaattagccgggcatggtggcgggtgtctgtagtcccagctactcaggaggctgaggcaggagaatcacttgaacctgggaggcggagcttgcaataagccgagatagcgccactgcactccagcctgggcaacaagagcaaaaactccttctcaaaaataaataaataaataaaaataaataaataaataaaagtacccatctggcttttgtaccctttactccaccaaaagtttcttatcaagatcccaatgacctccatgttgctaaatgtactggtcaattatgaatcctcatctcatttgacctacagcaacatttaacataacttatttttccttcctccttaattactttcttcattttgcttctagaacacctactgaacagtgggtttttctctgctcactggctgctccttcagtcacctttgcagagaactccaaatccacccaaactccatagaatatcacttttggtgatatcaacaactcctatcaaaacactactataaaatccaaaattatatctattgccagatctttctcctcacttctggactcatttattcaactgcctcctccacctccacatctcaatgtgaatttcttagaggcatctcaaacttaacgtggccaagctaaaataccaacctttcctctctctcccattcacaaatctgcagattttcccataatagtaaatggcacttcctccattctagttactcaggttagaaactttgaagccatttttgactcttactctcacacaatctgtcagcaaagtctgttggctatactatcaaaatgtatccagattctgtcacctggattattactttagtttcctaaccagtctctctgcttccacccttgcttccctatggtctatgctcaacacaatttaaaagaaatattcacttcaggccagttgcagtgggttatgcctctaatctcagcactttgggaggctgaggcaggaggatcacttgaggcaatcacttgaggagttcaagaccagcctgggcaacacagtgagatcctgtctctacaaaaagacaaaaattatctcagttatgtaatttcagttaaaaaaaaaaaggaaaaaatacaaaattagctgggcttgttggcacgtgcctgtagtcccaactacctgggagactgaggtgggaggattacttgagcccaggagttcaaggatgcagtgagctatgactatactccagcctgggtgacatagtcagattctgtctcaggaaaaaagaaagaggccgggcacggtggctcacacctgtaatccagcactttgcaaggctgaggtgggtggatcacttgaggttaggaattcaagaccagcctgaccaacatggtgaaaccctgtctctactaaaaacacaaaattagccaggtatggtggtgcatgcctgtaatcccagctacttgggaggccgaggacgaagaatcacttaaacttgggaggtggaggttgcagtgagccaagattgtgctattgcactccagcctgggcaacaagagcaaaactccgttgagacagagggagagagagagagagagaaagagagagagagaaaagtagtcattttttaaaagtcagatcatgccctcatctgcgcaaaactctccaatgctttcccaacccaattaaaaatgttagtcctttcagtcacctacatgttctcctaccattacttcctttctctgtgacctcatgttattctcctctttgtactcattgtgctccagccacactagccttcttgctatttctcaaatgcgcactcaggcttctgcccaaggcctttgcactaattctcttcattagaatgttatttgcccaggcatctacatggtttattccctcccctacttcatatctcaattgtccccttctggattatgtcttttctaacaaccttatttaaaagtgaaccttgcccctcacatcctggcactccccattccccttcccagttgttttattctccactgcatttgtcttcatttcatttactaagtgttttacatatttatttattatctctcctcagtagaatgcaagctctatgacagtaggaatttttatatattgtggtcaatgctgtatcttcaatgtcctgttatataaaagggactcaacagagatttgttgagtaaacgcgtgggtgaaatggaatatgagaaccaatgactgaaaaatggactgtatggctgatctggagggcaatatatgaagttagtctgaaagagtaccagatgatgtcaggctttataaaggagttttgtctttaacagtagtaggacaccactgaatagttttaaccaagagaaaatctgatcaaatctgcagtttcaaaaaatcattctggcagatataatggagaactaatggaggagggtcattgtgaataattgctactgtagtggtcttgagagattatcgcagtttgaagacaggtggagagaaaaatatatttgaaggatattttgagagataaggttggcagaacttcataataatttggccatagaagtatgaagggcaagaagaaataaagaataatgtttagctttcaaattttcacaagtagatggatagtagtgtcctttgctgaaataaggaacactgaaaaagaattagattcataagagataactatgcatttggttttaggtatgttgagtttgagatgcttttgagatatccaagaagaaatatccaagagatattgtgaaagctgagaggtgaagctgaatggagctattcatttgagagtcataggtgttggtgaagccatgggtatacatgagatcatatttaactacggcataaaaaggcacccagccttaagaaactacccgaccctttatgggctggatagagaatgaagatcccaaaaaggagatgaaaacggaatggtttttgttttgctttttcaatcacactcataagttattccctttttaaaattcagattcaaactagaagtgtcagaatgtaacaaggcttttgaaattagaccaattcatcagaactatgcatctattcaaaaatagctcacttacagaaacgatgtaaagaattcacaatacctgtctctttgtagcttctaagtgcatcaatacacaaaaagcacccttcccgtcccaccccacaccgccaagtatgcatgatttggcttactgacgtttcctgaaagtaccctatctctcactctgggccttagcatatgctgttcttttggtcttcatttcccctgggatgaagatttccctgactttccaagattgggctaagtcatctccttctagacatcccagtgatatcatgtattattgtaaccgtatgtctaacaactagttcctctaactagtaagactgtctttttcattgttgtatactcagtgcctagcaagacgaaatttttagaatttagtgcaatgcaattctgcaatgtaaagaattaaaatctacaccgattatcagtccactgatggccgttcaaacctcgacttttctcaaataataactttttaaaagcaaactaattttaagcaaatgactgaatcttttgaaaaagtcgactaagttttggagacttttacggttttgctttctttttcctgctgtatccttaaagcctgcaagaattcctatctaggaatactggggattcttttacgagatggatttgacaacttgctttcaaagccctgcctaggatttcatttgactgagcaaataaagcccagaacatccctaagcaaaggcaaacaaaggtgcaaatgcgcggagatcccaaatccaccccgcgtgtgtccacaaaaaagggcggaatcagaggcagcagcgcgaagctccagtttccacagcatccttccttcttggccttacttaggccgctccctgcgacccttgggatcaggatcccaaatccttgcctcacccaccacaccccgcgcttgggcagctggactagtccttcccacgcaagtcactggaaaaagtccttggactaagggaggccaccctagatggctttgtctccaaaatcccagaggaaatggaggaaggaaaaaccctgtcaaggaaaggtgacaacccagcttacagtgcttaccaagcagacgctctcagtcagcccctgccaccgctaaccgttggttcgcgggcacccacaggcaacgtcgcggtggcccctgggggttgtagtttctgtcgcaaacaaaacgcgccggcagcatcgaaactacattccccacaagtcaacgcgaagacgtcctaccgacttaaatctggggtttggagtaatgaagaggccgtcactacttttagggtgatcttaaatgtagactcaatttcttccaggagtcccttcgcgccctctttctttgtcgtgcttgttttatgtgtgacgaagtctcagtgtacttctacgtcttactttttccttccccttctccaggacagagtccaaacgtccgggaacggaaaccgcctcagggcgcaagcttagcgcctccgggggcgcttggcccagttcgcagtcacgcatgcgtagcagccggcagtggctggcagccgcgcgcggcgcacttggggtccggagggtagcctgccagagggcggggctttttcctaaggctttgcctcggcgggtcgcgtctgcctgggcggggaagaaggcgctggggccggggcggctcccggtttgtgccgggcggagaaaggggaggggctgggggtgaggaccccgtctccactccctgctcccgccctctgggctgatccccaccgatggggctgggcgaagggcgggctttgcgcctcgggccccgccgccccgccagctccgcggcccagcctggcgctcgaggattgccagggccgccctgtgccctctggctcggcggtggtgggcgagggctcagggatcggagaagtagcgtcttcccgggggtgccgaattggcggggctgggggacgctttttttcaccgccgcccgccgagactacggctgcccgagactgccgccctccgacagcgcccaagcctccggccgctgcggccagtgggccagggttcggcgagccttccctgccggcgccggccggctgctgaggcgctgggaggagctgcggagggcggggactggtgtcggagaaggggcggggtgggaacgccggagagaacccggtggctgcacagacaaaaaagccccgaatggctggagggcgttcagctgttaacagccttttggggcagagcacggatttgacagctccacaacgtgaggatatccactgaccccgcgagacggaggagaacgcttccccgaaattctctgcccaccaaagccagcgctgcaaggttgcaactttcaaactttgtttttccagaaagaagactgccctttcgtgtacaaggagagggtgagagggtgacctagcttgtagatcggctgaaggcaccagtggttccaaatgtcacccagatgtgtgttttcatgacgatttgatttctctgattttatttttacatttttcattttaaaaatacaaagcaatttttttggggcatgctgaaaggtaactgaagaccgcaaaggaaaaactattgtcatggctgaaggagagaatgaagtgagatgggatggactctgcagcagagattcaactactagggagacagcattggaaaacattaggcaaaccattttgaggaaaaccgagtatcttcgttcggtgaaagaaacacctcatcgtccatcagacgggctttcaaataccgagtcttcggatgggttgaataagctacttgctcatctgcttatgctttctaag

SEQ ID NO: 3071 - DNA, 6000 bp, Homo sapiens
aataagctagagaaaagaaaatgttattaagaaaatcataatgaagagatcatatatttaccattcattaagtggacgtggataatcatgaagatcttcattcttacggtcttcactttgagtacactgaggaggaggatcaagaggaggggttggtcttgctatctcaggggtgatagaggtggaataggcggaaggagaggcagaagaggcaggcatactcaagtgtaacttttgtttgtttgtttgtttgaaacagggttttgctctgtcgccagagggctggaggacaatgagacaatcacagctcactgcaacctcgaactcttgggctcaagcgatcctcctgccttagcctcctgaatagctggtactacaggtgtgctccactgcacccagctaatttttttttcttgactttttgtagagatgggtcttgctatgttgttcaggctggtctccaactcctgacctcaggagatctttccacctcagccttccaaagtgctgggattacaggtgtgagccaccccgcccaacttagtataacttctattgaaaaaataatcttcctataagtggactcatgcagttcaaacctatgctgttcaagggtcaattgtaattctatattattactctaccttttctatgtttagatacacaaatacttaccattgcattacaattgccaaagcgtattcagtacagtgacacgctgtacgggtttgtagcctagaaacaacaggctatataacacatagcctaggtgtgtagtatctaggtttgtgtgatttcaccctatgatgttcaaacaaatatgataccacctaacgatgcatttctcagagtgtatcaccatcattaagtgacacatgacagtatcgcagccaggtctgccaaactccagagtatgtcctcttaagctattcacgccaccctcaaactgtctgccccagccatattgcattactttcagctcctagaactcatctgctctccttggcatgaggccttcatacataccgttccctatgtccggaatgtcccctcacaaatctcacctttacatgggtaatatttattcatttatcatgtctctgcttaaatgtcattgcctcaggaaagctttcccttactatctaaaattaaattttatatttgtttacttctttatggtctgtttccctttggtatgatgtcaaaattgttaccactggtcctcagttctcagaatgacattcagcaggagttcaataaacatttgttgcataactgcaagcataaatgaatgatgctggggtggaaactccctaaactgaaaacttcatctattcagactactgatgaaaaacagaaagaaagtataaatttgttcatccactggatatttatttagtagcttccaggtcccagccagtactcttaagaactcatagccttcctatgggagacagacacaaaagcatgtgcttataacacaatataagtaaattgccttttataattgtacaatagatgcagagatggaaaaaaagagtataagtctatagggaaccttcccaggaaattcctgagtccttttgcaggatgaaagagtcttgaaatatatattgcatagtctatgtatttcacttatgaaagggagaggagcatctactatatataccagagtactttacatctgatttaattcccacaagagctctgtgttgttattcccattttacagatgtggaaatccaagctaagaaaggtcaaggaatttgcccaaggttacaggcaaggacattagtaaaggagtggaatttgagcccaactctgactccagtacccacttatttatcattatattgaaatcctttgatactatgctccccagagcctgcttacttttattttcaatataactcttaacacgattggttatctggtttcccattctaatatgaattaagcagcaaaatgaaagatcaggaagagaccaaagtcaagtatcctgacggcaaaggaaagaacagaaaaactataaaaattacacacaaaaatacaaaaactaatggatcatatagtcagtcctccaccctttgctgcacaacaatagttgatatgcataatgatgaccccattatggacaaaaatggttgttacagtcactacagtctagaagatagagaaataactttttgtgtttcaaagggtaaacttcagttacctagtatattaattcctctcgggtaactctgaattgtaacaattgtttccaaagtgttagtgagaagaaatatcccaagatcttaaatagagtcttcattttgtggatattatttttctgttgctttaaactaaattcaagccagtatataaaaactgtcacttttaacttacatagttacccaagtacattttaaattttaaaaatctctcatacaggactttggacaacacacgtggattgagaaatgtaaagattgacaagcatatataaggtgttgctgaatattgtcaatatctaaaaacttaaaaaaaagtattctaagacaccttgtaataaaacaggataaattatgaacgaaatggaggaaaaactataatatttttaacctgctgcactcgtatcttaaatagctacacatgtgaaaaagaaacaattcaggcaaacacagagaaagctagttgagcaatttgccataaaagtgtttctatcaaataccccacctgggtccaccttttcaacatgaagatattagcttcttttaagataggtttttattattttatataattctcttcttgaaaaaagagaggttgcatttagagaacacatcctggtttgttttgtttttaaaaataagagaaaattgttccaccaattatcttgaacaggctgactaggaaacatttaatatcctttatcattttagaggcttttaaatgtgagcctttacactcagaacactgtgacaatgtgaaaaaaaaacactggctacattttccaacaacatgtaaaaagaaatataaggaaaaacaagtatttacttggaattaactgtagttttcatatattcttccaggagcaaagcagtttctgcctaaaactctagaaaaacactacttgtttacttacagaacactctaaagatgtaaactcataataaaagtttacataacaacctaatagaaacaaacacaacgtgaataacggcaagtaaaatttaactgtagtagagacatagttgtatttaaaatgctcttccttacctggatgctcttcagaataaactcacttttctctctcacatctttgaagggacacctcttagaaagcataagcagatgagcaagtagcttattcaacccatccgaagactcggtatttgaaagcccgtctgatggacgatgaggtgtttctttcaccgaacgaagatactcggttttcctcaaaatggtttgcctaatgttttccaatgctgtctccctagtagttgaatctctgctgcagagtccatcccatctcacttcattctctccttcagccatgacaatagtttttcctttgcggtcttcagttacctttcagcatgccccaaaaaaattgctttgtatttttaaaatgaaaaatgtaaaaataaaatcagagaaatcaaatcgtcatgaaaacacacatctgggtgacatttggaaccactggtgccttcagccgatctacaagctaggtcaccctctcaccctctccttgtacacgaaagggcagtcttctttctggaaaaacaaagtttgaaagttgcaaccttgcagcgctggctttggtgggcagagaatttcggggaagcgttctcctccgtctcgcggggtcagtggatatcctcacgttgtggagctgtcaaatccgtgctctgccccaaaaggctgttaacagctgaacgccctccagccattcggggcttttttgtctgtgcagccaccgggttctctccggcgttcccaccccgccccttctccgacaccagtccccgccctccgcagctcctcccagcgcctcagcagccggccggcgccggcagggaaggctcgccgaaccctggcccactggccgcagcggccggaggcttgggcgctgtcggagggcggcagtctcgggcagccgtagtctcggcgggcggcggtgaaaaaaagcgtcccccagccccgccaattcggcacccccgggaagacgctacttctccgatccctgagccctcgcccaccaccgccgagccagagggcacagggcggccctggcaatcctcgagcgccaggctgggccgcggagctggcggggcggcggggcccgaggcgcaaagcccgcccttcgcccagccccatcggtggggatcagcccagagggcgggagcagggagtggagacggggtcctcacccccagcccctcccctttctccgcccggcacaaaccgggagccgccccggccccagcgccttcttccccgcccaggcagacgcgacccgccgaggcaaagccttaggaaaaagccccgccctctggcaggctaccctccggaccccaagtgcgccgcgcgcggctgccagccactgccggctgctacgcatgcgtgactgcgaactgggccaagcgcccccggaggcgctaagcttgcgccctgaggcggtttccgttcccggacgtttggactctgtcctggagaaggggaaggaaaaagtaagacgtagaagtacactgagacttcgtcacacataaaacaagcacgacaaagaaagagggcgcgaagggactcctggaagaaattgagtctacatttaagatcaccctaaaagtagtgacggcctcttcattactccaaaccccagatttaagtcggtaggacgtcttcgcgttgacttgtggggaatgtagtttcgatgctgccggcgcgttttgtttgcgacagaaactacaacccccaggggccaccgcgacgttgcctgtgggtgcccgcgaaccaacggttagcggtggcaggggctgactgagagcgtctgcttggtaagcactgtaagctgggttgtcacctttccttgacagggtttttccttcctccatttcctctgggattttggagacaaagccatctagggtggcctcccttagtccaaggactttttccagtgacttgcgtgggaaggactagtccagctgcccaagcgcggggtgtggtgggtgaggcaaggatttgggatcctgatcccaagggtcgcagggagcggcctaagtaaggccaagaaggaaggatgctgtggaaactggagcttcgcgctgctgcctctgattccgcccttttttgtggacacacgcggggtggatttgggatctccgcgcatttgcacctttgtttgcctttgcttagggatgttctgggctttatttgctcagtcaaatgaaatcctaggcagggctttgaaagcaagttgtcaaatccatctcgtaaaagaatccccagtattcctagataggaattcttgcaggctttaaggatacagcaggaaaaagaaagcaaaaccgtaaaagtctccaaaacttagtcgactttttcaaaagattcagtcatttgcttaaaattagtttgcttttaaaaagttattatttgagaaaagtcgaggtttgaacggccatcagtggactgataatcggtgtagattttaattctttacattgcagaattgcattgcactaaattctaaaaatttcgtcttgctaggcactgagtatacaacaatgaaaaagacagtcttactagttagaggaactagttgttagacatacggttacaataatacatgatatcactgggatgtctagaaggagatgacttagcccaatcttggaaagtcagggaaatcttcatcccaggggaaatgaagaccaaaagaacagcatatgctaaggcccagagtgagagatagggtactttcaggaaacgtcagtaagccaaatcatgcatact

SEQ ID NO: 3072 - DNA, 6000 bp, Homo sapiens
tacatcacatccttccttactcatgtgttacttaccactattagccaaccatttacacaaaaaatgatgacaaagaatgaaagggaaagtagggcaactcagcactccctttcctttcatccttccttactcatcagtaagcagaagatggagaatgttggtagaatgtgtgcatatcaagaaggaaaacaaaaatagttttgttttgtgcagagtttacactgctctgatagcacaaaatacatatgcatttacaagctatgaattgtataattttggtgattccacatacaattgaaatgctcttatatttgcattttaaaacggcattacacaatataaagatgaatggtaaaattcatcctaagaattaaaaaatttaatttttcttctcatagaatgacattaaaaagcaaatttaaaaacactatgacaagtggagagagcgacgacagaacaaagaaaaagctttatattttaatacagataatagcacattttcccctgtgttggaacaagaggccttacgttttcattttgctctgggctccacaaattatgtagctggctgtgactgggctggttgaagcaaaaagggattaaaagatactatttagttcacagatctctcagagggccagagaaccagacttggataaaccaagctagaaacaacatccaagaaaaaccaaaccacaaagaacacccatcccacatcacaaagctattctagtggaaacccatcccagcaatgcctgccagtcagcacctatgactctagaacagatgccacaactcctccctacctacccagaggaaccagatacctccttcatggtatttgtcagaagatacttatctccctgagtgcagttgaagcatcatgttgctcgctctcacatccatgtcctgaatgggtacatctgattgctggaaactaggtcatatactgaagccaacttctgattgtcagcatcctttccaactaactccacatttactgaagtcactctggtagaggacacatttgtaccatgtagtcccaactagttggcaggttgaggtgggaggagcctagcagttcaagaccagcctgggcaacatcgtgagaccctgttcctcaaaaagaaagcaaaccgaattggccaatgctacaaattagggccttccctcttctctagccattgttaaacatttactgatcacaccattgatctcacaccagcaatctagctgcaaaggagtctgagaactgtagtttgttttccagcttttaaagtacagaaaagtaagcaagaagagggttggatgaatactgaataagccatcttatagtatctgccacaaaagtatggtagctactactgtctgttctagattataaactgctaacaggcagatgttaacagatgttgaacagtattggtaaaggagacttggtaggcttttactaaaggcagacatgctaagtacatgtcagtgaactagaagagatgattaaatgttaattgatatgattaaaatacatttttaggatgctagactataaaccttataagggaagggaccatgtctgttttgtttctcaccatatctcaaatctcctggcaagaaatagccacctaaaaaaaaaaagaaagcacagtcaggtgtggtggctcacacctgcaatcccagcactttgggaggccaaagtaggcagatcgtgaggttaggagttcgagaccagcctggccaacatggtgaaaccccatctctactaataatacaaaaattatccaggcatggtggcacatgcctgtagtcccagctcctcgggaggctgaggcaggagaattacttgaacccgggaggtggaggttgcagtgagccaagattgtgccactggactccagcctgggtgacagagtgagactctgtctcaaaaaaaaaaaaaaaaaaagcattaaggatattaagtatagagttcaatttttgcatttctcatactgtatgtagataagtcaattccaagtgattttactgtttctcaatgaatcagacttctggatatgaacattttactatattttcacatacattatctcatttgagccttataacatccctgagaagttaaaacaggaattactatccatttcacagatgaggaaataaattccaaaaaataagtgagcacttagctaaatgatggtttaatattcacattctctgactcaaaattccagaactttttcttacttcaggaagaatatacatataaaacacatttgatagtggttaattagggggctattgtcaggttttcaatttgagcatcaacttaaaactaaattacatgcaatgaacacaacattcctaatttcatgctgcaaatgtttttcttcaagagtgaacattcttggagttctagaaggatttgacttgtggttgcaactgccttttcttaaagtaaataatgttgattcaagaggtaaggggaaagaaaccctcttctagaaatcgcaaatctgttaatttgatgcttttaccattttctagttaggaatattataatttaaaagttatggatacactgattataatatagtacaaggattctcaattttattttgcttaagaatcacggggtggcaagtagtgttgctaacaatacagattcccaggccccatcccccaaaatataattcagtaagagccaaaatatcaacacttaaagaattctaggtgtcatggaacactgagaatcactgatattgtgtatctgacattcggcgtgtacaaaatatttattttataaaaaatacattttagcatggtagtcatattttaaaatcacttctatagccttctaaaatttcagatcaagagattttgcctcttaaaaatattagctaatttccagcatattagtagaaatcttgccacgtatgtttataatcatgctctgaggttaaaaactacaagctaatttactgtagtaatcagtctcaaatccctcggagcgtaagttcttattatagcatttatatgttagggaatttatagacagcttcttaccagtgagctgtctctttgggccttttgattttcctatttgaaaatccacaacggttccaaacgagtagctctcacaccacttcaaatacgtggcaacctggtaaccactaaaatgcacctgtataacacacaaatgtaaaagaacgatctctacttggatgggttagaaatgtgtcaagggtcctaattcaggggcaaatttcgaacttgaacccacgctttctgcctcctacagcttgcatctttttgttgagaagaaacccttcaggattagtttttaagagaaaccttcccgttttacatatgtagaaactgagcccaaagaaacaaaattatttgtccaaggtcacgcccaatatcagtggccaagtcagagaggaaccccttgtttccaatttaatagccaagccagctgcatgttactactctttaaaacaaaaattccctaactgcatcgcttcaccccctctcgatttttgaataaagttgtttattcaaaacggcccttccccacggtggtgcttttatgccttcgggtagtaaaaccttccataacgtgttagtgaaaaacacgaggaggccacgtctaacgcggtgactttcacaggcctttttctttggccaaaattttctcggaaagactgttaatcctacattccgctgggggaggagcgacgagggaggagggaggtcaccggcagctgacaagtccttacatgtacttgcgcgtgcccgggacgcagcctgcggggccgaggaaaccaacgaaggatgtattaggacgagagggaaggaagggggcgggagaaaaacacggtagtgggaaatccctgtgcactggatctgccaacccctcgcaaagctgagaagagccgtgcgtgaataaatctcattaaatggcccggcgcagacactgcagcagcaaagaggagggggcaccgcggctcgcgcggcacgttcgggaagggggaacgccagggcggcccttttataggccgaagcccgcgcccgcgcgcccccacccttcgcaccgcccccgggccacgcgcggagccgcggcgttacctgagaagggccggctgcgtccgcacccggccccgcccgttccgccgcccgcccgcccttccctcccgcgaggccgcagcggcacgagatctgcgcctcgcctccctcctcacgcgggcggattttcttaccttgtgaaaaaccgtctcagcggctgcccccgcctcctctgctggatgtgaaatggcggtcggcgaggcaagtgtgagcatcgcagctcctgccaatcctgcatagccgccaaaacggccccgaacactggcgcccccctcccgcaagcccctcggagcccatccatgagatcggtgctccgccgccccttccgctgcccctcacccaggtgaccgtgcccgccagccgagtcatcgatcccgcgcgggcgctgccggccgccggccgcctccctcgccgcgtgcccggggagggggagaaagccccttctcggcccccgccctccgtgtcccgcccgggcgcccgccctctcgctccttttcccgccgagccccctcccccgcactactcgcagcctcccttcgccacacacacccccctctcccctccccccagtggttgcgtccgtgacatcatcatcatggcaacaagagctgcagcctgggaccgaggagcccgtgtgattcccggcggtggcggcagtggcggcagcaccagcaccgacgaaagctcgagggcttctctcctgcggccccttgccgggtgctcctgaggaggcggcggcagcagcgcctacaccgccccgcccgccgctcctcgaggtgcctctgtgtgaggggagggggccgtgccgagaaggggagggggcgccgccgccgctgcggagggagccgccgccgctgctgctgccgctgccgggtcgccagtgaagggaggcagtggcggcggcggcgaacatgttttcagtaaggatagtgactgcagactactacatggccagcccgctgcaggggctggatacctgccaatcccccctcacccaggcccctgtcaagaaggtgccggtggtgcgagtcttcggagcgaccccggcaggtaagcgggcgccgggcgcggggcgggagcgggagtcggcggggcgccggggccgccctccccgccgcgcacacgcgcacacgccaccggcgccggccgtctccgtggatcgctgccgcgtcttccctcccctccgccctcctcgccttttctctcgtgcgtgacaagagccgcaaaaatgtgggtccgcgcgagcgctgcgcggcgcccccacccccgggcagggaggtggcgagcgccgcgtgtttagactgcgtgtggcggccgggagcgggagccgcactccagggcgcgggccgggagagcgaaagccgcgggcgccccggacggcgggccaggtggccgcgccatgtccatcggtggacgggttcgtagggcctgctctgaggtcggtcgctagtgggacatcccttgtgtcccccaagtgccgctttctggaaacggggaagtgtcagccttgttgtcagtcgctccccatggtctcttctcaccctcgctctcctctgccagttccggagatgcagtgggccggagagagtggcgcttggggccagataatctttctcactggggtgaccgtgtggctctgctgtgagtgcaggtcgtgactccttagagtttagtgcctgagcgtcgggggacagggcagcatccttaggtgcagtgctttcaggaaatgtgcatccatggaagtaggaaatgcgtgtttatgttgcccaacctaaaacatcacacttaatggggtgaatttattaggaaccacagccagactcagcagcacagacattttgaaatgctcctaggctgggctgtaggattgcgttttaa

SEQ ID NO: 3073 - DNA, 6000 bp, Homo sapiens
aattttataaaatataaacaatgagaatatatttataattggataagcatctacataaacttatatagcatttcagaattatcaattccttatgttgaaaagcttgatttcatggctaacagtatctagaacaatctaccaaaatattcactaagctagaggaagtggcagagttccttagagtaatcttaaagacaagcagctccctctatagtctgtctggcctactttgtttaattccttgctttgtggacatcccacactcttctatttactcctactctgcatctcagcagggaagctctttgaaaggatagttctgtttaacctggtgctgaggaaactgtgagagctgtctaaactcagcatgaagtgagttacatcaagcaactaagcaaaagtcgagatgtggaaaatggacagcttcccaagtccacctcagtcaaatccttaaatgaagcctgatgatttcatttgtagtgaatcctctgagtggtcacacctatattcaaatctaaatgaaaaaacattgtcctatactttattcacaacctttcttccctccattaaaacaagttaccaaaatgttgttctaaaagaaaaaattaacaatttattctacaaatgatactgctcaatttgattatgtcaaaataatgttcaagacattttaaaaactagttaaaaaaatggagaggaaatttgtttttgttttttaaaaaattccataactcagatgaagaaactttaagtgattcccttaggaatcaatatcctcagttggcaagggattaaatcagtcaggatttaccattcaaatctgaatatccccccccgccttttttttttttttttttaagacaggctcttgctctgttgcccaggctggagtgcagtggcgtgatcttggctcactgcagcctcaaccttctgggctgaagcgattctcctgtctcagctttccaaatagctagtactacaggtgcacaccaccacgcccagccaattttgtttgtttgtttgtttgttttgtacagactatgtcgcccaggctggtctccaactcctgggttcaagcgatcctcctgcctctgtcttccaaagtgttgggattacaggcatgagccacagcacccagccctgaatatccctctttttaaaaataccttttcaaatttcaccaacttaagacatgggagcttttaaacccaaaacactttatttcttaaattactcaagatacgtcctcaaaacacagaacaatcaaaagtcaactggactgttttctaaagcagaaaaatgcttttcaggcaataatagaaaaactaaactagtaaaagggtattaatccaatcagttcagaatttgtaatataattttgaaacggccacttcatttgagaaaaaatatctttggttgctatttttcaggatctcatttgtaaagcaaagtcaattttaaaacattttctctccaaaccaaagtaaagcattaaggacctcccaaagtaattcttatatatgaaaaaagtatgtttatgctattttatgtagcataggtttatcatgtgttacacatttttattaccttattttacttgttagtaaagatataaactataaagatataatacaaaccatgtttatatctttgcattatgtttacatctttactttcaaataaatctgtcttcattaaaaattctagcattcagagttttactaagtcagactggcctctcttttatattaataattttcaagttttattttattggactagttttccttggggagataattcaaaagcaggtaattctgcagtttttgattatgtttaattaatattaatctcactgggagtttctgacgtgctaataaaaatgctggcttggtttatgaaaagtgtaaactctaaatgtatgccaatgacttcaaattttttcttgttgaaacaaacattttgttggaaactgtgaactacatggcaaattcaatttgataatccttaacaatttaaaatttgactttctctgtatcaagttttatgtctttcaatgtacatataaaaagtgttactttttaattcatttaaaatataaatttcaaagtatgtaccaaaaaaaaaaccccaatgggggtttttagtctttggttttttcgtttttgtttttttttttttttttaaggtgctggtaatctattgtgggatgtccatgaaggattaaataggaaatagttaatgtgtcttttaaaaaatattcaggaaaacaacagtatataatattctttattttttaaggaacatttcctcacgtaatagaattacattagcttacagtgaaactcatttatttccacaaacgaaactttcctatacaacaaagcttgactatctctcaggaaaacatatttaatgacttgtgtggaggagaaaaaattatgtgtggaaaagtaactcaaaccatacaagctgtaatacacagaaatgccacagtatatcctattagcatgtcactttatgattcggaaatttggctgaacagggccatatcaacttcactattttatccttcctctgcatctgaagtgagaacagtgcattacactgaaattccaattggaaacaaagacagcaccactatatttaaaagggcagaaaacctatcttatagaacacttcatcgcctcgatttcccagcctccaaagtttcaagtgttacactttcaacacgttaaaagcactcaaattccccatctttcaaggttcatatcaaaatcatattcactagtttaaataggaatatgctaccaaatctcacaacattgacattttaacaaagagaattcacattaaaagataactgctttaaaatgagtgcttgtgtttgggaaagcgctattatcttggtagtccacagaaactgactgtagtaataagatgaatggtgatgagggcaaggagcatcaagtgggaaatgctatctaaaatcccatagggcaattcatagctagagggaagaacaacctttcctaagatgcattatttcctagaactccattatttcatggaagcagttcaaagcatgcaaaaaagcaaaaccattttaaaacacctagtaaactgggcctctatcttttttatattatcataagccccaggagtttttgagaacgtaccttctgtcacggctgtctccccttcccatcccttcttcaacatagttgtgtttaaaaaatatatacctgtacttaaaacgcaatcctacagcccagcctaggagcatttcaaaatgtctgtgctgctgagtctggctgtggttcctaataaattcaccccattaagtgtgatgttttaggttgggcaacataaacacgcatttcctacttccatggatgcacatttcctgaaagcactgcacctaaggatgctgccctgtcccccgacgctcaggcactaaactctaaggagtcacgacctgcactcacagcagagccacacggtcaccccagtgagaaagattatctggccccaagcgccactctctccggcccactgcatctccggaactggcagaggagagcgagggtgagaagagaccatggggagcgactgacaacaaggctgacacttccccgtttccagaaagcggcacttgggggacacaagggatgtcccactagcgaccgacctcagagcaggccctacgaacccgtccaccgatggacatggcgcggccacctggcccgccgtccggggcgcccgcggctttcgctctcccggcccgcgccctggagtgcggctcccgctcccggccgccacacgcagtctaaacacgcggcgctcgccacctccctgcccgggggtgggggcgccgcgcagcgctcgcgcggacccacatttttgcggctcttgtcacgcacgagagaaaaggcgaggagggcggaggggagggaagacgcggcagcgatccacggagacggccggcgccggtggcgtgtgcgcgtgtgcgcggcggggagggcggccccggcgccccgccgactcccgctcccgccccgcgcccggcgcccgcttacctgccggggtcgctccgaagactcgcaccaccggcaccttcttgacaggggcctgggtgaggggggattggcaggtatccagcccctgcagcgggctggccatgtagtagtctgcagtcactatccttactgaaaacatgttcgccgccgccgccactgcctcccttcactggcgacccggcagcggcagcagcagcggcggcggctccctccgcagcggcggcggcgccccctccccttctcggcacggccccctcccctcacacagaggcacctcgaggagcggcgggcggggcggtgtaggcgctgctgccgccgcctcctcaggagcacccggcaaggggccgcaggagagaagccctcgagctttcgtcggtgctggtgctgccgccactgccgccaccgccgggaatcacacgggctcctcggtcccaggctgcagctcttgttgccatgatgatgatgtcacggacgcaaccactggggggaggggagaggggggtgtgtgtggcgaagggaggctgcgagtagtgcgggggagggggctcggcgggaaaaggagcgagagggcgggcgcccgggcgggacacggagggcgggggccgagaaggggctttctccccctccccgggcacgcggcgagggaggcggccggcggccggcagcgcccgcgcgggatcgatgactcggctggcgggcacggtcacctgggtgaggggcagcggaaggggcggcggagcaccgatctcatggatgggctccgaggggcttgcgggaggggggcgccagtgttcggggccgttttggcggctatgcaggattggcaggagctgcgatgctcacacttgcctcgccgaccgccatttcacatccagcagaggaggcgggggcagccgctgagacggtttttcacaaggtaagaaaatccgcccgcgtgaggagggaggcgaggcgcagatctcgtgccgctgcggcctcgcgggagggaagggcgggcgggcggcggaacgggcggggccgggtgcggacgcagccggcccttctcaggtaacgccgcggctccgcgcgtggcccgggggcggtgcgaagggtgggggcgcgcgggcgcgggcttcggcctataaaagggccgccctggcgttcccccttcccgaacgtgccgcgcgagccgcggtgccccctcctctttgctgctgcagtgtctgcgccgggccatttaatgagatttattcacgcacggctcttctcagctttgcgaggggttggcagatccagtgcacagggatttcccactaccgtgtttttctcccgcccccttccttccctctcgtcctaatacatccttcgttggtttcctcggccccgcaggctgcgtcccgggcacgcgcaagtacatgtaaggacttgtcagctgccggtgacctccctcctccctcgtcgctcctcccccagcggaatgtaggattaacagtctttccgagaaaattttggccaaagaaaaaggcctgtgaaagtcaccgcgttagacgtggcctcctcgtgtttttcactaacacgttatggaaggttttactacccgaaggcataaaagcaccaccgtggggaagggccgttttgaataaacaactttattcaaaaatcgagagggggtgaagcgatgcagttagggaatttttgttttaaagagtagtaacatgcagctggcttggctattaaattggaaacaaggggttcctctctgacttggccactgatattgggcgtgaccttggacaaataattttgtttctttgggctcagtttctacatatgtaaaacgggaaggtttctcttaaaaactaatcctgaagggtttcttctcaacaaaaagatgcaagctgtaggaggcagaaagcgtgggttcaagttcgaaatttgcccc

SEQ ID NO: 3074 - DNA, 6000 bp, Homo sapiens
aaccacctttaaattgttatctcaaatatttgtttcatcatcaatgtaggtggtattatttatttgacaatacgaaaaaagtcatcataattctgctttccgggatatgagaatttgaaatcctttttaactcaactctgtagtgctcatggttcatagctgtacacagtggaggtcactctaggagtttagtggagagcagcaactcctctttggggacatttagaaatacatggggaattttttattgttacagtggcatgtagtgcatgggggccagggatgttaaatgtcctgcacaatgaaaaactgtttcaccaaaaatgccagaagccccatttgagaaacccaagcgctcagagccatcaacttcatgaacatgcgacaagtatagtcacacagggcccagtgcttggtttaatgctctgtagtcactgtcttgaaaattgtaatacttttatgtttgactatctgttttgtaagtccagtggtatagcagagcataatatgcaagcagaggtatgtatcctttcttccttgccgttctatttgcatatggtctccatgatgcctcatgacaaaggattctggtggacctatgaggtgcaggaactcaagagagtaacaaagttaatacaaaacaagcatgtaacatctatgactgagttagtggaggcatagacagttccaagaggctacacttttcattcaaatccgaacttgcttcaggtgcagaaagaaggcaacagcatctttaagaaacacaagtgattacatcacatccttccttactcatgtgttacttaccactattagccaaccatttacacaaaaaatgatgacaaagaatgaaagggaaagtagggcaactcagcactccctttcctttcatccttccttactcatcagtaagcagaagatggagaatgttggtagaatgtgtgcatatcaagaaggaaaacaaaaatagttttgttttgtgcagagtttacactgctctgatagcacaaaatacatatgcatttacaagctatgaattgtataattttggtgattccacatacaattgaaatgctcttatatttgcattttaaaacggcattacacaatataaagatgaatggtaaaattcatcctaagaattaaaaaatttaatttttcttctcatagaatgacattaaaaagcaaatttaaaaacactatgacaagtggagagagcgacgacagaacaaagaaaaagctttatattttaatacagataatagcacattttcccctgtgttggaacaagaggccttacgttttcattttgctctgggctccacaaattatgtagctggctgtgactgggctggttgaagcaaaaagggattaaaagatactatttagttcacagatctctcagagggccagagaaccagacttggataaaccaagctagaaacaacatccaagaaaaaccaaaccacaaagaacacccatcccacatcacaaagctattctagtggaaacccatcccagcaatgcctgccagtcagcacctatgactctagaacagatgccacaactcctccctacctacccagaggaaccagatacctccttcatggtatttgtcagaagatacttatctccctgagtgcagttgaagcatcatgttgctcgctctcacatccatgtcctgaatgggtacatctgattgctggaaactaggtcatatactgaagccaacttctgattgtcagcatcctttccaactaactccacatttactgaagtcactctggtagaggacacatttgtaccatgtagtcccaactagttggcaggttgaggtgggaggagcctagcagttcaagaccagcctgggcaacatcgtgagaccctgttcctcaaaaagaaagcaaaccgaattggccaatgctacaaattagggccttccctcttctctagccattgttaaacatttactgatcacaccattgatctcacaccagcaatctagctgcaaaggagtctgagaactgtagtttgttttccagcttttaaagtacagaaaagtaagcaagaagagggttggatgaatactgaataagccatcttatagtatctgccacaaaagtatggtagctactactgtctgttctagattataaactgctaacaggcagatgttaacagatgttgaacagtattggtaaaggagacttggtaggcttttactaaaggcagacatgctaagtacatgtcagtgaactagaagagatgattaaatgttaattgatatgattaaaatacatttttaggatgctagactataaaccttataagggaagggaccatgtctgttttgtttctcaccatatctcaaatctcctggcaagaaatagccacctaaaaaaaaaaagaaagcacagtcaggtgtggtggctcacacctgcaatcccagcactttgggaggccaaagtaggcagatcgtgaggttaggagttcgagaccagcctggccaacatggtgaaaccccatctctactaataatacaaaaattatccaggcatggtggcacatgcctgtagtcccagctcctcgggaggctgaggcaggagaattacttgaacccgggaggtggaggttgcagtgagccaagattgtgccactggactccagcctgggtgacagagtgagactctgtctcaaaaaaaaaaaaaaaaaaagcattaaggatattaagtatagagttcaatttttgcatttctcatactgtatgtagataagtcaattccaagtgattttactgtttctcaatgaatcagacttctggatatgaacattttactatattttcacatacattatctcatttgagccttataacatccctgagaagttaaaacaggaattactatccatttcacagatgaggaaataaattccaaaaaataagtgagcacttagctaaatgatggtttaatattcacattctctgactcaaaattccagaactttttcttacttcaggaagaatatacatataaaacacatttgatagtggttaattagggggctattgtcaggttttcaatttgagcatcaacttaaaactaaattacatgcaatgaacacaacattcctaatttcatgctgcaaatgtttttcttcaagagtgaacattcttggagttctagaaggatttgacttgtggttgcaactgccttttcttaaagtaaataatgttgattcaagaggtaaggggaaagaaaccctcttctagaaatcgcaaatctgttaatttgatgcttttaccattttctagttaggaatattataatttaaaagttatggatacactgattataatatagtacaaggattctcaattttattttgcttaagaatcacggggtggcaagtagtgttgctaacaatacagattcccaggccccatcccccaaaatataattcagtaagagccaaaatatcaacacttaaagaattctaggtgtcatggaacactgagaatcactgatattgtgtatctgacattcggcgtgtacaaaatatttattttataaaaaatacattttagcatggtagtcatattttaaaatcacttctatagccttctaaaatttcagatcaagagattttgcctcttaaaaatattagctaatttccagcatattagtagaaatcttgccacgtatgtttataatcatgctctgaggttaaaaactacaagctaatttactgtagtaatcagtctcaaatccctcggagcgtaagttcttattatagcatttatatgttagggaatttatagacagcttcttaccagtgagctgtctctttgggccttttgattttcctatttgaaaatccacaacggttccaaacgagtagctctcacaccacttcaaatacgtggcaacctggtaaccactaaaatgcacctgtataacacacaaatgtaaaagaacgatctctacttggatgggttagaaatgtgtcaagggtcctaattcaggggcaaatttcgaacttgaacccacgctttctgcctcctacagcttgcatctttttgttgagaagaaacccttcaggattagtttttaagagaaaccttcccgttttacatatgtagaaactgagcccaaagaaacaaaattatttgtccaaggtcacgcccaatatcagtggccaagtcagagaggaaccccttgtttccaatttaatagccaagccagctgcatgttactactctttaaaacaaaaattccctaactgcatcgcttcaccccctctcgatttttgaataaagttgtttattcaaaacggcccttccccacggtggtgcttttatgccttcgggtagtaaaaccttccataacgtgttagtgaaaaacacgaggaggccacgtctaacgcggtgactttcacaggcctttttctttggccaaaattttctcggaaagactgttaatcctacattccgctgggggaggagcgacgagggaggagggaggtcaccggcagctgacaagtccttacatgtacttgcgcgtgcccgggacgcagcctgcggggccgaggaaaccaacgaaggatgtattaggacgagagggaaggaagggggcgggagaaaaacacggtagtgggaaatccctgtgcactggatctgccaacccctcgcaaagctgagaagagccgtgcgtgaataaatctcattaaatggcccggcgcagacactgcagcagcaaagaggagggggcaccgcggctcgcgcggcacgttcgggaagggggaacgccagggcggcccttttataggccgaagcccgcgcccgcgcgcccccacccttcgcaccgcccccgggccacgcgcggagccgcggcgttacctgagaagggccggctgcgtccgcacccggccccgcccgttccgccgcccgcccgcccttccctcccgcgaggccgcagcggcacgagatctgcgcctcgcctccctcctcacgcgggcggattttcttaccttgtgaaaaaccgtctcagcggctgcccccgcctcctctgctggatgtgaaatggcggtcggcgaggcaagtgtgagcatcgcagctcctgccaatcctgcatagccgccaaaacggccccgaacactggcgcccccctcccgcaagcccctcggagcccatccatgagatcggtgctccgccgccccttccgctgcccctcacccaggtgaccgtgcccgccagccgagtcatcgatcccgcgcgggcgctgccggccgccggccgcctccctcgccgcgtgcccggggagggggagaaagccccttctcggcccccgccctccgtgtcccgcccgggcgcccgccctctcgctccttttcccgccgagccccctcccccgcactactcgcagcctcccttcgccacacacacccccctctcccctccccccagtggttgcgtccgtgacatcatcatcatggcaacaagagctgcagcctgggaccgaggagcccgtgtgattcccggcggtggcggcagtggcggcagcaccagcaccgacgaaagctcgagggcttctctcctgcggccccttgccgggtgctcctgaggaggcggcggcagcagcgcctacaccgccccgcccgccgctcctcgaggtgcctctgtgtgaggggagggggccgtgccgagaaggggagggggcgccgccgccgctgcggagggagccgccgccgctgctgctgccgctgccgggtcgccagtgaagggaggcagtggcggcggcggcgaacatgttttcagtaaggatagtgactgcagactactacatggccagcccgctgcaggggctggatacctgccaatcccccctcacccaggcccctgtcaagaaggtgccggtggtgcgagtcttcggagcgaccccggcaggtaagcgggcgccgggcgcggggcgggagcgggagtcggcggggcgccggggccgc

SEQ ID NO: 3075 - DNA, 6000 bp, Homo sapiens
cacttctccacagggaaacattattaaactgaagctgattaacagtattattgcttctcaaaatttaaatgcatcttaacaagattctttgtatgcacaattctgatttagtagatttagggtgaggtctgagattttgcatttctaacaagctccagatgatgctattactgctagtctggggattaccctgaagtgcaaggtgatggacagtcattagagagaccaggtagaattcagaggttagatacgggacagcaaaccgggcactgagacttcagagtctccccagagttttgttctttaagatgcaatccagtcatcttttttttcaaattaaaacgtaggtttaatgcaattccaaccaatatgccaaaaggattattttggaaacagactaagttatttcaaggttattctagaataggcaacaagaaagatgaatgtgggaagggatgaaagagaatagcaaggggagtaaaattatgtgattaaggaggcatcaagcatcattaagaaaggaaataatggtggagaactagatatttggcaaaatgaacagacaaaaacacccaaaacaaaaaagaagctaggctgggtgcagtggctcatgcctgtaatcccagcactttgggaggccggggcaggtggatcatgaggtcaagagatcgagaccagcctggccaacatggtgaaaccccatttctactaaaaatacaaaaataaaattagccgggtgtggtggtgtgtgcctgtaatcccagctactcgggcagctgaggcagcagtatcgcttgaatccaggagccaagatcgcgccactgcactccaacctggcaacagagcaagactccgtgtcaaaaaaaaaaaaaagaagctaatttagatccttatctaataatatgtctcttctctgaataaattctagatgaatgaatctaacacaccaagaaaaacacaaaatccccacaagagagaagtgaatatttaacaaacctatgccactcctcccaataaattctagatgaatgaatctaaaacaccaagaaaaacacaaaaccctcagaagagagaagtgaatatttaacaaacccaggggtgaagattaaacttagaattggaagaaacgagggaaaaaaagtgatagctgacactctgtgtatgtgtatcctctgtatttaaaaataacactaaaggccaacgaggaaaatgtttatgttatgtcaaattaataggaaaataagtacatcaaacctagtgccttcaaaagacaacagaacagtgtgtttagaacttctggggtccagatcccaccccctttgcttttccaagtgaatacctctcccccgcagtggtttactctcatcaacgtacattctagtctttcacattaaaataaaaatagcaagaacctgagcccctcaccatgtccttcgtcagctaccaatccagttctctatgagattgctcatgatcacagtaaaacttctccgaagtctccatctccacctcctcacctccctttccttttccacagtacttcaatctggcatctccccaccactccattcaaatggctctcatcaaaactccagtcttcatctcatgccagttctcaatcagtgcccaacacagccgctcatccctacaaaacacttcctcctttggctttcctccctccagcctcactggctattttcttcttagttgcctttgttggtgtctcctgtatcaaaactccaaatctgcactatgcataaggtagcccactagtcaggtcactacagagtccttgaaacacggttagtctgtgagatgtgctgtaaaattaaaatatccattcgactttgaagatgaagatttttttgaagacttagtatgtgttcaaagcatagtgttttgcatagacagggttaaacaaaagatattaacttcacctgtttcattttacgttacttttaagatggctagaaaaaatgtaagactatatctgtggcttgcattagatttctattggctagtgctgttctaaatgttggcagtgtcctagggtttggtcttgctcctccttagccttgccatcacagtaaacagtatcattatccatgcactggctcatattagaggcaccgaaagtagacagtagtattttcagacaatgggagtgtccacagagcagggttcccggggttcctggacactggattgctttgaggaactcaactctgcccatttatggtttttagtttctcctctggaatgtacctaaaggaatttaagaaacctccatttggctctgttgtttttctcttttttaaagtccacagtttgtaatggtaaagacttaagcaagttcctgaactctttcaggccctaaaattcatcatgtttgaggagaatgcaagcactgtttctctaaagacgactcatctaacaaatatgctgcctctgatcatgccagttccatcaattcaacagagggactgaaatctggcaccaggagctttgcaacaaaatctgtgccacttgttaaaagcgaaagacttgatttcatccatatcttaaaaacaacagggttttagaaaagacatacatacaagtcaagattcaatatttaaacttaaaactcatgcagtatcaaaactactaaccattctataagcactcctttcaagacgttgaccatgttttctcagaaggttcagatgacctgaagaatgctaataaaaagagtaaggtaacattaaattaaaaatcattaactttcatatactttggggatctgcctctgaaacgaggcaaaataattaaatgtcaatatttaacagttaagtctatgaaagacagttaacattaagaaaaaagacattctgattttttaacaaaattaaaatgagtctacttggaatattaatgccacatcttactcgccagccaattctacccaaggtcaattagccctaatagaagcaagaggcctaactctacaccagtgtgcccaacccaggtataaaccgtccattattcaaaggatttcttttcccattcaggagaatgacaaagggtaagatcctgggagacaggaatcaaagaagatagttctgaaaggtgcttcaaaaattatacagtgagcccaaccacctccttttagtttatattttattttactgagacagggtctggctctgccgcccaggctgtagtgcagtggcgcgatctctgctccctgcaacctcttgcctcctgggttcaagcgatcctcccacctcagcctcccgagtagctgggactacaggcatgcactactaagcccagctaatgtactgtgttgtatcgtgtgtgtgtgtgtgtatatatatacacacttttatatataatatataatatacaatatataatatataatatacaatatattatatataatatacaatatattatataatatataatatacaatatattatataatatataatatacaatatattatataatatatattatatattatataatatacaatatattatatgtaatatacaatatatgtaatatacaatatattatatgtaatatacaatatatgtaatatacaatatattatatataatatacaatatattatatataatatacagtatattatatataatatactgtatattatatataatatacaatatattatataatatacaatatattatatataatatacaatataatatatataatatataatatatataatatacaatatattatatataatatataatatacaatataatattatatataatatataatatacatattatatatatgtattatatataatatacgtattatatataatatacataatatacatattatatattatatataaaataaatatatattatatataaaatacatatataatatatatatatgtatatatacacttcgagacagagtctcactctgtcgcccaggctggagcgcagtgtcgtgatgtcggctcactgcaacctctgcctcccgggctcaagcgattctcctgcctcagcctcccaagcagcggggactacaggcgcccgccaccacgccaggccaaattttgtatttttagtagaggcagggtttcaccatgttggccaggctggtctcgaactcctgatctcaaatgatccacctacctcggcctcccaaagtgctgggacaacaggtgtgagccaccgcgccaggccaatttattgtatttttagtggagacggggtttcaccatgttggccaggctggtctcgaactcctggcctcaagtgatttgcccgcctcggcctcccaatgtgctgggattgcaggcgtgagccaccgcgcccggcctcagccacctcattttacatatgaggagaccaaaggaagagattaagccgtagttcctggccaaaggaaaaaagtacaagccagatctccagatcttgtgccccttcactaaataaatcacgtcccgtgcggacctaggctggaaacaaaccactcagcgtacgcccatttaattaacttccacttacacctgggcgcagggcgagccctagccccacaggaaacccacgattaaacgagggggggactgccgtgcggccccgccaggaagggcccggagagagtgggggacaccgccctgtgcccccagcacccggtggacaggcttctggggcttttctcttcctctcccctttctttgggacccctcagtgttcccacaccccactttccccagccgctcggacgctcgccacacacctcggcccacagatgcagaagcgcctcggcgttgccggcagagtgcgcctgcgccgatacgccatcgcgctagggacgctattgtgggtggagccagccggcgggaggcgggcccagagcgggccgagggggcggggtcacgagccgccagccgccgggtggagggtcccggccgggagccgcggaaagagtagggctccccagacaacggggtccgacgagcagttgggcacgggctgagtccgcctgccggcaggtaggacgtgaaggcaggggtggtgtgggggcggacgggggcgtcggcgcagctgggcgcggtggggagcggagaatggggagggcagggaccgggcacggccgagcaccgccgtctggcgcgcggaccggaccgaccagctgacgctcggctgggcgtgagggcctctctctctggtggtcgcgagcctgactcgtctttccctgtcgctgcctttctctggctgctgtcgaggccttggggagtgcacctgccggtccgtcttcccgggctcggtagtcacggagagatgaggaggaggaggaaagggcctcaccagtcacttctgagccttgcagaccaccgcttcctgctccctctctaaccccagagatggaatagattgaatgctgagagagctctaaactcggcaacggtcattttaaagtgaaagaccccagaaggttctaaagttactccctttccccaagtctgttctgtaagtctaaaggaacactgtcattatttttactagttgagatatgagattcttgttttctgttccttaggttaaattgtacttcccgcattaagctcatgctgccttttttttttttttttttgagatggagtctcggtctgtctgccaggctggagtgcagtggcgcgatctgggctcactgcaacctccgtctcctgggttcaagcaattatcctgcctcattctccctagtaactgggattacaggcgtgcgctaccacgcccggctgattttcgtatttttagtagacacggggtttgtccatgttggccaggctggtctggaattcctgacatcaggtgatcccccgcctcggcctcccagagtgctgcgattacaggtgtgagccaccgcgcccgacctcatgctgcctttttttttttttttttttttttaacatcgtgtgtgttcatgtgatcgctaaggaac

SEQ ID NO: 3076 - DNA, 6000 bp, Homo sapiens
atgaatacactataaaataacaataaaaagtataccatagggccaagtgtggtggctcatgcctataatcccagtgatttgggaggccaaggtgggatgattgcttgagaccacaaatcaactgactatatctgcggcacatgcctgtaataccagctactcagaagcctgaggcaggaggactgctggagctcaggagcccaacaccagcctaggcaatacagtgagacccacatctcaaaacaaacaaacaaaaaaccctaatggaatacatatgtatggacctattccactccatcgatctatttatctatccttatataaacactgcactgtttagattatgtaggttttttgttgttttttgttttctttttgacagagtctcactctgtcgcccaggcaggatggagtgcagtggcctgatctcagctcactgcaacctccgcctcccaggttcaagcaattctcctgcctcagcctcccaagtagctgggattacagatgcccaccaccatacctggctaatttttgtattttgggtagagacagggtttcaccatcttggccaggctggtcttgaactcttgacctcgtgatccacccgcctcggcttcccaaagtgctgggattacaggtgtgagccaccgcaccaggcagattactgtagtttttaaagtaagtcttgaagctagtagtataaattttccagctgtgtccttccttttcaagacggactattctaggtccttggtacttccacataattttagagtctgcttgtcaatttctatttaaaagcacctttaagattatggggccaggcacggtggctcacgcctgtaatcccagcactttgggaggccgaggcaggaggatcacgaggtcaggagatcgagaccagcctggataacccggtgaaaccccatctctactaaaaattcaaaaaattagctgggtgtggtggcgggcacctgtagtcccagctactcaggaggctgaggcaggagaatggcgtgaaactaggaggtgcagcttgcagtgagcaaagattgcgccacggcagtccagcctgggcgacagagcgagactccatctcaaaaaaatatatatatatattatgacggtgattacataaaatctgaaacactgattttaagtagagaacggagaaattttgagactaagaaagacacagaaaataaaagggaagagattataatttaaaaataaaacaaatatttgaaaattccattaagtttaacaatatggaggtcactgggatcttcatatcagtagcttcattgccctggtggaggaagccagagtgaaacatcatttcatgctttcattctgattaataaaacgtgagttgtagctaggtacacagacaacaaaaaagactacatcacctttctttctttctagttaactatgggcacttacaaagaattggctaatgaaatatgagtggatgtgtcatgtgcaatttctgaaaagtgtccttaaaaagaagggtatgtgcctttcttcctccttccctcctccctcttgctagaatgagcaactgacagtttgaattaaagcagtcatcttaacaccaagcatcttattaaggacggtagagcagccagatagaagaatccgagtccctgatgattacagagctgcttccataaaagcatggctgcctacctatgcaattacatacatatttaagccagtattatcttgttttctgtgtaacacagctgattccaacacaccacagttttttgttttttggttttttttttgagacagagtctctcactctgtcacccaggctggagtgcagtggcgcgatctcggctcactgcaaactccgtctcccaggttcacaccattctcctgcctcagcctcccaagtagctgggactacaggcggctgccaccacgcccagctatttttttgtatttttagtacagacggggtttcaccgtgttatccaggatggtctcaatctcctgacctcgtgatccacccgcctcggcctaccaaagtgctgggattacaagcgtgagccaccgtgcccggcccagttcttaatatctatatgccagtgatctcagagtacctctagctacgatctttcctgacctatctatccaacagctattggaacatttccacttggatgtccaacaggcctttcatactcaactgtccaaaagagaattctttactttttctccccaaactcttcctccacaaatcttctccatcactatccatcaaatggtcaatgctttttgattgtaaatggtaaatgatctacctcttaactgaagcaaaaaaacagatgttgcccttgattccttgttttccccttactctacatctaaaccacgcagagttgctcttctctaccatcaaaacatacccccaaatccatccatttttctctgtattcactgctacactcttgtctagttcaagccaacatcatctctcatttggagtaataaaatgacacctcaaaggtgctttttgtaacttaagaaatccttctcagagacatttaaaaaaaaagttctggagatagatagtagtgctggttgcacaatgtgaatgtcactgaactcaacaactcaacatggttaacatgataaatcttatgtgtaacaagatttaacaaagcaaacaaaaaagaaatctttcctagagacaatggtctcttatattcctttccaaataccttgcagctgtgccattcacatttaggtctttatctggaaactgttgtcaatagtttgaaagtaagaatctaatcctgtctgtataccataacaatgccagatatctcagcaaccatatatttcatcatcctttattgaatagtctatgctttccccctgctttgcaataccacttagtggtatactaaactcccgtatgtaaataggtatgtttctagtgtctctattctgttccatgaatctaattctctatccctgaatcaatatcataccatcttaataattacaactttatattaagctttggtatctgatagggagagaccttatttttcttcttcttcaaaattgacttcactattcttggtcccttgcctttccatataaattttaagttcagcatggcaaattccataaaacaatatggtgattttaattggcattacactgaattcgtagaactgaggaaaactgacatctttttgttgagtctttccatctattaatacggtatatctcaccatttacttgggtcatcttttgtgttccaacagagccttacaattttctgtctaaaggactacacagctttaggttcatctatttctaggtacctttagttttgaatgccattatgaatagtgtctttttattattaaaactcctagttaattgttactggtatacagaagtttttaaatgcagaaattaaggccatttctgacatccccctggccaaaataacccctctagtcactctttatcacatcaccaaatggtacttattccttaactgatttcagagtctctctgcccccaccaaaattagttacctgttcaccattgtatcccaagcgtctagaataatagctgacacacatcaagtgcacaaaaatggaactgatgagatcaaggaagagaatgtatgcaagatgaaaaaaagcaaataaaagatacttgggaagaagaagacttggaggcaatttttttattttaaagagagtgcaacaatatggaaatcaccagttggaaaagatttgagggatagaaagagggaactaaatggaagagctgggttccttagcgatcacatgaacacacacgatgttaaaaaaaaaaaaaaaaaaaaaaaggcagcatgaggtcgggcgcggtggctcacacctgtaatcgcagcactctgggaggccgaggcgggggatcacctgatgtcaggaattccagaccagcctggccaacatggacaaaccccgtgtctactaaaaatacgaaaatcagccgggcgtggtagcgcacgcctgtaatcccagttactagggagaatgaggcaggataattgcttgaacccaggagacggaggttgcagtgagcccagatcgcgccactgcactccagcctggcagacagaccgagactccatctcaaaaaaaaaaaaaaaaaaggcagcatgagcttaatgcgggaagtacaatttaacctaaggaacagaaaacaagaatctcatatctcaactagtaaaaataatgacagtgttcctttagacttacagaacagacttggggaaagggagtaactttagaaccttctggggtctttcactttaaaatgaccgttgccgagtttagagctctctcagcattcaatctattccatctctggggttagagagggagcaggaagcggtggtctgcaaggctcagaagtgactggtgaggccctttcctcctcctcctcatctctccgtgactaccgagcccgggaagacggaccggcaggtgcactccccaaggcctcgacagcagccagagaaaggcagcgacagggaaagacgagtcaggctcgcgaccaccagagagagaggccctcacgcccagccgagcgtcagctggtcggtccggtccgcgcgccagacggcggtgctcggccgtgcccggtccctgccctccccattctccgctccccaccgcgcccagctgcgccgacgcccccgtccgcccccacaccacccctgccttcacgtcctacctgccggcaggcggactcagcccgtgcccaactgctcgtcggaccccgttgtctggggagccctactctttccgcggctcccggccgggaccctccacccggcggctggcggctcgtgaccccgccccctcggcccgctctgggcccgcctcccgccggctggctccacccacaatagcgtccctagcgcgatggcgtatcggcgcaggcgcactctgccggcaacgccgaggcgcttctgcatctgtgggccgaggtgtgtggcgagcgtccgagcggctggggaaagtggggtgtgggaacactgaggggtcccaaagaaaggggagaggaagagaaaagccccagaagcctgtccaccgggtgctgggggcacagggcggtgtcccccactctctccgggcccttcctggcggggccgcacggcagtccccccctcgtttaatcgtgggtttcctgtggggctagggctcgccctgcgcccaggtgtaagtggaagttaattaaatgggcgtacgctgagtggtttgtttccagcctaggtccgcacgggacgtgatttatttagtgaaggggcacaagatctggagatctggcttgtacttttttcctttggccaggaactacggcttaatctcttcctttggtctcctcatatgtaaaatgaggtggctgaggccgggcgcggtggctcacgcctgcaatcccagcacattgggaggccgaggcgggcaaatcacttgaggccaggagttcgagaccagcctggccaacatggtgaaaccccgtctccactaaaaatacaataaattggcctggcgcggtggctcacacctgttgtcccagcactttgggaggccgaggtaggtggatcatttgagatcaggagttcgagaccagcctggccaacatggtgaaaccctgcctctactaaaaatacaaaatttggcctggcgtggtggcgggcgcctgtagtccccgctgcttgggaggctgaggcaggagaatcgcttgagcccgggaggcagaggttgcagtgagccgacatcacgacactgcgctccagcctgggcgacagagtgagactctgtctcgaagtgtatatatacatatatatatattatatatgtattttatatataatatatatttattttatatataatatataatatgtatattatgtatattatatataatacgtatattatatataatacatatatataatatgta

SEQ ID NO: 3077 - DNA, 6000 bp, Homo sapiens
tctatccaacagctattggaacatttccacttggatgtccaacaggcctttcatactcaactgtccaaaagagaattctttactttttctccccaaactcttcctccacaaatcttctccatcactatccatcaaatggtcaatgctttttgattgtaaatggtaaatgatctacctcttaactgaagcaaaaaaacagatgttgcccttgattccttgttttccccttactctacatctaaaccacgcagagttgctcttctctaccatcaaaacatacccccaaatccatccatttttctctgtattcactgctacactcttgtctagttcaagccaacatcatctctcatttggagtaataaaatgacacctcaaaggtgctttttgtaacttaagaaatccttctcagagacatttaaaaaaaaagttctggagatagatagtagtgctggttgcacaatgtgaatgtcactgaactcaacaactcaacatggttaacatgataaatcttatgtgtaacaagatttaacaaagcaaacaaaaaagaaatctttcctagagacaatggtctcttatattcctttccaaataccttgcagctgtgccattcacatttaggtctttatctggaaactgttgtcaatagtttgaaagtaagaatctaatcctgtctgtataccataacaatgccagatatctcagcaaccatatatttcatcatcctttattgaatagtctatgctttccccctgctttgcaataccacttagtggtatactaaactcccgtatgtaaataggtatgtttctagtgtctctattctgttccatgaatctaattctctatccctgaatcaatatcataccatcttaataattacaactttatattaagctttggtatctgatagggagagaccttatttttcttcttcttcaaaattgacttcactattcttggtcccttgcctttccatataaattttaagttcagcatggcaaattccataaaacaatatggtgattttaattggcattacactgaattcgtagaactgaggaaaactgacatctttttgttgagtctttccatctattaatacggtatatctcaccatttacttgggtcatcttttgtgttccaacagagccttacaattttctgtctaaaggactacacagctttaggttcatctatttctaggtacctttagttttgaatgccattatgaatagtgtctttttattattaaaactcctagttaattgttactggtatacagaagtttttaaatgcagaaattaaggccatttctgacatccccctggccaaaataacccctctagtcactctttatcacatcaccaaatggtacttattccttaactgatttcagagtctctctgcccccaccaaaattagttacctgttcaccattgtatcccaagcgtctagaataatagctgacacacatcaagtgcacaaaaatggaactgatgagatcaaggaagagaatgtatgcaagatgaaaaaaagcaaataaaagatacttgggaagaagaagacttggaggcaatttttttattttaaagagagtgcaacaatatggaaatcaccagttggaaaagatttgagggatagaaagagggaactaaatggaagagctgggttccttagcgatcacatgaacacacacgatgttaaaaaaaaaaaaaaaaaaaaaaaggcagcatgaggtcgggcgcggtggctcacacctgtaatcgcagcactctgggaggccgaggcgggggatcacctgatgtcaggaattccagaccagcctggccaacatggacaaaccccgtgtctactaaaaatacgaaaatcagccgggcgtggtagcgcacgcctgtaatcccagttactagggagaatgaggcaggataattgcttgaacccaggagacggaggttgcagtgagcccagatcgcgccactgcactccagcctggcagacagaccgagactccatctcaaaaaaaaaaaaaaaaaaggcagcatgagcttaatgcgggaagtacaatttaacctaaggaacagaaaacaagaatctcatatctcaactagtaaaaataatgacagtgttcctttagacttacagaacagacttggggaaagggagtaactttagaaccttctggggtctttcactttaaaatgaccgttgccgagtttagagctctctcagcattcaatctattccatctctggggttagagagggagcaggaagcggtggtctgcaaggctcagaagtgactggtgaggccctttcctcctcctcctcatctctccgtgactaccgagcccgggaagacggaccggcaggtgcactccccaaggcctcgacagcagccagagaaaggcagcgacagggaaagacgagtcaggctcgcgaccaccagagagagaggccctcacgcccagccgagcgtcagctggtcggtccggtccgcgcgccagacggcggtgctcggccgtgcccggtccctgccctccccattctccgctccccaccgcgcccagctgcgccgacgcccccgtccgcccccacaccacccctgccttcacgtcctacctgccggcaggcggactcagcccgtgcccaactgctcgtcggaccccgttgtctggggagccctactctttccgcggctcccggccgggaccctccacccggcggctggcggctcgtgaccccgccccctcggcccgctctgggcccgcctcccgccggctggctccacccacaatagcgtccctagcgcgatggcgtatcggcgcaggcgcactctgccggcaacgccgaggcgcttctgcatctgtgggccgaggtgtgtggcgagcgtccgagcggctggggaaagtggggtgtgggaacactgaggggtcccaaagaaaggggagaggaagagaaaagccccagaagcctgtccaccgggtgctgggggcacagggcggtgtcccccactctctccgggcccttcctggcggggccgcacggcagtccccccctcgtttaatcgtgggtttcctgtggggctagggctcgccctgcgcccaggtgtaagtggaagttaattaaatgggcgtacgctgagtggtttgtttccagcctaggtccgcacgggacgtgatttatttagtgaaggggcacaagatctggagatctggcttgtacttttttcctttggccaggaactacggcttaatctcttcctttggtctcctcatatgtaaaatgaggtggctgaggccgggcgcggtggctcacgcctgcaatcccagcacattgggaggccgaggcgggcaaatcacttgaggccaggagttcgagaccagcctggccaacatggtgaaaccccgtctccactaaaaatacaataaattggcctggcgcggtggctcacacctgttgtcccagcactttgggaggccgaggtaggtggatcatttgagatcaggagttcgagaccagcctggccaacatggtgaaaccctgcctctactaaaaatacaaaatttggcctggcgtggtggcgggcgcctgtagtccccgctgcttgggaggctgaggcaggagaatcgcttgagcccgggaggcagaggttgcagtgagccgacatcacgacactgcgctccagcctgggcgacagagtgagactctgtctcgaagtgtatatatacatatatatatattatatatgtattttatatataatatatatttattttatatataatatataatatgtatattatgtatattatatataatacgtatattatatataatacatatatataatatgtatattatatattatatataatattatattgtatattatatattatatataatatattgtatattatatatattatatattatatatattatattgtatattatatataatatattgtatattatataatatattgtatattatatataatatacagtatattatatataatatactgtatattatatataatatattgtatattatatataatatattgtatattacatatattgtatattacatataatatattgtatattacatatattgtatattacatataatatattgtatattatataatatataatatatattatataatatattgtatattatatattatataatatattgtatattatatattatataatatattgtatattatatataatatattgtatattatatattatatattgtatattatatattatatataaaagtgtgtatatatatacacacacacacacacgatacaacacagtacattagctgggcttagtagtgcatgcctgtagtcccagctactcgggaggctgaggtgggaggatcgcttgaacccaggaggcaagaggttgcagggagcagagatcgcgccactgcactacagcctgggcggcagagccagaccctgtctcagtaaaataaaatataaactaaaaggaggtggttgggctcactgtataatttttgaagcacctttcagaactatcttctttgattcctgtctcccaggatcttaccctttgtcattctcctgaatgggaaaagaaatcctttgaataatggacggtttatacctgggttgggcacactggtgtagagttaggcctcttgcttctattagggctaattgaccttgggtagaattggctggcgagtaagatgtggcattaatattccaagtagactcattttaattttgttaaaaaatcagaatgtcttttttcttaatgttaactgtctttcatagacttaactgttaaatattgacatttaattattttgcctcgtttcagaggcagatccccaaagtatatgaaagttaatgatttttaatttaatgttaccttactctttttattagcattcttcaggtcatctgaaccttctgagaaaacatggtcaacgtcttgaaaggagtgcttatagaatggttagtagttttgatactgcatgagttttaagtttaaatattgaatcttgacttgtatgtatgtcttttctaaaaccctgttgtttttaagatatggatgaaatcaagtctttcgcttttaacaagtggcacagattttgttgcaaagctcctggtgccagatttcagtccctctgttgaattgatggaactggcatgatcagaggcagcatatttgttagatgagtcgtctttagagaaacagtgcttgcattctcctcaaacatgatgaattttagggcctgaaagagttcaggaacttgcttaagtctttaccattacaaactgtggactttaaaaaagagaaaaacaacagagccaaatggaggtttcttaaattcctttaggtacattccagaggagaaactaaaaaccataaatgggcagagttgagttcctcaaagcaatccagtgtccaggaaccccgggaaccctgctctgtggacactcccattgtctgaaaatactactgtctactttcggtgcctctaatatgagccagtgcatggataatgatactgtttactgtgatggcaaggctaaggaggagcaagaccaaaccctaggacactgccaacatttagaacagcactagccaatagaaatctaatgcaagccacagatatagtcttacattttttctagccatcttaaaagtaacgtaaaatgaaacaggtgaagttaatatcttttgtttaaccctgtctatgcaaaacactatgctttgaacacatactaagtcttcaaaaaaatcttcatcttcaaagtcgaatggatattttaattttacagcacatctcacagactaaccgtgtttcaaggactctgtagtgacctgactagtgggctaccttatgcatagtgcagatttggagttttgatacaggagacaccaacaaaggcaactaagaagaaaatagccagtgaggctggagggagga

SEQ ID NO: 3078 - DNA, 6000 bp, Homo sapiens
cccgctcctgagcagcacgggcctggggttgccccaggagcaaatccattcagactcgcaggtactgaagcccagggccgtgctggtggcctgtggctgatggtacgtcatcccctgagggcgaggctgtttgctgctgggttcccggggccctgggacccctaagcaccagcctgtctggctccagtgtcccccattcctcatgcttgcagatgctccccaacgaaggatttttttctttctttctttaagacagggtctcggctgggcacggtggctcacgcctgtaatcacagcactttgggaagccgaggcgggtggatcccgtgaggtcaggtgttcaagaccagcctggccaacatggtgaaacccccgtctccaggttacacccgaggatggaagtcacaggcttccggctctgtgcctcagttccccccctcaaaccctggtctgacagcaagccaccactgtattcagctttgagggtctggagtgatggtccctctgtttgtgtaatatttacagagggtaggaggaaagttccttcgaccgtgacaaagttcagaagaaaataaagcagggctgccgagggggcctgtgctttgcttgtcaccagcaggacgagaagcggaaatccagccacctggagttcctccatccagcctcctcagcaccgctgcctgctccactcacacccaccacttctctgcacagctggcgctcctccagccctctgtgcttctgcaaatgtctccttcctccctccttccacactctcccagccaacgtcaggccctcagagcattttcctggtgcccagttattctcccttcctttctcctggaggcccctggccacgaggtatggaccagacctccttctgcaggtctcctgaacccggcagccagatgacacgagagctccacagaggcagggactgacctgttcctcctcatgtccccaggccccacacagagcagcgctacagaaatccatgagctgatgggcagtcttagcagatcaaagacaaagggctgggcagagaacccccggggccacctttcctgtttcctgtgctgtggtcgctctgcacacactcctggcagggacacgctgtatgcccgactcacacccagtggtcctcctccccagctgcggcccccagcacagagcctgtcgcactggcacctgccacagtgactgatcgaacgtgtccgtgtggctgcggtctggggtcccaagccttggaggggaagcacacacagggctctccaaactgagggttgggacccatgtaccccgggaaatcggcttagtggattgcaattgaaaaaaaaaaaagggtcaagccagtggcccacacctgcaatctcagcactctgggaggcccgggagggaggatcgcttgagcctgggagttaatgagacaccatctctacaaagaattaaaaaacgaactgagcgtggtggcatgtgcctgtggtcccagctgttcgtgaggctgaggcaggaggatcgtttgagcccaagagtttgaggctgcagtgagccaagagtgtgccatgggtgagatcccacctctggagaaaaaaagagaaatgaatcggaaaagtagagcccccttttatgtaataagggcggctactgcaacttactttagctgtacctgcacacctgagtgtgtacactctatcagagtacaaaacgtatttcttactgcaggttgtgatgaaaaaattggaaagccactaggctgcagcgtcctggctttcctccgtgccaggaccctctttactctgtagttctcctctccaggcaagctggcctacctttctcagaacaaaaacacgaacgggggctaacgtctgtgcagcgatgtttacacagatgatctcatttaccctgtgagggttgaggggcgtctggaggactgtgtgatcttgggtaaacggctcaacctctctgggcttcagttccttcctaggtgaagctggctgtgttgaggatgcagtgaggctttgtgcacagcgagtgtgagatgaaagcgatcatcagctccactgaacagacagaggaaccaagtgactgacgagcccttcggcaacagtgagggtgctgggagggttcaattcaagctgctgcacagaggcttccagatacgccctgcagcccccagcaccaccgcaccacaacagctaacacgcactcagcacgcaccgcacaccgcgcaccgttctaagtccttcgagttcatttcctcattttatcttcacaagagtccgaagggctgcggactgttcttcattctgagatgaagacactgaggctcacgcttaaccccctgctccaggtcacttagctcttagtggtgaaaccaagggtgtggccctacagcccgaatccctgtgccctgggaaagccggttctatggccagacctgccccatccttacctcctagccccatcctcgatggtctctccttcttgcactttgcccccaaagccattccaccggccggccccgaagcctcgctttttcatgcccaggagaactcgctgaggctgcaggaccagcaccagggtatagagcctggaggcgcccatggtccctgggttctgaaaggaaggtgagagggcagagtcagccatgacgtgcgtggaggaagcacgtgccaggggccaggaggaaggggacgtgctctgggaggcagtggggggcgggggggtatgctgtaactccccagccctgccacgtgtggcttcccttgtggcaggtggaaaactgccattgaaccagtgattttctggggtagaaacagaacccagtggtcagcagggctgatcaagcagagcagaggccggcgctaccttccttctccacaagtcagtactcaggtgcagaggacaacatcacctttccagagcgtgctcttgctcctgcgtctacccccaggaaccccctgcttataggcacacagtgaggaacaacagtccccgtgcctgattggcaccaaaataaccacgcagtttatcctgtggtcctcaggtcaggcctttggattaacaggaacttctttcagtctagtgggacctggcctctctgtagcaggcttccagattcccaggaaatgtgtggctgtagacacaggtccacccagccaggcccggctagtcctccctcctgtgataggagtttataccccacccactctgctcctgctgtggctactgtgggacctggcacccaggggggccactggaagtcacaagggtccttcctgctcccataggtgtgcaggtccaggtccagaggactctgagggcgatgcctccgccaggtccctgctgaaaaaaggaccctggagaaatgctggagggccaggaccaactttcctttatttattttgagacaagatcctgctctgttgcccaggctggaggagagtggcgtgatcgcggttcactgtaacctccgcctccctggctgaagccatcctcctgcctcagcatcccacatagctgggaccacaggcatgagccgccacacccagctaatttctgtatttttagtagagatggggttttgtcacgttgcccaggctggtcacgaactcctgagctcaagcgatccacccacctcagcctcccaaagtgctgagattacaggcgtgagccactgcgcccagccaggaccaacttttctggggtccacacctggacaagacacagggttcaggaccagtgatccttcttggaagttgtggtgtctgagaaaagggaccagatgataaggaagggggcagggaagtgctgggtagaggagggcgtggtctctggccagggctccacacccaggcctgtgcccagggacctgggtgaggacaggcatttctgtttttttgcccaaatgttgcatttcccgagcccgccacgtccccgtcctgtgcctataaaaaaaccccagtggttttttatagtgggcagagacacaagccgctggacgtcaagaggacgtggaaagcacaccaacaggcaccagcaggccatcaactgatggaaccatgagtttggcaggggcggtcagaggagagcccaggctgctcagcagcccgactccaggggaaaatcaccttcccactccaactgccttctggctcccccatctgctgagggctaattccactcataaaaccttgcactcactctccaagccgccgtgtgatctgattgctccagtacatcaaggcaagaaacctagggatacagaaagccctctgtccttgcgataaggcagggagtctaacagctgactaacacaagccacctacaaggctaaactgaaagagcaccctctaacacatgcctgctggggcttcaggagctgcaaacattcacccctagacactgccgtggggtgggagcccctcagcctgcctgtctgtatgttcccctagaggcttgagaagcggggcactgaagaagtgagccacatcctcatcgcacgcccttcgaggaggacaagggaacctttcccatttcactgagactgggtcctggtggcggaggcaggtcagacagggtaaatgggtttgtggcttagtttcacaccaggcccgtgtactttgtcccgacactgatctgtttctgccagaagccacggtttccaaagtaaatttttgtgatttactcctggtctcccccaagcctccgccccgctctccttgtctctctcccaaacccccggccccgctctcctcgtctccctcgagcccccgaccctgctcttctggtctccttcgagctcccggccccgctctcccccaagcccatggctcagctcccctagtctcctgccgcccgctggcccggctcccctccctggtcaccacgactcctggaatccccgcgcgcgcttttcgtacctgcaccgccgcttccgggggcgtggcctctgaccggaagtgaggccaggcacttccggcggcgcgctgcaggcgcggggaacaccaatggcggggtgagctgggcgctgctgctgcgcgtgcagacagcgggagtggttgggggtccgcccggtcgccttcctcggtcctggcctcggggctgggtgccgagcgctgggcaccgtccccgcactcagcgagcgcgacaggggcgaggccaggattccgggtcgcagttccccgggaggagggcgccctcaggtctccaggggcagggccggcggggccgtggggaggccggggccggcggcggagtccaggtggggggcgcagcgccggggcccagatccaaggcgccgggggcgagcccggggcgggatttcgcttctgggccgggtagctccattgcccgcgcttcctgggctgtcgagtgggccctggcccccgggaccggcttgtgccattttcccgggagaccccttaagcgaggggaagacagcgactcacggtcagcagtcagtgcctcctggcttgtcagcacgctttggtgttgcagaagctagaagctttggccttggagccatgagggtggtaacttttatttatttatttaaatcagaaagatggacatagagaccgggcttggtggcccacacctgtcatcccagcactttggaagtctgaggcaggaggatcgtttgagcctaggagttcgagaccagcctaggcaatgtagtgagatgccatctctaaaaaaggtttttaagaattaaaaaaaaaaaaaaaattagcccaggcatggtggtgcacacctgtagtcccagctactcaggaggctgaggtgggaggttcacttgagacccagaggttatggcagcaatcagctgtgattgtgccactgcaactccagcctggatgatagcaaaacaaaaatggccgggtgaggtggttcacgcctgtaatcccagcactttgggaggccaaggtgggctgatcgccagaggtcaggagttcgagaccagctcggccaacatggtgaaatcccatctctactgaa

SEQ ID NO: 3079 - DNA, 6000 bp, Homo sapiens
tcacgcctcactttatgctcctgagctttcactcctataatatccagtatgttacaaccttcggaaatttccaccgaaggcaaacagctttggctgcatgcttgtgacttccgggaggacaagcccaggcagatcacgctcacgctctctccttctgtcacttcctcctacaaggcacgctgggccactctcctgcttcatctcaagagcacttaggggaacagaaaccactgaaatcagttactaggaggactccacggtgataagctcagcaatgagaaaaggaactgacatttccaacacaaattcacttatttagtcaataaatgttgagctgaaaaacaataaaaaggctttcaggctgaccacgatggaagcaccaggaagcacctcgaggatgctgggaggcagaggcgggcggatcacctgaggcctggagttcgagaccagcctggccaacatggcaaaacctcatctctactaaacatacaaaaattagccggaaatcacttaaacacaggaggcaaagattacagtgagccgagatggcgccattgcactccagcctgggcaacagagtgaggctctataaacaaaaaaaaaaaaaaaaaaaaaaaatgctgttgaaaagcccgaagaggcatatccccgcctaagtatgggcaggggccacccaaggggatgcaggtagacaccaagagttcatggcaaacctaccgcaaaccagcagcgaggcagatgtgcagatccagggggccagcattccatttctgcactttcaacaagtcatgaaaccctgagcctgttttctcaccaataaatggggaccagtgtccctactctaaggtatttgggagagacttgggagagctctgggtggactgtctcaccctgttcaaatgccagtgcatgcagctaccctggctttacagcaggaaacataaatggcaaggatattcaccacagcacacgcatcccagccaaaagccaaaagcaaccttgatgccacagtgagggagctggttaaagaacctacggtgcaagcactacatggaataggatgaaactttcccaatgacgacagtgtcttcagttgcatgggcggttggctgatctcattattcaggagaacctttttatatagaaaatcttactcaaaaccctaagatacaaaacagatgaaaactgtgtctcagcttcatccagagcaaagaatccatagccctggccatgaagcctcttctaggttccggacggagcagccccagtggggccaccaggaaagccccagggcttatgcgacttggaaatttagctgtgctgttggggaaagatgtcaatacatcattaagagtagccgggcaccatggctcacatctgtaatcccagcactttgggaggccgaggtgggcagatcacctgaggtcaagagttcgagatcagcctagccaacatagtgaaaccctatctctacttaaaaaaacaaaaagaaaaaattagctgggtgcggtggcgggcgcctgtaatcccagctacttgggaggctgaggcaggagaatcgcttgaaccaggtaggcagaggttgcagtgagccgagatcacaccattgcactgcagcctgggcaagagtgagactccatctggaggggggggaagaacaaaaataataacaataataattatatatatatatatatatatatatatatatatatatatatatatatatataatacatatatgtatgtatcattaagcaaaaatagctccaataggctgcaaattagcaagaaaagtatggcacaacatcgcttttgaaaatgtgagggatctatgcatgcacaagcctggaaggatgcacaccaccatgctggtgctggtacctgcgggcggtctcatgcgaggtgatttccatgttcactgcacctttctaccttgtctttcattttgaaaatggcagcatcctatttttatcatcaccattgctaaaccacccactcggaagcacacgccttcaaaaaagggctccaccatcccgcatccactggcaaaggcagcttgcccatgcccactcagcctcaggggagccagaaggtgccaacagcagtgcagaggcccacctgtgcctgcggcgttgaccttctgcaccgccacctgactccaggccccaggagctgccccacagtctaacacccgaaggccgggccgcagaatctggtgcctctcgttcacctccaggagcttgaaggcgcttcgacaccggtaactctccaccttcgcagccttcacaaatgggtccctgagatgtcgggtcagccacaggtgctcagcgcctgtccgattcttgcagcgactcccaacagtgtggaacccttgacgctgaaaggaaacacacaccagcttcaagtacctggtgggagagaagaggagcaggcaggttggcatcacacagaacggcaggtcatgagctgggagggccctcggatcaactcattcatttctagagatggggcaccaaggcccaggaggggaggtgaactgataaggctacacagatggaaagcaggcatcacaggccaaactgtgtccccgcaaaattaatgtgttgatgtcctaacccttggtacctcagaatatgggggtattcggagacacctgtaattccagcacttttggaggccaagacaggtggatcccctgaggtcaggatttcgagaccagcctggccaaccgtggccaacatgatgaaaccccgtctctactaaaatgcaaaaattagcctggcgtggtggcagatgcctataaacccagctactcgggaggctgaagcaggagaatcgcctgaacccaggaggcagaggttgcagtgagccgagattgcgccactgcactccagcctgggcgacagagcgagactctgtctcaaacaataactaaatacatcaattaattaattaaagtaatattattttctcatctggcaaaaatgttcattgggctctgacaggctgcaagaaaacctcataaggacagatccttgccttagtgacctagttccagggctttgacagctagtacagagggtctggcctgtcacatttctttttttcttctttttttcgagacagggtctcgctctatagcccaggctggagtgcagtggtgaggtcacggttcaacgcagattcgaactcctgggctcaaacaatcctctcacctacatgtcttaaataaaattgaactaaacctgtgtcaatcgttgaaggacaatttccaagattctctagacaattgttacaataaatgtaacaatttattcacagcccacaatagctaagcaggtggaagctatacacacctccccttgtttaactctgacaacaacctcaccaaggaagttctatgtcctctttttctttttttaagacggagtctcactctggcgcccaggctggagtgcagtgacagctcactgcagcctccgactcccgggttcaagcaattctcctgccccagcctcccaagtagctgggattacaggcacacctgctaccatgtccggctaatgtttgtattttcagtatagatgggttccaccatgttggccaggctggtctcaaactcctgacctccgctgatctgcccgccttggcctcccaaagtgctgggattacaggtgtaagccactgcacccaggcatttctttcttctttttgtttttttagagacagggttttactattacccaggctggagtgcagtggcatgatcacagctgactgcagccacagcctctggggctcaagtgaacctcccacctcagcctcctgagtagctgagactacaggtgtgtgccaccacttccggctaatttttctattttcagtagagatgggatttcaccatgttggccgagctggtctcgaactcctgacctctggcgatcagcccaccttggcctcccaaagtgctgggattacaggcgtgaaccacctcacccggccatttttgttttgctatcatccaggctggagttgcagtggcacaatcacagctgattgctgccataacctctgggtctcaagtgaacctcccacctcagcctcctgagtagctgggactacaggtgtgcaccaccatgcctgggctaattttttttttttttttaattcttaaaaaccttttttagagatggcatctcactacattgcctaggctggtctcgaactcctaggctcaaacgatcctcctgcctcagacttccaaagtgctgggatgacaggtgtgggccaccaagcccggtctctatgtccatctttctgatttaaataaataaataaaagttaccaccctcatggctccaaggccaaagcttctagcttctgcaacaccaaagcgtgctgacaagccaggaggcactgactgctgaccgtgagtcgctgtcttcccctcgcttaaggggtctcccgggaaaatggcacaagccggtcccgggggccagggcccactcgacagcccaggaagcgcgggcaatggagctacccggcccagaagcgaaatcccgccccgggctcgcccccggcgccttggatctgggccccggcgctgcgccccccacctggactccgccgccggccccggcctccccacggccccgccggccctgcccctggagacctgagggcgccctcctcccggggaactgcgacccggaatcctggcctcgcccctgtcgcgctcgctgagtgcggggacggtgcccagcgctcggcacccagccccgaggccaggaccgaggaaggcgaccgggcggacccccaaccactcccgctgtctgcacgcgcagcagcagcgcccagctcaccccgccattggtgttccccgcgcctgcagcgcgccgccggaagtgcctggcctcacttccggtcagaggccacgcccccggaagcggcggtgcaggtacgaaaagcgcgcgcggggattccaggagtcgtggtgaccagggaggggagccgggccagcgggcggcaggagactaggggagctgagccatgggcttgggggagagcggggccgggagctcgaaggagaccagaagagcagggtcgggggctcgagggagacgaggagagcggggccgggggtttgggagagagacaaggagagcggggcggaggcttgggggagaccaggagtaaatcacaaaaatttactttggaaaccgtggcttctggcagaaacagatcagtgtcgggacaaagtacacgggcctggtgtgaaactaagccacaaacccatttaccctgtctgacctgcctccgccaccaggacccagtctcagtgaaatgggaaaggttcccttgtcctcctcgaagggcgtgcgatgaggatgtggctcacttcttcagtgccccgcttctcaagcctctaggggaacatacagacaggcaggctgaggggctcccaccccacggcagtgtctaggggtgaatgtttgcagctcctgaagccccagcaggcatgtgttagagggtgctctttcagtttagccttgtaggtggcttgtgttagtcagctgttagactccctgccttatcgcaaggacagagggctttctgtatccctaggtttcttgccttgatgtactggagcaatcagatcacacggcggcttggagagtgagtgcaaggttttatgagtggaattagccctcagcagatgggggagccagaaggcagttggagtgggaaggtgattttcccctggagtcgggctgctgagcagcctgggctctcctctgaccgcccctgccaaactcatggttccatcagttgatggcctgctggtgcctgttggtgtgctttccacgtcctcttgacgtccagcggcttgtgtctctgcccactataaaaaaccactggggtttttttataggcacaggacggggacgtggcgggctcgggaaatgcaacatttgggcaaaaaaacagaaatgcctgt

SEQ ID NO: 3080 - DNA, 6000 bp, Homo sapiens
ccgaagaggcatatccccgcctaagtatgggcaggggccacccaaggggatgcaggtagacaccaagagttcatggcaaacctaccgcaaaccagcagcgaggcagatgtgcagatccagggggccagcattccatttctgcactttcaacaagtcatgaaaccctgagcctgttttctcaccaataaatggggaccagtgtccctactctaaggtatttgggagagacttgggagagctctgggtggactgtctcaccctgttcaaatgccagtgcatgcagctaccctggctttacagcaggaaacataaatggcaaggatattcaccacagcacacgcatcccagccaaaagccaaaagcaaccttgatgccacagtgagggagctggttaaagaacctacggtgcaagcactacatggaataggatgaaactttcccaatgacgacagtgtcttcagttgcatgggcggttggctgatctcattattcaggagaacctttttatatagaaaatcttactcaaaaccctaagatacaaaacagatgaaaactgtgtctcagcttcatccagagcaaagaatccatagccctggccatgaagcctcttctaggttccggacggagcagccccagtggggccaccaggaaagccccagggcttatgcgacttggaaatttagctgtgctgttggggaaagatgtcaatacatcattaagagtagccgggcaccatggctcacatctgtaatcccagcactttgggaggccgaggtgggcagatcacctgaggtcaagagttcgagatcagcctagccaacatagtgaaaccctatctctacttaaaaaaacaaaaagaaaaaattagctgggtgcggtggcgggcgcctgtaatcccagctacttgggaggctgaggcaggagaatcgcttgaaccaggtaggcagaggttgcagtgagccgagatcacaccattgcactgcagcctgggcaagagtgagactccatctggaggggggggaagaacaaaaataataacaataataattatatatatatatatatatatatatatatatatatatatatatatatatataatacatatatgtatgtatcattaagcaaaaatagctccaataggctgcaaattagcaagaaaagtatggcacaacatcgcttttgaaaatgtgagggatctatgcatgcacaagcctggaaggatgcacaccaccatgctggtgctggtacctgcgggcggtctcatgcgaggtgatttccatgttcactgcacctttctaccttgtctttcattttgaaaatggcagcatcctatttttatcatcaccattgctaaaccacccactcggaagcacacgccttcaaaaaagggctccaccatcccgcatccactggcaaaggcagcttgcccatgcccactcagcctcaggggagccagaaggtgccaacagcagtgcagaggcccacctgtgcctgcggcgttgaccttctgcaccgccacctgactccaggccccaggagctgccccacagtctaacacccgaaggccgggccgcagaatctggtgcctctcgttcacctccaggagcttgaaggcgcttcgacaccggtaactctccaccttcgcagccttcacaaatgggtccctgagatgtcgggtcagccacaggtgctcagcgcctgtccgattcttgcagcgactcccaacagtgtggaacccttgacgctgaaaggaaacacacaccagcttcaagtacctggtgggagagaagaggagcaggcaggttggcatcacacagaacggcaggtcatgagctgggagggccctcggatcaactcattcatttctagagatggggcaccaaggcccaggaggggaggtgaactgataaggctacacagatggaaagcaggcatcacaggccaaactgtgtccccgcaaaattaatgtgttgatgtcctaacccttggtacctcagaatatgggggtattcggagacacctgtaattccagcacttttggaggccaagacaggtggatcccctgaggtcaggatttcgagaccagcctggccaaccgtggccaacatgatgaaaccccgtctctactaaaatgcaaaaattagcctggcgtggtggcagatgcctataaacccagctactcgggaggctgaagcaggagaatcgcctgaacccaggaggcagaggttgcagtgagccgagattgcgccactgcactccagcctgggcgacagagcgagactctgtctcaaacaataactaaatacatcaattaattaattaaagtaatattattttctcatctggcaaaaatgttcattgggctctgacaggctgcaagaaaacctcataaggacagatccttgccttagtgacctagttccagggctttgacagctagtacagagggtctggcctgtcacatttctttttttcttctttttttcgagacagggtctcgctctatagcccaggctggagtgcagtggtgaggtcacggttcaacgcagattcgaactcctgggctcaaacaatcctctcacctacatgtcttaaataaaattgaactaaacctgtgtcaatcgttgaaggacaatttccaagattctctagacaattgttacaataaatgtaacaatttattcacagcccacaatagctaagcaggtggaagctatacacacctccccttgtttaactctgacaacaacctcaccaaggaagttctatgtcctctttttctttttttaagacggagtctcactctggcgcccaggctggagtgcagtgacagctcactgcagcctccgactcccgggttcaagcaattctcctgccccagcctcccaagtagctgggattacaggcacacctgctaccatgtccggctaatgtttgtattttcagtatagatgggttccaccatgttggccaggctggtctcaaactcctgacctccgctgatctgcccgccttggcctcccaaagtgctgggattacaggtgtaagccactgcacccaggcatttctttcttctttttgtttttttagagacagggttttactattacccaggctggagtgcagtggcatgatcacagctgactgcagccacagcctctggggctcaagtgaacctcccacctcagcctcctgagtagctgagactacaggtgtgtgccaccacttccggctaatttttctattttcagtagagatgggatttcaccatgttggccgagctggtctcgaactcctgacctctggcgatcagcccaccttggcctcccaaagtgctgggattacaggcgtgaaccacctcacccggccatttttgttttgctatcatccaggctggagttgcagtggcacaatcacagctgattgctgccataacctctgggtctcaagtgaacctcccacctcagcctcctgagtagctgggactacaggtgtgcaccaccatgcctgggctaattttttttttttttttaattcttaaaaaccttttttagagatggcatctcactacattgcctaggctggtctcgaactcctaggctcaaacgatcctcctgcctcagacttccaaagtgctgggatgacaggtgtgggccaccaagcccggtctctatgtccatctttctgatttaaataaataaataaaagttaccaccctcatggctccaaggccaaagcttctagcttctgcaacaccaaagcgtgctgacaagccaggaggcactgactgctgaccgtgagtcgctgtcttcccctcgcttaaggggtctcccgggaaaatggcacaagccggtcccgggggccagggcccactcgacagcccaggaagcgcgggcaatggagctacccggcccagaagcgaaatcccgccccgggctcgcccccggcgccttggatctgggccccggcgctgcgccccccacctggactccgccgccggccccggcctccccacggccccgccggccctgcccctggagacctgagggcgccctcctcccggggaactgcgacccggaatcctggcctcgcccctgtcgcgctcgctgagtgcggggacggtgcccagcgctcggcacccagccccgaggccaggaccgaggaaggcgaccgggcggacccccaaccactcccgctgtctgcacgcgcagcagcagcgcccagctcaccccgccattggtgttccccgcgcctgcagcgcgccgccggaagtgcctggcctcacttccggtcagaggccacgcccccggaagcggcggtgcaggtacgaaaagcgcgcgcggggattccaggagtcgtggtgaccagggaggggagccgggccagcgggcggcaggagactaggggagctgagccatgggcttgggggagagcggggccgggagctcgaaggagaccagaagagcagggtcgggggctcgagggagacgaggagagcggggccgggggtttgggagagagacaaggagagcggggcggaggcttgggggagaccaggagtaaatcacaaaaatttactttggaaaccgtggcttctggcagaaacagatcagtgtcgggacaaagtacacgggcctggtgtgaaactaagccacaaacccatttaccctgtctgacctgcctccgccaccaggacccagtctcagtgaaatgggaaaggttcccttgtcctcctcgaagggcgtgcgatgaggatgtggctcacttcttcagtgccccgcttctcaagcctctaggggaacatacagacaggcaggctgaggggctcccaccccacggcagtgtctaggggtgaatgtttgcagctcctgaagccccagcaggcatgtgttagagggtgctctttcagtttagccttgtaggtggcttgtgttagtcagctgttagactccctgccttatcgcaaggacagagggctttctgtatccctaggtttcttgccttgatgtactggagcaatcagatcacacggcggcttggagagtgagtgcaaggttttatgagtggaattagccctcagcagatgggggagccagaaggcagttggagtgggaaggtgattttcccctggagtcgggctgctgagcagcctgggctctcctctgaccgcccctgccaaactcatggttccatcagttgatggcctgctggtgcctgttggtgtgctttccacgtcctcttgacgtccagcggcttgtgtctctgcccactataaaaaaccactggggtttttttataggcacaggacggggacgtggcgggctcgggaaatgcaacatttgggcaaaaaaacagaaatgcctgtcctcacccaggtccctgggcacaggcctgggtgtggagccctggccagagaccacgccctcctctacccagcacttccctgcccccttccttatcatctggtcccttttctcagacaccacaacttccaagaaggatcactggtcctgaaccctgtgtcttgtccaggtgtggaccccagaaaagttggtcctggctgggcgcagtggctcacgcctgtaatctcagcactttgggaggctgaggtgggtggatcgcttgagctcaggagttcgtgaccagcctgggcaacgtgacaaaaccccatctctactaaaaatacagaaattagctgggtgtggcggctcatgcctgtggtcccagctatgtgggatgctgaggcaggaggatggcttcagccagggaggcggaggttacagtgaaccgcgatcacgccactctcctccagcctgggcaacagagcaggatcttgtctcaaaataaataaaggaaagttggtcctggccctccagcatttctccagggtccttttttcagcagggacctggcggaggcatcgccctcagagtcctctggacctggacctgcacacctatgggagcaggaaggacccttgtgacttccagtggcccc

SEQ ID NO: 3081 - DNA, 6000 bp, Homo sapiens
ggaagcacgtccatggggccaagtaatcaattccacaaatcattttcttgtctttttttttttgtcctggagacagggtctcactctattgcccaggctggagtgcaggggtgtgatcatggcccactgcagccttgacttcctgggctcaagtgatcctcctgccttagtctcctgagtgcctgggactacaagtgtgtgccaccaagcctggctaatttttaaatttttttgtagagacaaagaactgcgctatgttgctcaggctggtctcaaactcctgtcctcaagccatcctcccacctcaggtcccaaagtgctgggaagacagccgtgagccaccacacgtggccaggccaccattcttcacctagcctattccacctcgcacccattctagtccacccctgcaaaccatcctttaagatggcagctggaaagacttaaaaagaaactcaaggctgggcgcgctgactgatgcctataatcctagcactttgggaggccgagaggggcagatcacctgaggtcaggagttcgagaccagcctggccaacatggtgaaaccccgtctctactaaaagtacaaaaattagccaggtgtggtgtgggtgcctgtaataccagctattcaggaggctgaggcaggagaatcgcttgaacccgggaggcggaggttgcagtgagcagagatcacaccactgcactccagcctaggcggcagagtgagactgtttccaaaaaaaaaaaaaaaaaaaaaaaaatcagatattgtcaatgtctcccccttgctaacctgctaggtgcttaggataaaatgtcaaacatttaacatggcttcacagacattttgtatcatttggcctctggctaccttacctcacccaatttcgtcctttgcctgtgctctagccacactgtccgaggagttcctaaaccaccaccctggctctgaccacagatcttcacatgtgctgttccctccatctgcatcactcttccttcttctcttgtttgcttaactcctatttaccttcgggcttaatcagcactttctcacctctcctagtctgctgctcttatttaagatcaaacgtcagagaaatgtgaagtccactgacttccgggtggaacagagttcagtatgccaattaaattattgagtgctggctaggcacagtggctgatacctgtaatctcagcactttggaagggcgaggcgggtggatcacttgaggtcaggagttcgagaggacaacatgatgaaactccatttctactgaaacacaaaaattagctgggcttggtggggggcacctgtaatcccagctactggagaggctaaggcaggagaaaattgcttgaacccgggagacagtggctgcagtgagctgagattgcgacattgcactccagactgggtgacagagtgagactctgtctcaaaaacaaaaaaaacctcggtcaggaatgaagaatgtctgaagtactgtatgtgtaacgtggcttgtgatttttaagccctgagtgcagcgtgatctagtccttcgtgatctgagtaataacaaaatgttcaagatctgttttatgtcattcgtgtcttctaatgttggcctgttgttttccttgctgagactagactgtgatgtggtatactgtttttctccattagttttaatttatatgtatttataaacagcttattcttcatgttgctttcatttaccctggagatacttgattgctttttttcttttttttttttttgagacagggttttactctgttgcccatgctggagtccagtggcaggatcacagctcaatgcagccctgacctcctgggctcaagtgatcctcccacctcagcctcctgagtagctggaactacaggcacatgctaccacacctggctaagttttgtactttttgtaacaatggggtttcaccatgttgcccagattggttttgaactcctaggttcaagtgatcctcctgccttggtctcccaaagtgctgggattacagacgtgggccactgcgcctggccaagatgttttatggctaattatttgtccgcattgttatcacctcctagagaaactgctagaagagtgagattatgtgtcctctaagttcacaaaaacccaaaagaagttaggcagcagacttaaaaacaaataaaacagactctgcaaaacttggccttaaatgaaaggtgacattctccaacctggattgtctttttggcttcatgggactgtgcagttggagggtgactgggccctgtttccacggcactctctaggtgcagggaccattgaactatgtctgctatttctgtcttagctctgtactgaaataacagttgtgttattgggtttcaaaagaaagtctgtccctcctgatctaggcagaaagccattaaagaaaacagaaggataacaagcagtgggaaaacagaccagaaaagttaccgattcacccatcttgtgtcagaaatggacaggcctgtttctcctgctggaaacctaggatgtacgtttgcaatgagaaaagagtgaaagacttgagcaggtacattacaaaagcacaatcacagcggccagtgaatatgaaaaggtcctcaagttagagaagtctggagaaatccaaactaaaactaccttaggataccacgctacacccaccagctttgggcagggtgcaaacatcaggaattcttctaccctgctggtgagcggtgagcgagcgcataaaccagtataactttggaaaacaatttaatagagtggaaagccaggcgggccgctgagccagcagtcccattcattagtacataccccatgcctgctcctctgtataagagtattcactgcaggactgttcatagcaagttaaaatggaaaacaatccagtgtccctgagcaagcaggatggataagtatatggtggagagtcatgcaatagaacggtatagtacagagatgatgaatacttctgatattacaataaaatgactcctaaaataatatctacgaaaaagaagccagggctgggacccagtggctcatgtttgtaatcccagcactttgggaggctggggttagaggatcgcctgtggccaggagattgagaccaccttgggtctccataaccaccttttatgtagagatgtggtaagacctcatctctacattaaaaaaaaaaaaacacccagacacatcagactatacgctgtatgcttacctatatgaagactattgtttaggggccgggcacggtggctcacacctgtaatcccaacactttgggaggtcgaggcgggtggatctcttgaggtcaggagttcgagatcagcctggccaacatggtgaaaccccgtctctaccaaaaatagaaaaattagccgggtccagtggacagcgcctgtaatctcagctactcaggaggctgaggcagagaattgcttcaacctgggaggcagaggttgcagtgagctaaaatcacaccactgcactccagcctgggtgatagagtgagactccatctgaaaaaaacaaaaaaaaaaacaaaaaaccagactatattgtttagggataaatagttgacaaaataatagagacaagcaagacataattaccataaaaatcaggacctggggttgggggtggagagggaaggtttaagtggaaagaatggagtggtgacaatgtgtgtcaacctgggccatggtgaccctggggttcgctttgtaattcctcaaaatgagcatttatgtgctattcacttttcagagggtagaatctctgaaccaaaatgtttaagcaaccatatattaaaaaaagaaaaaatatggacagatttgtattttaattaaaacatttaaaaaatagagacaagggtctcgctatgttgctgagagtggtctcaaactcttgggattcaattgatcctcccgcctcagtctcccaaagcgctgagactccaggcgtgaaccaccgcgcccgacctggaaagatacatacatatatatatatatatattttttttttttttttttttttttttgagatagagtttagctcttgttgcccaggctcgagtgcaatggctcgatctcagctcactgcaaactccgcctccagggttcaaacgattctcctgcctcagcctcccgagtagctgggattacaggcgcctcaccacacccggccaatttctgtatttttagtagagacgaggttttaccatgttggccaggctagtctcgaactcctgacctcaggtgatccgcccgcctcggcctcccaaagtgctgggattacaggcgtgagccacggcgcccggcctggataaatcttttaaaacataaaagtctgagtgagtccctggccggccggcacagatgccggggtggggccgtgaaccggttgggacgcgctcgctccggcctggggggacccgggccagcagccggtcgccgcgcgtgcgcactgggcggggggccccgcgctcctacctgcacgtggccagcgcccggcgctgggccgtagctcctgccgtgcacgttggggagccggtacatgcaggtgggaagctccacacggagaggcgcgccgcccccgtgatagggctttacctggtacatcggcatggcagaaccaaagcaaaagggggtagcgcgtgccaaaggccaacgctcagaaaccgtcagaggtcacgacggagaccggccacctcccttctgaccctgctgcgggcgttcgggaaaacgcagtccggtgtgctctgattggcccaggctctttgacgtcacgaagtcgacctttgacagagccaataggcgaaaaggagagacgggaagtatttttgccgccccgcccggaaagggtggagcacaacgtcgaaagcagccaatgggagttcaggaggcggagcgcctgtgggagccctggagggaactttcccagtccccgaggcggatcgggtgttgcatccatggagcgagctgagagctcgaggtgagcggggctcgcagtcttccggtgtcccctctcgcgcgccctctttgagacccacggcattccaacctccctggaaatggggggaacatggccgaggcgcgtggcgaggcagccccctggaggccccggagtggcgacctcagtgttgcagcgatctcgtgccccttgggtgcgccttgaggccgaggcaagctccttcggggtcctgggctgcgggcaaaggattcggccctgtgaggagttgggttcggcctgtcccagacaggccttgcccacatcccatcacagggccgtggacttgaagcgggagcgtgaaatccccatagactgaatgcatttcctttctacctgttctctctccccttttatttttatttttatagtattttatttttaatttttttttgtagagacggggatttcgctgcgttgcccaggctggtctcgaacgcctgagctcaagcaatccgcccgccttggcccctcaaagtgctggaattaaaggcatgatgcaccgtgcctggcctttttaaaaaattaaggttattttggggacggtagagcgtccagacacatccttatttgcatagctgcgcagtttttaaaaatgcaatacgtttctacctgttaggatgtgtgatttctggctggtaagctacaccgaatcttggctagcacatttgcattccatgtcagatttgtaaacgcaaatttgctctctgcatttaaatatattagatatatttaggtaactacatttaaatgtattgagacatttaaataaatttggggtctgtgtctaaatgcgctccctcctcaaaataaatatctgaagtgggccgagagcggtgactcacgcctataatcccagcactttgggaggccaaggcgggtggatcatgaagtcaggagttcatgaccagcctggccaacatggtgaaatccgtttctactaaaaatacaaaaattaactg

SEQ ID NO: 3082 - DNA, 6000 bp, Homo sapiens
ctaggaataaatctaagctaaaagtcaaaacttttatgtagaaaagtatgagaccttttggaaagattttaagaggaccaaaatggctcaaggatagtaagagttgacattcaggtgttacttttcctgaaatacatccaaggatacagtgcaattttgatcaaaattccaacacagtttttcctggaaattcataagctacattctatacagaagagcaaagagacaaaaataaccaagacattcccgagaacacagccccagacatcaaaagttatgataagctacactattaaagaaaataggtagtggttcagggatagaaaaatagatccatagaatagaattgactccacacatatctgtaaacttaaggtgacaagtgaaggtggcaaaaaggtgatacagtcaaatcacattaggacaactgaaattaaaacaaaacagagattggagacttatctgacaacatacatgaagagtgaattctagatgacggactattaaatatgaaaggcaaaactctaaacattttaggaaaaatagaatacctttaagagtacgatgtatcaaagaattcataaatgagattttaatggacttttctcctacattaaacttaagggggaaaatgtttaactatattaaaagaggtcttcctaataaaaaaaaaaaaaggatggaatgaaggaaggaaacggaaagataggccaaaaacagacaacacttgtaccattacaatatctcactaataaaaagctcttaaaagtcagtaagaaaaagaaaaatcaaggaaaaaaagataaacataaataaccaataaaaatctgaaaaaatgttcaaacttttcagtaatcagggagtgcaaattagggtcacgacaaaaaaacacttcatatccatcaaattgggggaaaaaactccaagagttgccaagaatatacaataactgtaaactgtcttatactccaggtaagagagtaaactggtaccaccatttggggaaatcatttttttactagtggcagagatccaagttaccccaagttaccggtggcctatcctcacgggtcagtagcaacttcagtccttgcctcctcagacgaaaaaatttgactgaggggcataaagcagaaacagagacccaggcaagttccagagcaggaatggaagtttactttaaaaggccttaaaacaggaagaaaggaaggtgtgcttgttagagacccaagcgggaatgtgaaggttaaagagagtaggtcaagtgtccgatttaaccgttgatcctttttttttcgtttgtttgttttttttttttttgagagggagtctcgctctgtggcccaggttggagtgaagtggcgcgatctcggctcactgcaagctccgcctctcgggttcacgccattctcctgcctcagcctcccgagtagctgggactacaggcccccgccatcgcgcctggatacttttttgtatatttagtagagacagggtttcaccatgttgaccagggtggtcttgaacttctgatctgaggtgatccacccgcttcagcctcccaaagtgctgggattacaggcgtgagccaccgcgcccggccctgatcctaggacttttacaagcttgtctatttcccatgattctttccttaggataggctgccggcaggcacagagccctccttagccttgggaagtgtttttagggagttacatgcacgcccatctgaggcttccttcctttttccggtggagtgtacctggaagatcatactttaccatttttgtctcttaatatgcatgcccaggaagctgtttctccctcgggtctacattcaattaacattttgataacaggtgtggaccatcaggaaatggcctctccctggcgctgcagaattatcatttttagagaagcaaattcggtaattgccaaaccatcccccaacatttctagtgggttgggggagagcccactactgtcccactcatgcctacctgtaacagaaaaaaaaatatgatctacgtacattcgtcaacatagatgaatctcaaaaacaaacaaaagaagtcagaagatacatacgtttctgtttatataaaggtcaaagactggcaatattaaacaacataccatttagcaacgcctgcatgtgtgataaaaccacctagaaaagcttaggaagcttaacacaaatttcaagatagtgtttacttatggctgtagcaaggagggcttcattggggaagtgcaaactggtaaaatttactggtaactggtaaagttccatttcttcagctgaatgacaggccccatggattcatttcatttctctcaaaactatgcaaatcggctagctatacttttttctgtacatcatgtattttataatattttaagtgactcaaaaatacacgaaaaagctgttttaaattatcttcctgctcatctccctgttttaaaagaaagcctttgcttaaaagtggtctttctaactgcaggtaaacaacgacattaacatctggtactcacaggagtgctctttaaaaaaaaaaaaaatcactattacagggtacgcaccaaggctcacacctgtaattccagtactttgggagggagacgggggagggagggatcgcctgagcccaggagtttgagataagcctggtcaacatggcgaggccccatctgaacaaaaaaaaacaaacaacaaaaaaaaaatctttattagctgggtgtggtggtatgtgcttatagtcccagctacttggcaggctgaggtgagaggatcgcttaagcctacgagttaaaggctgcagtgagctatgtgcatgctactgcactccagtctgggtgacagagagagatcttgcctcaaaaaaaaatgctattaaagacattgatgtgtgtactctcccctatataatgcacatcaacttgctttgcaaaacaatgctaaagtacaaaagacttaaagctgtaatataaaatagactttactgacttgcaccaatacaaccacaacttttttatacaccactgacacacattctacatctgtttaatgaaatcctttaaagtaccgttagtgagtaaaactaagacaaacctattaagtgctaaggaaacactaagggagactatcatttaattatcgtacatgagattccaatcttaaattgccacgtgaagtctcaaatcggatcttttttgcttaagggaatttgaacgatgacaattctgtagctttgggccaattcacagactcagtttccacaacgttataatacccaattaaaacttctgtccaatttccaccgtaccgtttgaaggtatttttatgtgcactcattctagaatactcctggcaaggccgccggcttcgggtcacaagatgagccagggacagattggagactacccccaaatctcccaggaatcggttatcttccagacctccagatcgccctccagagtctcgcagtgtggagggcaacgacagaaagactgctgagggggtttaaactgttgagtcaaacatatggccaaaagtcagagtcaactgggaccttgcaaatcattccgcctaacccttcgttttgcagatggggaaaacacgcctcagaagggagaaccctagctcggggaaccctagctcggggtctaacaacgatttaagcttgtctcccctagtactggccagtggttcttccccgttacccatccttaagtgcttctattggctgccaacacggaggggttagcggggtgaaagaaccggcgcctccgcagtgtggccaggttgggctaaaaaacgtcttagaagtaatcggatcaatctctcttcttacaggtggagaaagtggagaaagtagagtgacgcagctaagggagtaaatcgaccctcagccaacaagtggcaaaagcctgaagaaagtgatcaagatcactgatgaccccgctgcccatctccaagggggcgggtatcacaaccccgacgccacaccacgtatcattccgcaaaactcccgcgcctcccacgcagaactggcaagagggaaggcgagacagcagtgaacagctggtacgcagcacccacagcaccgcggcagcagctagtgccgactcccgcctagctcttttgactctgttcgcgggaagaatggggaaacagtaaggttgcggcgcctcccgcgagacgaggtacctgaggctggccccgcagtcccccgccgcaccagcaccggagcttcacaccccacttccggggtcaagtcaccgccgggaatcctgtgatcgcagaaaggtagtctcaggttccgcccctatccaagtcccgcctccactgcctctcgccctgtatctgtcaacttccgggacgccgcgcgtcactaagcagccaatctccacttccggactcatccagccccttctccacccctttcagagacagcgcgattgcgatttaggtttccgcgcatttaattggcgaagctggagcgctagtcttcgctgattggtgccgagaaatctgccccatagacacccgcggggcgcacagtttcagtcgtccgtgggtttcccgccagccgcagtcttggaccataatcatggtggacatgatggacttgcccaggtcgcgcatcaacgccggcatgctagctcaattcatcgacaagcctgtctgcttcgtagggaggctggaaaaggtgtgcgggttcgcaatcatgggctcccaagtccgtagctggagggagggaccccgcctggataacgggggatgaaaaaggacggaaagcctccgatcactgcgcccccgactcctttattttgcacaaggaactttttggaaattctttagccgttgtagccccattttggcgctcttttatggcacggaaacaaagtgttttcaaatgctgagttctaaattccagtgcccgtcgcctccgttctagccgtgcttacgtaagggaaattataaacaccactcccacatctaccttcagatttcttagtttactcagacgtgacggacgcagacaaaactaatctgctggtttccttctcttctgaaattacttatttttgcaaacctcgtttcctcgttgtgatcgcttctctgtaaaacatgccttggttgtccgctttgggtcccgtagtaacgagttatttaaccccagtattaaagtgaagttccctcattctacaggcgagaaacaggcccaaagtcttggaatcagtgacctgaaaagctgaggaaaagaaaactattatataaagacttatttagtagctcatttcatccacacatcctcttccttaaatgagtgttgctctgacttcccaagtagggaaactgagtaggagtggtaggtggttgactaaaatgctcagaaactcggcaaatggcaaagctggcattcaaacgcaatctgacagcgctctttacagctgcttcccaggagtaggacccagatattctagcaaccagttctccttttacttcatcatgcctgttttttaaaacataccctccgtgggatatgtactgtctaaatcatgagtgccagcagatttcacttttagggtgggcatcctttaatttgttatcagaatagggttgccatatttagcaaatacagaacctacttaacactacaaaaaaaatccttgtttatctgaaattcagaaattaactgtgtgttccatgaacagatttgataacataagattataatttgatccaataagttgaataaactgaatgaataaactgttcaagaaacagttgatttgtgctcaactaaggatcaatgtactcatctttagtcaaactttgttgttgttttagtgagattttaattatatgtttcgtttttagattcatcccaccggaaaaatgtttattctttcagatggagaaggaaaaaatggaaccatcgagttgatggaacccgtatgtttaagtgttaataagtctcttatatattatag

SEQ ID NO: 3083 - DNA, 6000 bp, Homo sapiens
gaaagaacctggggccctgagtcttagtgcactaccacataagtactaagttgcacagctgtggacttctttcacatgtgagaataagcgtttgtgcattaaagatacttttgtttatgcagctaaaccccatcttgacttaaacactatttctattcaaaatggtactgaaggctctatcctaggcaaaaggtaagaaagataaataaaatatgtaagaattcttaagaaacaaaactataattattcaaatatgaatagaaaattccaaaaaaaactgatagaaaattcttaaaatggcatttctatataccaaaacaatcagttaaaatctttaatttaaaaaatgataccattcataatagcaacaaaaacaaggtatctaggaataaatctaagctaaaagtcaaaacttttatgtagaaaagtatgagaccttttggaaagattttaagaggaccaaaatggctcaaggatagtaagagttgacattcaggtgttacttttcctgaaatacatccaaggatacagtgcaattttgatcaaaattccaacacagtttttcctggaaattcataagctacattctatacagaagagcaaagagacaaaaataaccaagacattcccgagaacacagccccagacatcaaaagttatgataagctacactattaaagaaaataggtagtggttcagggatagaaaaatagatccatagaatagaattgactccacacatatctgtaaacttaaggtgacaagtgaaggtggcaaaaaggtgatacagtcaaatcacattaggacaactgaaattaaaacaaaacagagattggagacttatctgacaacatacatgaagagtgaattctagatgacggactattaaatatgaaaggcaaaactctaaacattttaggaaaaatagaatacctttaagagtacgatgtatcaaagaattcataaatgagattttaatggacttttctcctacattaaacttaagggggaaaatgtttaactatattaaaagaggtcttcctaataaaaaaaaaaaaaggatggaatgaaggaaggaaacggaaagataggccaaaaacagacaacacttgtaccattacaatatctcactaataaaaagctcttaaaagtcagtaagaaaaagaaaaatcaaggaaaaaaagataaacataaataaccaataaaaatctgaaaaaatgttcaaacttttcagtaatcagggagtgcaaattagggtcacgacaaaaaaacacttcatatccatcaaattgggggaaaaaactccaagagttgccaagaatatacaataactgtaaactgtcttatactccaggtaagagagtaaactggtaccaccatttggggaaatcatttttttactagtggcagagatccaagttaccccaagttaccggtggcctatcctcacgggtcagtagcaacttcagtccttgcctcctcagacgaaaaaatttgactgaggggcataaagcagaaacagagacccaggcaagttccagagcaggaatggaagtttactttaaaaggccttaaaacaggaagaaaggaaggtgtgcttgttagagacccaagcgggaatgtgaaggttaaagagagtaggtcaagtgtccgatttaaccgttgatcctttttttttcgtttgtttgttttttttttttttgagagggagtctcgctctgtggcccaggttggagtgaagtggcgcgatctcggctcactgcaagctccgcctctcgggttcacgccattctcctgcctcagcctcccgagtagctgggactacaggcccccgccatcgcgcctggatacttttttgtatatttagtagagacagggtttcaccatgttgaccagggtggtcttgaacttctgatctgaggtgatccacccgcttcagcctcccaaagtgctgggattacaggcgtgagccaccgcgcccggccctgatcctaggacttttacaagcttgtctatttcccatgattctttccttaggataggctgccggcaggcacagagccctccttagccttgggaagtgtttttagggagttacatgcacgcccatctgaggcttccttcctttttccggtggagtgtacctggaagatcatactttaccatttttgtctcttaatatgcatgcccaggaagctgtttctccctcgggtctacattcaattaacattttgataacaggtgtggaccatcaggaaatggcctctccctggcgctgcagaattatcatttttagagaagcaaattcggtaattgccaaaccatcccccaacatttctagtgggttgggggagagcccactactgtcccactcatgcctacctgtaacagaaaaaaaaatatgatctacgtacattcgtcaacatagatgaatctcaaaaacaaacaaaagaagtcagaagatacatacgtttctgtttatataaaggtcaaagactggcaatattaaacaacataccatttagcaacgcctgcatgtgtgataaaaccacctagaaaagcttaggaagcttaacacaaatttcaagatagtgtttacttatggctgtagcaaggagggcttcattggggaagtgcaaactggtaaaatttactggtaactggtaaagttccatttcttcagctgaatgacaggccccatggattcatttcatttctctcaaaactatgcaaatcggctagctatacttttttctgtacatcatgtattttataatattttaagtgactcaaaaatacacgaaaaagctgttttaaattatcttcctgctcatctccctgttttaaaagaaagcctttgcttaaaagtggtctttctaactgcaggtaaacaacgacattaacatctggtactcacaggagtgctctttaaaaaaaaaaaaaatcactattacagggtacgcaccaaggctcacacctgtaattccagtactttgggagggagacgggggagggagggatcgcctgagcccaggagtttgagataagcctggtcaacatggcgaggccccatctgaacaaaaaaaaacaaacaacaaaaaaaaaatctttattagctgggtgtggtggtatgtgcttatagtcccagctacttggcaggctgaggtgagaggatcgcttaagcctacgagttaaaggctgcagtgagctatgtgcatgctactgcactccagtctgggtgacagagagagatcttgcctcaaaaaaaaatgctattaaagacattgatgtgtgtactctcccctatataatgcacatcaacttgctttgcaaaacaatgctaaagtacaaaagacttaaagctgtaatataaaatagactttactgacttgcaccaatacaaccacaacttttttatacaccactgacacacattctacatctgtttaatgaaatcctttaaagtaccgttagtgagtaaaactaagacaaacctattaagtgctaaggaaacactaagggagactatcatttaattatcgtacatgagattccaatcttaaattgccacgtgaagtctcaaatcggatcttttttgcttaagggaatttgaacgatgacaattctgtagctttgggccaattcacagactcagtttccacaacgttataatacccaattaaaacttctgtccaatttccaccgtaccgtttgaaggtatttttatgtgcactcattctagaatactcctggcaaggccgccggcttcgggtcacaagatgagccagggacagattggagactacccccaaatctcccaggaatcggttatcttccagacctccagatcgccctccagagtctcgcagtgtggagggcaacgacagaaagactgctgagggggtttaaactgttgagtcaaacatatggccaaaagtcagagtcaactgggaccttgcaaatcattccgcctaacccttcgttttgcagatggggaaaacacgcctcagaagggagaaccctagctcggggaaccctagctcggggtctaacaacgatttaagcttgtctcccctagtactggccagtggttcttccccgttacccatccttaagtgcttctattggctgccaacacggaggggttagcggggtgaaagaaccggcgcctccgcagtgtggccaggttgggctaaaaaacgtcttagaagtaatcggatcaatctctcttcttacaggtggagaaagtggagaaagtagagtgacgcagctaagggagtaaatcgaccctcagccaacaagtggcaaaagcctgaagaaagtgatcaagatcactgatgaccccgctgcccatctccaagggggcgggtatcacaaccccgacgccacaccacgtatcattccgcaaaactcccgcgcctcccacgcagaactggcaagagggaaggcgagacagcagtgaacagctggtacgcagcacccacagcaccgcggcagcagctagtgccgactcccgcctagctcttttgactctgttcgcgggaagaatggggaaacagtaaggttgcggcgcctcccgcgagacgaggtacctgaggctggccccgcagtcccccgccgcaccagcaccggagcttcacaccccacttccggggtcaagtcaccgccgggaatcctgtgatcgcagaaaggtagtctcaggttccgcccctatccaagtcccgcctccactgcctctcgccctgtatctgtcaacttccgggacgccgcgcgtcactaagcagccaatctccacttccggactcatccagccccttctccacccctttcagagacagcgcgattgcgatttaggtttccgcgcatttaattggcgaagctggagcgctagtcttcgctgattggtgccgagaaatctgccccatagacacccgcggggcgcacagtttcagtcgtccgtgggtttcccgccagccgcagtcttggaccataatcatggtggacatgatggacttgcccaggtcgcgcatcaacgccggcatgctagctcaattcatcgacaagcctgtctgcttcgtagggaggctggaaaaggtgtgcgggttcgcaatcatgggctcccaagtccgtagctggagggagggaccccgcctggataacgggggatgaaaaaggacggaaagcctccgatcactgcgcccccgactcctttattttgcacaaggaactttttggaaattctttagccgttgtagccccattttggcgctcttttatggcacggaaacaaagtgttttcaaatgctgagttctaaattccagtgcccgtcgcctccgttctagccgtgcttacgtaagggaaattataaacaccactcccacatctaccttcagatttcttagtttactcagacgtgacggacgcagacaaaactaatctgctggtttccttctcttctgaaattacttatttttgcaaacctcgtttcctcgttgtgatcgcttctctgtaaaacatgccttggttgtccgctttgggtcccgtagtaacgagttatttaaccccagtattaaagtgaagttccctcattctacaggcgagaaacaggcccaaagtcttggaatcagtgacctgaaaagctgaggaaaagaaaactattatataaagacttatttagtagctcatttcatccacacatcctcttccttaaatgagtgttgctctgacttcccaagtagggaaactgagtaggagtggtaggtggttgactaaaatgctcagaaactcggcaaatggcaaagctggcattcaaacgcaatctgacagcgctctttacagctgcttcccaggagtaggacccagatattctagcaaccagttctccttttacttcatcatgcctgttttttaaaacataccctccgtgggatatgtactgtctaaatcatgagtgccagcagatttcacttttagggtgggcatcctttaatttgttatca

SEQ ID NO: 3084 - DNA, 6000 bp, Homo sapiens
agtcaaatgattccaccaactctttcaatgatcatatattccttgtttggaatttagtaaatgctattttaaaacccaggaaggctgggcatggttgttacacacctgtaatcccaacactttgggaggctaaggcggtaggattgcttgaggctaggtgtttgagtccagcctgggaaacacagtgagaccccatctctacacggaaatttaggaaaatctagctgggcgtggtagtgcccacctgtagtctgagctacttgggagactgagcccagaggttcaaggctgcagtgagctatgattgcacaaccgtattccagcctgggcaatagagtgagatcctgtctctacaaaaacaaaaccaaaccaagccagaaaaagagatacttcacagattacagaagatgtaagattctgtttgcctttttttgagacagagcttcactcttgttgcctaggctggagtgcaatggtgcaatcttggctcaccgcaacctccgcctcccaggttcaagtgattctcctgtctcagcctcctgagtagctgatattacaggcgcatgtcaccacgcccggctaatttttgtatttttagtagagacagggtttcatcatattggtgaggctggtctcgaactcctgaccttaggtgatccacccgcctcggcctcacaaggtgctgggattacaggagtaagccagcgtggccagtctctgtttgcctttttaatgtcatctacttcattttgtaagtagggtatcaaggaaataattatcaaggtatagtttgggaaaaggtgagcaaatccttaacacagctggcccaaggttttatttggtaggtctaaatcttgaccttatggctatgaaatttcaagtttgtgcttgaatacatgattaaaagaatgaaaatgaaatgaccgatagtacgtaccattttagtttttattaataaaatagaaacttagactcggacaactgctttattcttgcatctaatctgaccatatattggagtagcaattctttataaaaggacttcggtgagaactgtcaatatatcagttccatcaaaaactctaggttggaatatcttaaaaacagcaaattaaatatgagaaagcacagaaatctctccctcaaacaagaagggcttcctttaatagactttaatatagctcatttacaatcgtatgaaaatccatcaagatcaatcatgttgcacaatccctaaaggataaaactgagggaagtcatggataattttcacagcttcattgtaaagtccaagatctgaaagaaacatttaagcaaacatttaatctacaatggaaagttgtaacatcaattattatctaagatatttttacctatttcctttttctcacccttttggaagtgagtttctaaaaatggagatatggattatggattcttgtatttaactgtggcaccaaaaaaaagacatgggagtaccatccattttgatgttcattatacaggcagtttctgcctggtagtgttttgggtgttatgcattattcaattccttcaattcagatattacaacaaaaaaactaatactatttttgttatatttaaaaaaattatctttcaacaaacattaattaatctttactgagtttcttacatatataagcactacttaaaagcaggccaaaacaaaatgtacccccatttgcctttacgatcacaaaattctatagaaattgaaaatgtggcagtactaaaactctagaccaatatatatcaaactaaaaataaaactgttttcctgtatgtttatgttatgtaattgtatgtaatacatacaattttgtatgtaatacaaaatgtatgttaaaacatagttatataaaactgtatgttatgtaattacatacagttatataaaactgtatgttatgtaattacatacagttatataaaactgtatgttatgtaattacatacagttatataaaactgtatgttatgtaattacatacagttatataaaactgtatgttatgtaattacataaaaccagtcaatactagaatgctttatttaccaaaaggatggctatcttctttaaactggacataagatgtacacaagatggtggccttggcggttactcttccaaccacttccacaattccagagatttcttcatcaagctaagacacagaacaagacatcgatttggtgatatcacattttcagttgacaattattttggaaaactgttatacaggttactaatctatcacttcaagtaacaaagtaattttaagaattaccagtgtaaaagttaaaatgtaacttgttaacaaatgtttgagtacttaactgtcagcatgttaaaattcctgctacctttagcagtagcttcaagtccaaagctacaattcaagttaaagacaaaatcactattgaaaacgtccagcatttctataagcagtaatatcctatgagaggaatcttctataatctgtatttcacaatgtgttctgtatacattaaccaaacagcatatggatttgtcttcacaaaataccaaaaaaagttttaagtatgttaaacataaaatgcaaacataaataagtaaaaactggaaatatatgaacaaaaatagaaaataaaataaaatcgaaaactcttgaggggctggtcgaggcaggaggattgcttgagaccgagagttcaagaccagcctgaggaacatagggagatgccatctttacaaaaaacaaaacaaaacaaaacaaaacaaaacaaaacaaaaattagccaggcatggttaagcatgcctgtagtcccagctactggggaggctgacatgggagcaacttgatcttgggaggctaaggctgcagtgcgccatgatggtgccactgcattccacccggggtaacagagtgagaccctgtctcaaaacaaaaaaacaaaaacgaaacaaaaaacctcttgaggaagaaaaaagcaacgtaaatttttcttatgtgattttatggtctttcataaggaatgagaattgttatccaacatttatgggatatgttcaaaaatcatgacgcccaaaaaatcattggttaaaaatgtaaaaggaaatataatgagagaatagtacaagaattaaattttacagccagggacgttttaccagctcatcctttttaaatccattgcaaaaattagaaacatcggcaacaaaccaaatcaagatgaagaattaactataatatataagagacttattaacacttaaacatacgggttccatcaactcgatggttccattttttccttctccatctgaaagaataaacatttttccggtgggatgaatctaaaaacgaaacatataattaaaatctcactaaaacaacaacaaagtttgactaaagatgagtacattgatccttagttgagcacaaatcaactgtttcttgaacagtttattcattcagtttattcaacttattggatcaaattataatcttatgttatcaaatctgttcatggaacacacagttaatttctgaatttcagataaacaaggattttttttgtagtgttaagtaggttctgtatttgctaaatatggcaaccctattctgataacaaattaaaggatgcccaccctaaaagtgaaatctgctggcactcatgatttagacagtacatatcccacggagggtatgttttaaaaaacaggcatgatgaagtaaaaggagaactggttgctagaatatctgggtcctactcctgggaagcagctgtaaagagcgctgtcagattgcgtttgaatgccagctttgccatttgccgagtttctgagcattttagtcaaccacctaccactcctactcagtttccctacttgggaagtcagagcaacactcatttaaggaagaggatgtgtggatgaaatgagctactaaataagtctttatataatagttttcttttcctcagcttttcaggtcactgattccaagactttgggcctgtttctcgcctgtagaatgagggaacttcactttaatactggggttaaataactcgttactacgggacccaaagcggacaaccaaggcatgttttacagagaagcgatcacaacgaggaaacgaggtttgcaaaaataagtaatttcagaagagaaggaaaccagcagattagttttgtctgcgtccgtcacgtctgagtaaactaagaaatctgaaggtagatgtgggagtggtgtttataatttcccttacgtaagcacggctagaacggaggcgacgggcactggaatttagaactcagcatttgaaaacactttgtttccgtgccataaaagagcgccaaaatggggctacaacggctaaagaatttccaaaaagttccttgtgcaaaataaaggagtcgggggcgcagtgatcggaggctttccgtcctttttcatcccccgttatccaggcggggtccctccctccagctacggacttgggagcccatgattgcgaacccgcacaccttttccagcctccctacgaagcagacaggcttgtcgatgaattgagctagcatgccggcgttgatgcgcgacctgggcaagtccatcatgtccaccatgattatggtccaagactgcggctggcgggaaacccacggacgactgaaactgtgcgccccgcgggtgtctatggggcagatttctcggcaccaatcagcgaagactagcgctccagcttcgccaattaaatgcgcggaaacctaaatcgcaatcgcgctgtctctgaaaggggtggagaaggggctggatgagtccggaagtggagattggctgcttagtgacgcgcggcgtcccggaagttgacagatacagggcgagaggcagtggaggcgggacttggataggggcggaacctgagactacctttctgcgatcacaggattcccggcggtgacttgaccccggaagtggggtgtgaagctccggtgctggtgcggcgggggactgcggggccagcctcaggtacctcgtctcgcgggaggcgccgcaaccttactgtttccccattcttcccgcgaacagagtcaaaagagctaggcgggagtcggcactagctgctgccgcggtgctgtgggtgctgcgtaccagctgttcactgctgtctcgccttccctcttgccagttctgcgtgggaggcgcgggagttttgcggaatgatacgtggtgtggcgtcggggttgtgatacccgcccccttggagatgggcagcggggtcatcagtgatcttgatcactttcttcaggcttttgccacttgttggctgagggtcgatttactcccttagctgcgtcactctactttctccactttctccacctgtaagaagagagattgatccgattacttctaagacgttttttagcccaacctggccacactgcggaggcgccggttctttcaccccgctaacccctccgtgttggcagccaatagaagcacttaaggatgggtaacggggaagaaccactggccagtactaggggagacaagcttaaatcgttgttagaccccgagctagggttccccgagctagggttctcccttctgaggcgtgttttccccatctgcaaaacgaagggttaggcggaatgatttgcaaggtcccagttgactctgacttttggccatatgtttgactcaacagtttaaaccccctcagcagtctttctgtcgttgccctccacactgcgagactctggagggcgatctggaggtctggaagataaccgattcctgggagatttgggggtagtctccaatctgtccctggctcatcttgtgacccgaagccggcggccttgccaggagtattctagaatgagtgcacataaaaataccttcaaacggtacggtggaaattggacagaagttttaattgggtattataacgttgtggaaactgagtctgtgaattggcccaaagctac

SEQ ID NO: 3085 - DNA, 6000 bp, Homo sapiens
caaatctattttgcaaagcactggtcaaaagtatatcttctggaccctcccagctgggaagagtaggtctaaagtgactaatccactccaccatcccaatctccctaagcctttggatcccttcctctacattaaaccaagggagattaggcatttccagctcgctcatagtgggccatattttaatccacatttcagctaatcaagcaaataaactacattagaacattttttaactccctgagctgtaacattaaatgcagaatccctacttagtgggcccaaatcaataaattcagcttgatctaactctatgttccttccaccattatcccacacccttaatatcaattcccacgcctgttctccagatttctgcttatgtaaactgaaaaatttaagcagttcttctcaagtgtagcacacctcctcatgggtcacactctgaaccttgcctctaggggcccaccaggactttagtctagttatagctctagaagcaaacagggatgttggcagtggctcctgaggagaatcaacattatcttgcctggcaactgctcaggggaggccatcactgttgcctcaggcagtgcagggtttatctcctcagacaaaggtggaaaggctgatggcagcatcggttggagagggaatgttgccaatactggggatggagaagctgtttcttctggcaaaaaagattgatcagggtttacaagctcagtgtccccagcttcatcagggtcctcccacacgtccccattccaagttgcagggtcccattcttttccaatcaatgccttcactttaacagtagacacctggtgaggctgtgcatgcaccttccattacaggtcagccacccacatgataagagcttgtgtctgttttgccacaatttcagctctttctctacaggaggtaagactctcactgagggcagtcttaggagatttaaggctcagtatatgcttctgtagccaggagtcagaatccctgaattcatcattttccttcatcactttgtccagtgaacttaggagcaaccaaccaacttcattacattccttagttctccacatacagcctaaggtattatgtacagagtcactaaaccccttgtctcacatgggcggtaaatcaggagtgtcaaatgcatttattttgcataactgtctaaacagttcatgccaaggactatcagtgttctctataccattagaagtagagtccttcgcattattgggtctaatcatattaagcagccaactccagaatccccaaaaccaacgaaggaactccatccttaatattctgttcctctagaaccactcctcgtaccaaaatctatattagtcagggttcactggagggacagaactaatagtatatatctatatatctatatagatatatagatatacatatatatacatatatatatatagagagagagagagagtttattaaggagtattaaactcacatgatcacaagacccacaataggccgtctgcaggctgaggagcaaggaagccagtccaagtcccaaagccgaagaacttacagtccaatgttcaaggacaggaagcatccagcatgggaaaagatgtaggctaggaggctaagccagtctagccttttcacgttttcctgcctgctttatatcccagccaagcgggcagctgattagatagtgcccatccagattaagggtgggtctgcctttcccaacccactgactcaaatattaatctcctttgaaaacacccacacagacacacccaggatcaatactttgcatccttcaatccaatcaagttgacactcagtattaaccatcacagatggggagttcagtaaaatccctgagagggcaggtagcaaaatcctcatggacaatcacaaaaaagatcaaggaggaggaagaggcagcacagagattgattcactgcctctgcagagatctttcctggggtggaagtgagttttcattccagtagaagatcataaaagtgacagttcctgctgatgacaaaagtctcctccatattttatgaaacataactctgccatcaccatttactacttattcaaatgcatgagcttccttttaaggaaaaatggctcctaatggcagtatcccctacggctcacaattatgcagcagtagtgtggttttcacgcaggtgccttaacatttaaagtagaattcaaatttgaccacaatgacaggtccagagctcatgaacctctgcacacatatggaatatgtgagaaaagaaacttgtcaaaaatccaaatgacagaaaaagagattcacatactgtattagtttcctaaagctgccatagcaaaatggtacaaacgtggtggcttaacacaacagaaatttattctgtcacatttctggagactagaaatcgtcaatcaagttgtcagtagggctaagctctctctgaagtctctagggcagaatccttccttgcctcttcctagctctggtggtttcttgcaatccttggtgtcccttggcttgtggtggcatcatttcgatctctgcctctctcacatggccatttctcctctgtgtctccctgtgtccaaatttccctcttcttataaggacatcagtcagtgaaggaggagggcccactccaatgagtatgacctcatcttaacttgattccatctgcaaacagattatatttcaaaataaggtcacattcataggtactgggggtgaagtcttaaatatacctttttggggggacagaattcaacccataactcatactaaccacctagtctggattactagaaggcagcacacctgcacttagccttcactgaaggctcttaattcttcagtaaaatgccccttgttttaataaaaatgtttaaataaaaatacacaaaaaaacaaattggcttcttctacaaaatcactattgaagatgcttttttttctcaaaaagtctttttataattaccatgaagaaagtttatttcttttgatgacagtgaaaatttttcttttgtttggcaattaggaagcttactagtcagcactatagtactgtactaatactcagtagtctatagtaccataatactacagtagtctgggtgtttctcaagtttagatggggagagtaagttagggggggaaatgattaaaaacacagatgcctgggacacactccaaacctataaaatcagaagtgatggggaagaggcccagggttattcgcttctgacaagcagccaaagtcattctgctgtataccaactgtgagtgccaccagcctagggtttttacatcccatttccccctttattctcagagatgtatagtttgtgacttttatattttaatgctcttgtgtcctttattgcaagctatattttttttagctatttacaattaagattaacaagcaatttctaagtattctacttctgaactatacatttgaaataatacttgtgactgtattttaggttctgtagcacttttccaaaaatgacatacattttcaaacagatggctttattcatgcttaccaagtccctctgaggtacactggaagaagaaactttattcccttcaaaaataaaggctcaagtccaagtcaaactgagtacttattaaacacctttaatgttcaagacccagggaggtacttctctgaatatggaaaggttagtgtaccacttaaacacagtacactgatttaccatctcttgtttgtacagaattaaatagtctagacaatttaattattttaattgatcagtgtaagttgttgtgaacaattcagaataaaagctccaagtacaagtactttctttccacattattcttctcatcttcagttcacatatgaaaactaaagcctcctaaacttaagattataaagtactgcaaagtacagtagtcactaacgtgaaaaaaaaaactactactttccatggctgtctatagctcaactctctgaaaaatatacagtcggtttgaagtcttttgtgaaatcccttgtgagactctactgttgactgtggttagaatacattcaaaagtataatcagattgcatcatcaccatcacctgctcagaggcaagttgaagaaacatgtgctcatgaggctgaagctggcttattgtactacactctcatgtgggcttgccagagagattagtcaccattttgcagctggtttcaaattcagttgctgcgatacaagtgcagatgcaatggcttaccctaattatattgctccagtttaatctttccatttgtagcatactatatactggatcaaattcaagactctggattggtttcaaatagaagagatttcaaaatcacacatttgttatcctctcctaaagcttgctgatcatatttcatcattgtatctgctagatcttctgaattcaccctaaaggtgtttttagctctctaaaccatcactaaatcttgataattaataaaaatgcagaaaaaaacagttcttaaagctttttttaacacaataaaaggaaagttatgtcatctccaaaaatactcatatgttttttaaaatttcaattttcttcctctttggaattaaatatatgagcaaattctaaggaaattaattgtaatcagtggtttctaaacttaactgatggtcaaaatcacttgggaagctttaaaacacacatacatttcccccacttcaccctgtacctgttgagtcataatttaaagaggtttctttttaaattaatctagaagttaaataaagctaatgctggtattgcttctgagagtcagaaagaaaaaagaaaggttcctgcctatctcatgcaggtctttttaactgcctgctactgtccatatttaataaatgccatctgtcaagaatgatgtctatacaaagagatgatgtaatcagaagaactttaaaataaaagaaaaaataaaatcctagcatcatcagatccacagaagctactcagataagaggctccaagaggacatttttggatgtgaaaaacaatgagaaggaggacaacacacatttacaatcgtcttaattttgtaagtatctgtttgaatttgttggatacatagttttttccttcaaaataacttaaaggtattattttgaagacacacatagtcaagtttagattatgcatttttactccgttcttattcatttgttccatgctagtgctgggaatatggtggtaagaacagacaacccatgccctcactatgcatacagtatcatcgatggcattataaaaatatcaaaatagttttatggttaaaataaactataagaaattcacataagtatatttcaaaatacccttggggataaaaataacacattcaagttacagctgacacattatttggaaaaatcactcaagttctgcaatttcttcttcccaaattaataccagttttactttcttatctgatctaaaatttataacttattatacaacaatgtgaagttaataagtgaatggtatatcacaggttattcaacacactgctaaaattaaaaatcattgtgtcaattctaaaaactagatttccctaaactctaaaagctacacaactatgacaaacagaatctacagcactctgtgactcttaatattacaattaaacatcaagtttattaatagaaaagtttggtaaacagattttcacatgacataatgtgtcaatttgataattatggccaatcataaacttaagcataaaaggtgatggtaagataaaaacaaaatcttgaggacaaaatttcaaactcatgctctcatccaggccagagttcctgaactatacaatgacaaactaacttctttgttaaactgcattttactctttacaaatacaagtagttttccaaatactccatgctgttgatgccccaaagtgggaaaaacagatgaattaaataaatagaggccatgttagccaatgt

SEQ ID NO: 3086 - DNA, 6000 bp, Homo sapiens
gcaaaaaatattcacaactgacattataaggaccaatctttccaatatatacacagtcccaagaaagcaattataatatcaataacccaatagaaaaatggccagtaaacagatcatctagagacgcacatgaaagatattcaagcttatttacttaagaaaaatggcaaaaattatactgtaccatgtttcactgatgaaattagaaagatccaaaagtttgataatgttttattccaaggctttggggaaacaggatctctcacacgttgctggaagaaatgcaaataggtataacatttatggagggaacttggcctatctataaaaatcgagatgaatatatcctttgactaaaaaacttaccatgtgcaaaatgccgtatataaaatgttattcatcagtaatatttcccaggaggaaataagggggtgcagaagggtagggatgaacctctccttcctttgccactttagctttagctggtaaataaacatgctctgtaacctcttctgttacttcactatactctccttccttttccactatgaagcgttcctacctctctgcctgcctttgagtctctgctgaaatgcaagtgataatggctgactctgaataaataggctttgcctgttccatttggttggtcttcatttatttccacactatcaattgttttcctgaaggtcaagtgtaaatagagctggtccagtcagcaggagcatgtgggtcactggacactcagcaatccagtgatgcagattctcatcaagagtgtgaggtagggcatgccatggccaacattgccaattctatctgtccccatctttaaaatgggaataataggccgagcattgtggctcacacctgtaatcccagcactttgggaggctgaagcaggcagctcacctgatgtcatgagtttgagaccagcctggccaacacagtgaaaccccatctctactaaaaatacaaaaaatggtctgggtgtagtggcaggtgcctgtaatcccagctactcggtagactgaggcaaaagaatcacttgaacccaggactcagaggttgcagtgagtcgagattgcaccattgcactccagcttgggcaacaagagcaagactccatctaaaataaaataaaataaaataaaatgggaataatcatacttattttacgtgtgtttatattatctaagtgatgatatcagtgcagagtgctataaaatgagagctatctatctcaccctactgatcaataatatttaaatagtgctttaaaggcatccaataaatgttgatcaccctcctcttgagtaggggctggtccccttccttaatccccatcactcaccaccatgcctgacacttctcatgtgctccacaaatcttcatttagaaaagtatctatggaatttattgaagaatttttttgacacctaaaagaggagaagagtctttgaagagctgcttaagcaaaaacccatctcttagaacaagtacagttgtcaaaagacattcactcatgccacctctagggtatgctttccttcattttacagttttctcatgttaaaaaaagaagacaaatactgcctttcaaatttgatgcgtaacatgtgagctagtcacgttgtttcccttgggtaatttttccaacattaactgctaacaacagggctgcaaattgctgtctcttcccccagggactagagaagatgagtaagtacctgaaagagactggccaaatacttacctagacagagtttaccatctgcagctgtagagaggttatttcccttacttccaactatatgcatcctgaatgacattttatttgcaccactgtttatttcagtttctaagacaagattaaggcatttacctccccactaaacaaacttaatgaacagcgtgaacactgtttcccaaatcattgtgtgactgaattactaatccctgacatttggcagttcttaagtcagaaggcaatttactgtagctagatgagaacatgaatatacattgcattagaaaactcagtggtacatggggcttctagaaatctctagagatcacattccttgcctcaaaatcatttggaaagtagagaagtagtgtcaatatacttaattgtcaattctgaagttaatgaattaatttgctaaacctgtttaagaaaattgcaagagcacataaaagattcctttcttcttccaagaaaagataattgcagctttattttctatttcttgagtcaaattcctatattatttgggcttttgtccatgcagaatgtatcatatcacatcttcttaggaagtttaaaaaattgctttatcagtttttatgacataaaattaagcaatttacactaaagatcaagatgttacaaaacattgtttacaaagtttatttagatacattctttaattatattcatttatctactagcagccactttatttaatgtgatgctcaactcttcaaaactcattcatgaggaaattaaaaaacaggctttttcctgcagatcatatggggcaaataaaaaatgttggcatggccgggctcagtggctcacgcttgtaatcccagcactttgggaggccgaggcgggcggatcacgaggtcaggagatcgagaccatcctggctaacacggtgaaaccccgtctctactaaaaatacaaaaaattagccgggcgtggtggcgggcgcctgtagtcccagctactcgggaggctgaggtaggagaatggcgtgaacccgggaggcggaacttgcagtgagccgagattgcgccactgcactccagcctgggcgacagagcgagattccgtctccaaaaaaaaaaagagttatgccaacatttttttttttttttgagacggagtctcgctctgtcgcccaggctggagtgcagtggcagacctctgttcactgaaatctccgcctcctgggttcaagtgattctcctgcctcagattcctgagtagttgggattacaggcacaagctatcacgccgggctaatttttgtatttttagtagagacggggtttcatcatgttggccaggctgatctcagactcctgacctcagatgatccacccgcctcggcctcccagaatgctgggattacaggagagagccatcctgccctgcctgttggcataactttgaaagtgatctattaagtttggtttggcaaacactcgcatatgacaatgaagattagaattttgcttcatgttatagtcttaaaataggcaaaaactgcaatttttgtattttgcacctttttattattattacactttaagttctagggtacatgtgcacaacgtgcagatttgttacataggtatgcatgtgccatgttggtgtgctgcacccatcaactcatcatttacattaggtatttctcctaacgctatccctcccccaggcctccaccccccaacaggccccagtgtgtgatattcccctccctgtgtccatgtgttctcattgttcaactcccacttatgagtgagaacatgcggtgtttggttttctgtccttgtgatattttgctgagaatgatggtttccagcttcatccatgtccctgcaaaggacatgaactcatccttttttatggctgcatagtattccatggtgtatatgtgccacattttccttatccagtctattattgatggacatttgggatggttccaagtctttgctattgtgaatagtgccacaataaacatatgtgtgcatgtgtctttgaaaattatctgggcctggcgcggtggctcacgcctataatcccagcactttgggaggccgaggtgggcagatcacctgaggtcaggagttcgagaccagcctggccaacatggcgaaaccccgtctctactaataatacaaaaattagccgggcatggtagcttgtgcctgtaatcccaactacttgggaagctgaggcaggagaatccctcgaacccgggaggtggaggttgcagtgggccaagatcacgccattgcactccagccagggcgacagagccagactccgtctcaaaatcatcatcatcatcatctgcattatcattatcttgattctatgtgtcaagttaaagacaaggttctagtctatttgcaaaggacattaaaaataacaattgttaacacagataatctttagtctttgaaaaaccaaattagatacaattgttgcttcatttccccctttaaaatttttcctttaaaaaaaatcctaatgacattatttatgctaataagaattttatcggatgtaataaagttcgtcttgaggcaaactgcagaattatcacttaacgtcagtgttctttaagcttcccgactttaccaactagccagtaatatgttcaatttttttagaagtcatttgaaacaattttcagaaccttaatccaccaagatgcttcaataccaaagtaccagtaccgtcatctgaggctggagggtttaaagctgctctaccttaggtatatttaagataatattgtttaacctttataaacgattaattttatttggatattttaaaataacacttgaaataggtgtcacaaaattctttcaaaacgtgaattctcagaacaacctccccgaatctggggcttgaagcctccgcctcactaaaagtagatcccaccattacccggcagcgcggaggcatacccggagactgggacccccacctcccccggggcgtgacctgtgatccttgacccgtgaccccacctcctctagggcgtgaccccctagccccacctcctccggggcgtggcccggagataaccctggtaagagtcgcgtagcccgagccgggcggaaccactgttcgcgctgccgtgtttccgggcggggacactcagggcgcgacgcttttctgttacccacagaggcccgccgcggctgcgccatccgcggccatgaagtttcgggccaagatcgtggacggggcctgtctgaaccacttcacacgtgagcagggaggccggagaggagcgagggaggaacggaaggaagcagtgagcgcgcggtggggaccgcgcaggaggatcagaacggggatgggcgccggaaggggccgcgggaggatggggccgggatgggggtgctggtgtaggccgcgggagggtggggccgggagggcgcggggcgggtcggagggcacttgtggggatgaaggcggctttcaagggacgtttctgaaacttgattccgatcacgtggctttaaaaaaaagcggccactgctcccatagacggctttatcaggcattgacataccttcaaggccccattcgtccctccaccctgacagtgcctaaccttgcatttaactgtgtattgcagtacctagtagtcaataaatccatgttgaatgaatgaatgactggtaggtgcctgttttcttatttgaacactgatgatgtgtgctgtacatctcccctagtttgttgggagaattgcgtgacatcaggggtattaaagtactttccagtgtgataccaacgttaagtggttatttttccaccgagaagttgatgaacaagaaattctgcaaaataagttggtctctaggatacataatgtgcattttagtaattccttattttaacccctgctttaggaatcagtaacatgatagccaagcttgccaaaacctgcaccctccgcatcagccctgataagcttaacttcatcctttgtgacaagctggctaatggaggagtgagcatgtggtgtgagctggaacaggtgagcaaaagcttctgagaggcctgcacactctgcagattgtcactggaaagatcacatataccctccctcatccctcattttttttcccttaggagaacttcttcaacgaatttcaaatggagggtgtctctgcagaaaacaatgagatttatttagagctaacatcggaaaacttatctcgagccttgaagactgc

SEQ ID NO: 3087 - DNA, 6000 bp, Homo sapiens
aacagacagcccgtgaggcactgtaggaacagcacagggcagaacagcccgtccgggacacccacctccccacccccggctcacactggccaaagatccagactgacaaatgactcagacacacaaacgcccggggctaagaggaaacacggcatggcccggaggttgcagggggcagcactcacagggatggggctttctgctatgcctacccctccacccagccatgatcagtggcctgaaatggtgtcatggaccccctcccatgtttgagcacttgctgtataccaaattcttacagatatgtttgtactcttaaatggttatgaagatcctgtcttcataggacgaaaccagggattctaggggtcaattactgttgatgtcaccatccttcattattattagataatctggccaaactcatacactaatcaacatcagtccccatcacaaccacaacaacgactgctgacccttccgaacccactcccagcctggggggttgcagaagcaccgagttccagaatttcagcctccctcccacaacgtccaacgcaccccctcgaagcacagcctgtccttcttttgagctggctctgtgtgatgaagggacacccagcaaatggcccagacccatgggcattcgatctattttcggttgcagtccctttacctctgacacctgtgcctgcgccagaccccttcctttcctggccggccatccgaggggtccctggtggcctctgggaagagaggaactgcagaagtccctttcattttccagctgaggtgctggctctgggccgatgctgccgggcaccccacaggaggtagccgccctctctggctcagtcaccagcacgagggcagggccactcctttggggctgcttgtcacgggtgccctttgccagcctccaaggacatccttccttctctgtccctctcccctgtcctcaagccccgtcccattttgaacctctgcatagcaggattcagattcccttccaagcgcatcagaactaaggctagctctggctgggcatggtggttcacgcctgtaatcccagcacttagggaagtcgaggcgggaggatcacctgaggtcaggagttcaagatcagcctggccaaaacggagaaaccccgtctctactaaaaatacaaaaattagccaggcgtggtggcgcgtgcctgtaatcccagctactcaggaggctgaggcaggagaattgcttgaacccgggaggcggaggttgcagtgagccaagatcgtgccactgcactccagcctgggtgacagagaaagactccctctcaaaaaagaaaacaaaccaccaaaaaagaactaaggctagctcatctcaccagtcctttatgatctaaaccagtgctgtccccggtggcagctgctggccacatgtggctaatggagcacttgaaatgtgacaagtccagattgagacgtaccctcgatgcaaaatacacaccagttttaagacctggtacaaaaaagaatgcaagatatctcaataacttttattttgattggatgttgaaaggattatactttagatatgttgtgttaaatatattactaagaatagttttacttatgttttcttttatttcatatggctactagtaaatttaagatcataggaggggctggatgcggtagctcacacctgtaatcccagcattttgggaggccgaggcgggcggatcacctgagctcaggagtttgagaccagcctggccaacatggtgaaatccggtctttactaaaaatacaaaaattagctggcagtggtggcggatgcctgtaatcccagctactcgggggctgaggcaggagaattgcttgaacctgggaggcagaaattttagtgagcggagatcacgccactgcactccagcctgggtgacagaacgagactccgtctcaaaaaaaaaatctgaactttgtctggatagcgacggagggtgtctgagcaaagcacgatgttctcagagccatccagagactgggaactctgtcctaccaaaatgggtgcacccagaggagctggaagatagagatgccctgtgggtgactcatctggttgccccttggtggcactgagccaggcaacaagcgggaaaggcttgtcaatgataacggcaagaccaacgatcaccaggcagccaggtgcacccggtagccctctgtgggcaattctgcatgtatgaccttatttagtcatacagctaggcaaggaggtgacactaagcatttgagtactgatggggtcttgaatgaacaagtaaatgaatgaatgaatggatggtggccgatgactgtcatctctagttcttacattatgtatcttatgcatcagactacacggcatggatattcagtgcaatggatttgattgtgaattgaggcccccttttgcaatcttgttgcatgttatgttcgtggagctcctgcaatgagcagaggctgctaagcagaagcagcgcacaggctgggggcaggacacagggcccccggcctcaggggagaggtctgttccagccacctcaagtctattcctgtgagtgcccctccacacccctcctggatccccccactgcaaactctctccccctggctccggactctctccccgtcctggaattaataaagactctgtgcagactgcggtttgcaagtctgaaagctggttcctgcccgtgtcactgcctcgagaagagaggggtccagctccccacagtagcccctgccttcctccttcccaggcaggcggaggcacgcagatataccattgacttcccctcccctgcagcaggcacatcctgggcatcgagcttcagaccctgcccctgagcagcccctaaccccaccaacaaagggtggcttgggggggctttcaccccagcataatctccatcagctaccctcaaagcacccccaaataaacacacaccgtaagtaagagctgtacactggctgtgtgcgtacatcttcaagacaattctcccagcatgcccctaccttccaaaattccagagctgctccctccaaagacccagggaaaaggaagggtttgtccagggtcctggggtggccccgtatagaccaaagcctgatagctgtcctagaagcagagtacttgcagagcgagtgacggcaactgtggtattgacaccagtcctagcaccagctgaacacagagcatttttgatctagcagaaatacaagaccacgttgtatttgtctttgcaataatctcttagctaggaatactgatcacctgtagacagataaggaaactgatgctctgtggagaggttttcctaccagaaaggctagagccagaaatttacttctaggtccaccaatacctgcctttgaccaatgcctgcatttgacctttccacgctgagccacccctgctggcactccagactgccacagtgctcctgcctccacaaggggtctttaactcatccctcggagccatcgtggtgcagggaaaagcccacagggcgtgtggcttccatgctgttccctgactggctgtgacctaggacaaggaacaagtttccctctcctattctctaggtctcacatttcttctcctctagcagtagtgggaagtgaggggtgggggacacgaccctcccctgttccatcccacactccaacccccaaaatcccccagggtccccgtccagctcagtcctgggggcagaaatgcagagttctccaggaacgtggtcccagctgtttcagtgcaggccgccccctcctggccaccagcggaatgtcagccttcccagaggggccgggagaacagcagtcgagaagctcccagactggtgtgggcgctagctgtgctcagcgtggggatgggaggtgacccagtgataatgggaagctgggctgcctgtcagtctgcggggggctcccacctccctgttcccccacagggcacctggggatccagcctgatttttaccagaccctgcggcctgcatggggctgggtatagggctgtgaccttgacccatgcagaatagaaccctgtgtgtcgggatcctccatgtgctccagatgcccctggggacagcaccaacatggccttaactcccaagccattcccctgcctctaaccccctggcatctgcaggcatccaccccagacccacccaacacctcctccccagcttcaggcgctaggcagagaccttggcccctgcagaatgcagccctgtccagggtcccctaccttccccccagatccctcccagagcaataccaacccgggcctaccttccaggccattcaacctgcagccccccggcctctgtagacatcgcaccccccaaacccccagacctgcccaatgcctcccctccccagctttgggcagaacctgtctctagccagacctgggggtgttggggagtctggagggccggggtgggggctgaggcgcgggacagctggcccgtatcctcacactgggcccggggcccagccggaggggcgggggcctggccactcgggccttggctggggctgggatttttggcctggccgccaggccctcccttctgcttcctctcccgagggctgtcctggcagaggcccccctcgctctttctggcgggaacagggccagcagcgaaagaacagtcgcagagggaaagcgggaaagagatgggggaaagtgtgtgtgtgtgagtgtgtgcttgtgtgcatgtgtgtgcgtgtgtgtgtcaaggaaaaaagctcgcagtccagcagcccgggcctgggaggcttgtgagccgggcctttcgtaattgtcccctccccgcggccccctcccccaggcctcccccctctcccgccctcccgcccgccctctctccctccctctttccctcacagccgacgaggcaacaattaggctttggggataaaacgaggtgcggagagcgggctggggcatttctccccgagatggcgggtctgacggcggcggccccgcggcccggagtcctcctgctcctgctgtccatcctccacccctctcggcctggaggtaaggacccctcgcccctgtccccagcgctgcccacagctgcgggccctttgggccaggtgactagacgctcaagggggagaccttcgtccctgggaactgcaaggggtcccaggtgggagcccctcagccactgggtcctcggaactgcccctcccaggagccagccccgtgcccaggaggaacctgtcaaagagacaccctcgactcagaatagtcccagcccagcatccaggctttgctgccctgcgagggctgagggggcccctgctcaggtgcccgggtgcccgccctgtagggggatcagagcatcctgggggagggcccagcgggaacccctgggtctggagacaccacagtctgcacacctgtggacacagctggggtgcacaccagccctggggacagggaacctgggcttgataccagctcaaccgcagtgagctgtgtgacctcagcaggttccttgacccctgggaagccgggatccccccgtcaggaaggtcagggctccgctgaggatgggtttgcaggttgggaagctgctgctgtgttctccctgctgaggcaggcagggactcctggtatgcatttgtgtgtgtgtgtgtgtgtgcatgcacacaggaatgagcgtgctgtgtgctcgtgtgtgtatgtgtgcatgcacaggtgtgcatgtgttcagatgcccggctgtgtcactgaacagggaaagggatttctggaggggtacatatgtctgctcacaggttcatccttaggcaggtgtatgcgtatgtttggaggaggtatatgaagctgctccttagtgtgtgcaaaagtctgccacctgacagacatgtagacatgtacacatgtagacatgggcgatctggcatccaggtgtgacactggtgtggactgtcactgtgtgtgtta

SEQ ID NO: 3088 - DNA, 6000 bp, Homo sapiens
atttactgtcccttaatttcctcaactgtaaaatggaggtaataagttctatctcataaagttatttggcagattaataattttttttttaattttgtcattttcttttttttctttccttttttttttttttttaattttttgagatggacttttgctcttgtcacccaggctggaatgcagtggcacaatcgatcttggctcactgcaacctccacctcccaggtttaagcaattctcctccctcagccttctgaggagctgagattacggccatgcaccatcacatctggctaatttttgtatttttagtagagacagggttttaccacgttggttaggctggtcttgaactcctgacctcaaagcatcagcacccctcagcctcccaaagtgctgggattacagatgtgagccactactccaggatttattttattttattttattttattttatttttttgagacggagtcttgctctgtccccaggctggcgtgcagtggcacaatctcggttcactgcaacctccacctcccaaatttaaacaattctcattcctgagcctccccagtagctgggattacaggcttctgccaccaggtctggctaatttttgtatttttagtagagacagagtttcaccattttggacaggctggtctcgaattcctgacctcaggtatccacccgccttggcctcccaaagtgctgggattacaggcgtgagccaccacacccggcctgctttattttttaatagagacgaggtctccccatgttggccaggttggtcttgaactcttggcttcaagcaatccccccacctcagcctctcaaagggctaggattacaggcgtcagacaccacgcccagctattctgcaaattaaatgagatatttctgtgcaattcttagcataacacctgcctggcacaccataagaacacaagaaaagctgtcgttattattattactacctagctaagtactaggcacataataggtgctaactttaacttaaaaataatagtttattactacatcaacacttgatagtcttatttcaataacaaatgtttcttgactacaacaacattcactgatcatttcttgtggcttaaaactctcccaaacttaccaatattagtggcaccagcatccagactgttttctaccatcttcttcaccgcagtgcttagactcagtactaccggcccagagcaaatctgatggactgacttccgatcaataggtttgatggccttagcaggttctgtactaaagaaatcagttacaagaaacaaagcaagtattcagctatatattttcatcctgattttaactgtgggaaatgactcaacactgcaaatagtttatgggtctaatctattcatttattatattaacaaatacatttattatatccagaaatggaaacattgttttacaatccttaaacaagtacccaaaatacttctggatagacacttcaaattcaacacatccttactatctagtatccacatggagaaaacatacattgtatctctcaaattaccaaaatctttggcaataatggtgtcttctttcttgaaaactgaaagcatggccggtgcggtggctcatgcctgtaatcccagcaatttgggacacagaggcaggcggatcacttgagatcaggagtttgagaccagcctggccaacgtcgtgaaaccctgtctctaccaaaaatacaaaaaattagccaggcatggtggtgggcgcctgtaatcccagctacttgggaggctgaggcagaagaatcacttaaacctgggaggcggaggttgcagtgagctgagattgcagcattgcacgctaggctgggcaatgagcaaaaaaaaaagtaaaagcaacataatttcccacataattagaaaaaccaacagtatgctgggaaatacacaatgtttaagtcaaaatcatctcagaaattggataccagttatataactattccttatacacagttgcctttgataccctactccaaattgaagctgccagctactgtcttagcaaagaccctcaaagttcttgctgtacttgttttaagagtttttttttgtttgtttgttttttttgagacggattcttgctctgtcgccctgtcgcccaggctggagtgcagtggcacgatcttagctcactgcaagctctgcctcccgggttcacaccattctcctgcctcagcctcctgagtggctgggactacaggcgcccacgaccatgcccagctaattttttgtattttttgtagagacagggtttcaccgttttagccaggatggtctcgatctcctgacttcgtgatccgcccgcctcagcctcccaaagtgctgggattacaggcgtgagccaccacgcccagcccactttaagagttttataacggtttcatttccccttattccctgctccaacccatcctccactctatcaccagagctatttttgaaatcacgaatctggtcaaataatttttctgcttgaaaaattactagtgccccacttcctactatatgaaacttaaaatctagtcatcactgggccccaaactaccttcttttcagaatctctccgatcctttcccttcatcaagtcccctacattattattattattattattattattattattattattatttgagacagagtctcaccctgtcacctgggctagagtgcaatggcatgatctcggctcactgcaacctccacctcccaagttcaagtgattctcctgtctcagcctcccaagttgctgggattataggcatccaccattacactcagctaatttttgtgtttttagtagagatggggtttcaccatgttggccaggctggtttctaactcctgacctcaggtgatctgcccgccttggccttccaaagcactaggattacaggtgtgagccaccgcaactggccgtcccctatattgcagcacagtgaacaactgtttcctgaacatcacaagctctcttagacactacagtgtataagcaggtctctgtctaaactgctctcctcttgcccctctgcccaaccaatgtctgctcatccaaagaatgtatcccgtgtgttcattaacttagcaagttcccagtaaacagtttaattgatcactcgttaagagaaggcgggaaacctccatgaaaagagaaatcagtgggtatttcctacagcatttaacacatcgtaggccttcaataaacccttgtgaaataaacaaacctctttactcttcattctatgttgctaagaatctcacctaagtctgtctaccatgtgaaactgcagatgacctcacagaaaatggaaagaagtatctctaaaaataagtttatttggcaacacactacaggctacaggttcacttctgattttttttctttttttttttgagatggagtcttgctgtgtcacccaggctagactgcagtggtgcaatctcagctcactgcaacctctgtctcctgggttccagcgattctcctgcctcagcctcccaagtagctaggattacaggcgcctgccaccacgcccagctaatttttgtatttttagtagaaatgggatttcaccatgttggccaggctggtcgtgaactcctgacctcatgatccacttgccttggcctcccaaagtgatgggattataggtgtgagccaccgcacctggtccacttcagatatttagatacagacggcaaatttatttaaatgtctcaatacatttaaatgtagttacctaaatatatctaatatatttaaatgcagagagcaaatttgcgtttacaaatctgacatggaattcaactgtgctagccaagattcggtgtagcttaccagccagaaatcacataccctaacaggtaaaaatgcattgcattttttaaaactgagcagctacgcaaattaggatatgtctggatgctctactgtccccaaaataacctcaatttttttttaaaaggccaggcacagtgcattacgcctgtaattccagcgctttggggggccaaggcgggcggactgcttgagctccggagttccagaccagcttgggcaacatagcgaaatccccgtctctacaaaaaaataaaataaaaattaaaaataaaataatataaaaataaaaataaaaggggagggagaacaggtagaaaggaaatgcattcagtctatggggatttcacgttccggcttcaagtccacggccctgtgatgggatgtgggcagggcctgagacaggccgaacccaactcttcacagggccgaattctttgcccgcagcccagcaccccgaaggagcttgcctcggcttcaaggcgcacctaatgggcaccggatcgctggggcgctgaggatgccgctccggggcctccacgaggtgacctcgccacgcgcctcggccatgttccccccatttccagggaggttggaagccgtggttctcaaagagggcgcgcgagaggggcgaccgcgagcccagctcacctccagctctcagctctctccaaggatgcaacaccggatccgcctcggggactgggaaagtgccctccacggttcccacaggcgccccgcctcctgggctcccattggctgctttcgacgttgtgctccaccctttccgggcggggcggaaaaaatacttcccgtctctccttttcgcctagtggctctgtcaaaggtcgagtccgtgacgtcaaagagcctggaccaatcagagcacaccggactgcgttttttttccgaacgcccgcagcagggtcagaagggaggtggtcgccctccgtcgtggtctggcgtgtattccgagcgttggtgtctggcggtttccgagcgttggtgtctggcggtttccgaccgttggtgtctggcggtttccgaccgttggtgtctggcacgcgccaccctctcttgctttggttgcgccatgccgatgtaccaggtaaagccctatcacggggtctgcgcccctctccgtgtggagcccacctgcatgtactggctccccaacatgcacggcaggagcggcggcccagcacttggcactggccacttgcaggtaggagcgcggggccccccgcccactgcgcacgcgcggcggccgggtgctggcccgggtgcccctaggccggatagagtgcgtcccaaccgattcgcggccccaccccggcatctgtgccggccggccaggggctcacccagatttttatgttttaaaagatttattcaggccgggcgccgtggctcacgcctgtaatcccggcactttgggaggccgaggcgggcggatcacctgagatcaggagttcgagaccagtctggccaacatggtgaaaccccgtgtctactaaaaatgcaaaaattagccgggcgtgtgtcgggcgcctgtaatcgcagctactcgggaggctgaggcaggagaatggtttgaaccctggaggcggagcttgcagtgagctgagatcgagccattgcactcgagcctgggcagcaagagtgaaactccgtctcaaaaaaaaaaattattatatacatatatatctttatatatattaaatatacctttattatgcgtattatacatattgtatattatgtgtaatatatgacataatatattataaaatatattatatattatatatatatatattttttttcctggtcgagcgcggtggttcacgcctggaatctcagcgctttgggagaccgaagcgggaggattgcttgggagaccgaagcgggaggattgcttgagcccggagagtttgagaccaccctgagcaacatagcaagacccttgtctctatgttttttttttttttttgagttggagtcttgctctgtcgcccaggctggaatgcagtggcctgatctcggctcactgcaagctccacctcccgggttcacgccattctcctgcctcagcctccccag

SEQ ID NO: 3089 - DNA, 6000 bp, Homo sapiens
aaccaattttgaaagttcattcaggctgggcatggtggccaaaaattagccaagcatggtggcgggtgcctgtagtcccagctacttggcaggctgaggcaggagaatcgcctgaacccgggaggcggaggtgcagtgagccaagatcgcgtcactgcactccagcctggtgacagagcaagactccgtttcaaataaaaaactaacacactgtactactgcatgtaaggtggaaaagacaactggaattaaaatgtgttcaggtccttgtagaagataagaaatccagaggaaagcaagcaaagggggaaaaagaaacagaaaagataaaatgattgtgccaactcaatactaggccataaggctaagtctccataaatgtcttttttttttttttttttttttgagacagagtatcactctgtcacccaggctggagtgccgtggcacaatctcagctcactgcaacctccacctcctgggttcaagcaattctcatgcctcagcctcccaagtggctgggattacagacaaatgccaccacatgcagctaatttgtgtatttttagtagagatggggtttcgccatgttggccaggctggtctcgaactcctggcctcaagtgatctgcctgcctcagcctccccaagtgctgggatcacagatgtgagccactgtgcccagcccctacataaatttcaaacaccacattccctgactacaacacaataaagttagaaatcaaataacgaaaatataactagcaaaattctgtatgtttgaaaattttaaatattttcccagaaactataaaactacatgttaatgtggataaatctcaaacaatcttaactgaaataattaaatcacagaagcctgaataatggattcatttacataattaaagaacacattcatagtggtaacactataatgaaagatgagaaagattaacacaaagttcaccctagtgtttacctatgggtaataaggggactgtgaggtagggtagaaagaaggtacacaaaggatctctacagcactattaatgtttcatttcttgagctggggctagagatctgggtgatatctcatttttattttttaaactacatatacgctttgtacactttcagatattagaacttcaataaaattataaaaaaagaaacagagagggaaaaaataattaagtataattgtcaagatggagctaaaaaataacacgggtgaacaaggtgccacccacatctaagcttccttcccatgtcatgcaatgcctctcctcatctgctccatcaatcaataaaggcataatcactcctgtgatacctttaagaaaagaacacgctttaagaaaagaaacgctctctcgaagccgggtgcggtggctcacacctgtaatcccagcactttgggaggccgaggcaggcggatcacctgaggtcaggagttggagaccagcctggccgacatggtgaaaccccatctctactaaaaatacaaaaattagctaggcatggtggcacatgcctgtaagcccagctacttgggaggcctcagcctcccaagaccatgagaatcgcttgaacccaggaggcagaggctgcagtgagctgagactgtgccactgcactccagcctgggcaacagaaagagactgtctcaaaaaaaaaaaaaaaaaaaaaaagaacatgctctcttattcaaggttaccttctatcactccaaggattcaccccataatcttatctttcttgatatgttacactcactaaaatgttcacatcaaatcaagtttgtagacacttgtccttaccaccttacaaaaagtgagatggtatcaacagaggtaagacactgcttttacctgcatgtcacttttggcagctttcgcagcattgaaaatatcattggctggtggctctgactgtttccggctatgacgatgtaccgcttgggaccctttctttggatattttgccacctgatacacataaaaagatcagaaatatgaaaaaaaggtaacagtgacattaacacttggtttcatcattatcacacaagtaggcttatgctgccaattccacagcagtctgagttagactcagtcctgaaataattgatttttatattatgaagtttattaacttttttccctttaaaaaaaaaattccttgagtctccttcccgtatctctataaccaaacatccttttcttttcttttctcttcgaaatttctcttcttcctatttccgtcccttaatactttgtaaatcttgtccttttttgaaccatatcacctgaacctcttaggttttctcttttttttgagacggagtctcgctctgtcgcccaggctggcgtgcagtggcgtgatctcggctcactgccagctctgcccccggggttcgtgccattctcctgcctcagcctcccgaataactgggctgattcccccacaagattcaaaaacaaaagaaaactggctgactcaccggcgttgttttcagtggtcgttttgctgctttcttcttcacaccgcgattgaagctgtcctcaaatcattttcttgtcttcttgtctatttgtatgaattactgagttacattctcattgctacttatttaagcaaagtattcttagtttgttaagaacaaagaactacaaattgtgttcattttctgtcctttcctgttcttagactaaattacctgaaatacatcaaaatatatgctgtatgcttacctatatcaaaactatgttgtttaggtgccgggcacggtggctcacacctgtaatccagcactttgggagttcaaggcgggcggatcgcctgaggtcaggagttcaagaccagcctggtcaacatggcaaaaccccgtctctactaaaaatacaaaaattagccaggtgcagtggacagtgcctgtaatctcagctactcatgaggctgaggcctgagaattgcttgaacccaggaggccaaggtggcagtgagctgagatcatgccactgcactccagcctgggtgacagagtgaaactccgtctgaaaaaaacaaaaaaaacaaacaaacaaaaaacctgaccatattgtttagggatacttagctgacaaaataatagagacaagcatgacataattaccataaaaatcaggccctggggtgctggtggggaaggtttaagtggaaagaatggagcggtgacaatgtgtgtcaacctaggaggtggtgaccctggggttcgctttgtaattcctcaaaatgagcatttatgtgctattcacttttcagaggatagaattctgaactaaaatgtttaagcagccatacgcaaaaaaaaaaaaaaatatggatagatttttattttaattaaaacatttaaaaaatagagacaaggcagctgggcgtggtggctcacgcctgtaatcccagcaatttgggaggccgaggcaggcgaatcacgaggtcaagagatcgagaccatcctggctaacacggtgaaaccatgtctctactaaaaatacaaaataaagttagccaggcgtggtggcgggcgcctgtagtcccagctactggggaggctgaggcaggagaatggcgtgaacccgggaggtggagcttgcagtgagccgagatcaggccactgcattccagcctgggcgacagagcaagactccaactcaaaaaaaaaaaaaaaacatagagacaagggtcttgctatgttgctcagggtggtctcaaactctccgggctcaagcaatcctcccgcttcggtctcccaagcaatcctcccgcttcggtctcccaaagcgctgagattccaggcgtgaaccaccgcgctcgaccaggaaaaaaaatatatatatatataatatataatatattttataatatattatgtcatatattacacataatatacaatatgtataatacgcataataaaggtatatttaatatatataaagatatatatgtatataataatttttttttttgagacggagtttcactcttgctgcccaggctcgagtgcaatggctcgatctcagctcactgcaagctccgcctccagggttcaaaccattctcctgcctcagcctcccgagtagctgcgattacaggcgcccgacacacgcccggctaatttttgcatttttagtagacacggggtttcaccatgttggccagactggtctcgaactcctgatctcaggtgatccgcccgcctcggcctcccaaagtgccgggattacaggcgtgagccacggcgcccggcctgaataaatcttttaaaacataaaaatctgggtgagcccctggccggccggcacagatgccggggtggggccgcgaatcggttgggacgcactctatccggcctaggggcacccgggccagcacccggccgccgcgcgtgcgcagtgggcggggggccccgcgctcctacctgcaagtggccagtgccaagtgctgggccgccgctcctgccgtgcatgttggggagccagtacatgcaggtgggctccacacggagaggggcgcagaccccgtgatagggctttacctggtacatcggcatggcgcaaccaaagcaagagagggtggcgcgtgccagacaccaacggtcggaaaccgccagacaccaacggtcggaaaccgccagacaccaacgctcggaaaccgccagacaccaacgctcggaatacacgccagaccacgacggagggcgaccacctcccttctgaccctgctgcgggcgttcggaaaaaaaacgcagtccggtgtgctctgattggtccaggctctttgacgtcacggactcgacctttgacagagccactaggcgaaaaggagagacgggaagtattttttccgccccgcccggaaagggtggagcacaacgtcgaaagcagccaatgggagcccaggaggcggggcgcctgtgggaaccgtggagggcactttcccagtccccgaggcggatccggtgttgcatccttggagagagctgagagctggaggtgagctgggctcgcggtcgcccctctcgcgcgccctctttgagaaccacggcttccaacctccctggaaatggggggaacatggccgaggcgcgtggcgaggtcacctcgtggaggccccggagcggcatcctcagcgccccagcgatccggtgcccattaggtgcgccttgaagccgaggcaagctccttcggggtgctgggctgcgggcaaagaattcggccctgtgaagagttgggttcggcctgtctcaggccctgcccacatcccatcacagggccgtggacttgaagccggaacgtgaaatccccatagactgaatgcatttcctttctacctgttctccctccccttttatttttatttttatattattttatttttaatttttattttatttttttgtagagacggggatttcgctatgttgcccaagctggtctggaactccggagctcaagcagtccgcccgccttggccccccaaagcgctggaattacaggcgtaatgcactgtgcctggccttttaaaaaaaaattgaggttattttggggacagtagagcatccagacatatcctaatttgcgtagctgctcagttttaaaaaatgcaatgcatttttacctgttagggtatgtgatttctggctggtaagctacaccgaatcttggctagcacagttgaattccatgtcagatttgtaaacgcaaatttgctctctgcatttaaatatattagatatatttaggtaactacatttaaatgtattgagacatttaaataaatttgccgtctgtatctaaatatctgaagtggaccaggtgcggtggctcacacctataatcccatcactttgggaggccaaggcaagtggatcatgaggtcaggagttcacgaccagcctggccaacatggtgaaatcccatttctactaaaaatacaaaaattagctgggcgtggtggcag

SEQ ID NO: 3090 - DNA, 6000 bp, Homo sapiens
tgtacgctctcctgtccatgggaatgatcaaatagaaagtcccgaagtgggccaaggactgtggctcacacctgtaatcccagcagtttgggagaccgatgcgggcagatcacctgaggtcgggagttcaagaccagcctaaccaacatggagaaacccccatctctactaaaaatacaaaattagccaagtgtggtgacatatgtctgtagtcccagctactcgggaggctgaggcaggagaatcacttgaacccaggaggcggaggttgtggtaagccgagatcacgccactgcattccagtctgggcaacaagagcaaaactcggtctcaaaaaaaaaaaaaaaaaaagtcccgaagtggttaacactgccatttaggctgggcatggtgattcatgcctgtaatcccagcactttgggaggccaaggcatttgagaccagcccgggcaacatggcaaaaccctgtctctataaaaaatacaaaaaaaaaaaaaatagctgggcatggtggtgtgcacctgtacccccagcttctagggagggcgagatgggagaatcatgtgagcccctggagaggtcgaggctgcggtaagccatgactgcgctactgcactccaacctggatgacagagaccctgtctaaaaaaacataatatttaaaaaaaaaaaaaacttatcatatagatcaggtgtcataaaatctgggggttcaggctgtggctcctccctctgcacccttgcgatgcaaattaacctattaccttaaaatgagatgtgaccaattctgctcagagacagaagctactggtcaaagggattcagagcaaaccagtcacagctaccagaggatttacagagggagctaacagagccgggctgggctgcagagcgacctttccacagcacgctgcaacctaatacagtgtgttaagccaggggacctacaggggagacacagattgggaaaggctgggcttggtaagcaggagaattggcccaaatgactcatcacataaggagagaatgaggcaggtaatcagaagctagcatctctaactaaggagatcaaagaaccagtgggatcaccttgctcagtgggaaggtgatctggataaataccaaagacggggacacttgcctgcagctgggcttttctgctcccagtgacagaatgccaaagtgagcctgctccatttaaagcataggccgggcgcaatgactcatgcctgtaatcccagcactttaggaggcccaagcaggtggatcacttgagtccaagaattcaagaccagcctgggcaacatgaagaaaccctatctctacaaaaaatacaaaaaactagctgggtgtggtggcacatgcctgtagtcacagctacttgggagactgaggcaggaggattgcttgagcccgggaggcagaggttgcagtgagctatgatggtgccactgcacactccagcctgggcgacagagtcagacattgtctcaaaaaaaaaaaaaaaaccatcttgaactgtcctttaaaagctctactaggctgggcacagtggctcatgcctgtaatcccagcactttgggaggccaaggcggaggatcactcgaggtcaggagttcgagaccggcctggccaacgtggtgaaaccccatctctactaaaaatacaaaaattagctgggtgtggcgacatgcgcctgtaatcccagctactcgggaagctgaggcacgagaatcgcttgaacctgggaggcagaggttgcagcgagccaagatcacgccactgcactccaacctgggcaacagagcaagcctccctctcaaaaaaataaaaaataaaaggtctattcaattgtgcagacaagggaaagcggttgattggctttaggcaaaggggtgacatgatgagatttgcattctgaaaagaccattctggttgcagtatggaggacagagtggcgtggagctggagtagacaggggaaaccgacaaggaagttattgtcatagtccaggcaaagggtgatggcatgtgagacaggatagtagcaggagagacaggagaaatggcaggccagagagacacatggcaggtaaaatggacatggacagacaggagttgggttacatagaagggggctagggaaggagcttttagggaggggtcctgggtttctggattgtgaaattagtggtgccatctacctggaagaaggccaggctcagcatagatattatgatactatgttttgagctgaattgcttttttttttttttttttgagacagaatctacactctgttgcccaggctggagtacagtggcacaatctcagctcactgcaacctccacctccagggttcaagcaattctcctgcctcagcctcccaaggagctgggattacaagcgcccgacaccacacccggctaactttttgtatttttagtagagaccaggtttcaccatgttggccaggctggtttcgaattcctgacctcaagtgatcgtcccacctcagcctcccaaagtgctgggatcacaggcgtgagccacggcatccggtctgaattgcctttttttttttaaaaaaaaaaagtccgggacaggagattttgcgctgtcacacaggccggagtgcagtggcccagtcataactcactgcagcctccagatcctggcctcaagcaatcatcctgcctctgcctcccaaagtgctggaattataggtgtgagctaccacacctggcctcagctgagttgcctttgaaacattcccatgaagatgcaaagtttaactcagagaagtcagaggtcatgggaattgaatcgtacctaaagccataacagaaggaaagagtacaagaaaagaaaagggtccataatggagccttgaggattttctctatttaaaataactgaggccaggcacggtggctcacgcctgtaatcccagcacttcggaaggccgaggcaggtggatcacctgaggtcaggagttcaagaccagcctaacatggagaaaccaccccacccccccactaaaaatacaaaattagccgggcgtggtggcgcatgcctgtaataccagctactcggaaggctgaggcaggagaattgcttgaacccgggaggcagaggttgctatgagccaagaacgcgccattgcactccaacctgggcaacaagaacgaaactctgtctcaaaataaataaataaataaataaataaataaaataaccaactttaggatgggtgcagtggctcacgcctgtaatctcagcactttgggaggccgaggtgggcggatcacctgaggtcaggagttcaagaccagcctggccaacatggcgaaaccccgtctctactaaaaatacaaaaattagctgggcgtggtggtgggcgcctgtaaccccagctactcgggaggctgagacagaagaagaactgcttcaacccaggcggtggaggttgcagtgaactgagatcgcgccactgcactccagcctgggtgagagagtgagactccatatcaaaaaaatgataataataaaaataaataaataaaaaataaaataaccaagtttaatgtatttttactacagtcagtttcttagttcatttgtactgctttaacagtacctgagacctggtaatttaaaaagaacagtagttggccgggcacagtggctcacacctataatctcagcactttgggaggctcaggtgagtggatcacttgagtccaggagttcaagaccactctgggcaacatagggagaccccatctctacaaaaaataataataataaatagccaggtgtggtggtgcacacctgtagtcccagcaacatgggaggctgaggtgagtggatccaggtacagcacttaaacactcctgacaatgagtgctgacaaagaaaaactgagcaaaagtggaattcgagagaactcgaatttagcccagctaaattttgtatttttagtagagacagggtttcatcatgttggccaggatggtctctatctcttgacctcgcaatccgcccgcctcggcctcccaaagtgctgggattacaggcgtgagccaccgcgcccggctacaagttcttttttctttttgttccttggaaagcatcgctgggcatttatcctgtcctagtatttgagtgaaacttctcttagcatttcagcgcagtgaccaagagacaccctttcctttccttctccttatgggaaactcggttctaacccagaggacttgggctccaggacccagtaaggcagccctggactaaaagggagtaaagacaaacgtgaagttcagtccggtgttcagggctgccaaagctcatagcctggagtttcttatcctctaggcggggtagagacatttaaaaccgcccctaaacttgtgaggcgcataggctcatgggaaatagagtccagtacttgtccggagaccagcagtgggccctgggaggcggacttccggtgcactcctgcgcgtgtgcacctctcccggcgtgcgtgttcgggcatgcgcgctgccgccgcactgccctcgcttcctgtgagtcttcaggtcgccgcttgctctcgttcctagggtttggcctgcagtggacgagcatcgcatagcctgcggggctggatgctgaccgcccgggccagcacctaggcggacgcggagctgtgcagaccagggttcgcgcgggccgggtggaggctcaagcggggaccccggagcgtgagccccggagtcggcggcgctggggccagaggggccgggagggagtcggctgaggtggcggcggaggcgaagtggcggcggaggcgaaggggcggcgggacccgggcctggcccgtatgtgtccttggcggcctagactaggccgtcgctgtatggtgagccccagggaggcggatctgggcccccagaaggacacccgcctggatttgccccgtaggcccggcccgggcccctcgggagcagaacagccttggtgaggtggacaggaggggacctcgcgagcagacgcgcgcgccagcgacagcagccccgccccggcctctcgggagccggggggcagaggctgcggagccccaggagggtaagtctgggattttcgggcccagagcgagaagggcctgggtgaagtcaccgtgtgttggggacctttgagtgtggggcagggggagggtcccgatcgcttgcaggagagacgtgtgtttgggttcgagggcagggtccggctgcacggaacaggcgctgcatgggaagatctgggaggacgaggcttacgggggcgtggagggtgtcaccaccctcagctgcggacgtcgtctccactccccgctaacccctaacagcccttcctcctcctctccgtgctccagatttcgaccgcctctaaacgtccctcagcacctctgttctctcatttaagtgtctgctgattcgccccttagatctgccctgggagaatcgtagtaatgcaggaacagcctgcagggattctctcctgctgcctcagttgctaggggaagagactgggccttagcaggtgggtgacttgaccaggtcactggctttgtggatggaattactcatagtagaactcaggagtcttatctcccaggccagtgctctttctcccgtatcctagttttcttaatagaagattattaggtgcagcaataaccaagttcagttagataatttagaaacaaaaccatattttatacacattcatttcatttctgagagctcacatattcaattcctatggcttctttgattttaagcagtttagagagacaataagaaaacgcgggccggatgcagtggctcatacctgtaatcccagcactttgcgggcctagagcaggagtatcccttgagaccaggagttagagaccagcctaggcaacatagggagaccctgactctacaaaaaatataaaagcagccaggcatgctgggatgcacctgtggtccta

SEQ ID NO: 3091 - DNA, 6000 bp, Homo sapiens
tgctaagttccgggcatcttcgtgagtgctgggtaaacaagcggtggacgagatgggcatggtccctgctctcagggaactgaaagttgagggagacaggtaataaacacgcttgacatagcaagaataaaacaggtagaaatcccagtctgataagtaccattgcagaaaagcacagagtcctgtggaaaaactaaacaaagtattaaattagactgggaatttggcaatgctgagatccaaaggttcaggaaaagttatccagacatgaagtggacagttttccaggcaaagaaaagagcaccagaatgtcctgagagaggaaagagattggcttggagaagaactgggaaggcccagggcatctttgagcctggtgaggggagaacagcccaaggtaaggctggggaacagggaacaggtaaagcattcagaccaccacagtggttccccaaccagaatggcaccctccctaaggagcaatttggaaatgttcggggcaattttgttgtcaaatgattgggggagaggagccaaggaggctccatgtcttgcacattgcaagatggtatcacacaagaaaactgtcctgatcccacacagctttcacatgtcctactgaatattcatataggttaaaaaaaaactggttataatcatctgatgtgcctgtgtcttatatacaaaaaacaaagtaatcttgtaggggtgtaaaatgtgctgaatttttaaggaatgtaaccaccatgttaacagaaggaagattatactttgttgtgttcaggaatttattaggaattactcaccattttggagaactgggtcactgatagcagtgttattcatagcgttcagtctgcatttgtactgtcacattcaaggtgctcctatgcataactactagcatctgactaattatgctttctagcatactgaaaagtattatcttattataaaggatttccttttattctttctgctttggttcagacactataattttttttgaaattatgtatgtagttaggctatactatctataaacttcatttcacaatagtaaatggggagttataaaaatgttattaaaatggaacattggggctggtaaagttaagaaccactcaagaatatcttgtatgtatatcttatagataccattctaggagtatataagatagaactcactgatattgcctaccagcacctgttatccctgttttagtctcatccttagactgcaactgaatctgttctcatcagctggcacatgataggttgtaaatgacttgttggaagagactgggaaacagcagatacacttagctcaaggtcagaagatttctagaccagcgctgtccagtagaaatctagtgcaagccacaaatgtgagccatatatgttgtttaaaattttttagtaaccacattttttagagttaaaaaaggtaaaattaattttaatattttattgtattattagatatatcccaatcatttcaacatggagtcaatatgaaaaattattgatgagatactttacattctttttttatatggaatatttgaagtctgatgtgtattttacacttaacagcaaatctcaattcagactagccacatttcaagtgctccatagccacatatggccggaggctaccatactgaacactgcaggtccagatccttttcagttactaagttcctaggtaattctccaagagacatttccttccttgggtctccgtttcttcataatttaaacagagtctaagccaaatattcttgtttccagcactgaccttctgtgatttttttcaaatttagccagtccctttctcctctctctttactcacctccttttctcccccattttcccatttctctttccctgtttcttctcccctcatcccgagttcttttctctggctaaacccagggcagggtgggcagggggagggatggtggctcacacctgtaataccaggatttcagaaggtcgaggcaggaggatctcttgagcccaggagtttgagaccagcctgggcaacataagaagacaccatctctatgtaaaatttaaaaactgtagccaggtgcagtggctcatgcctggaattgtaatcccagcactttgggaagccaaagtgggcagatcgtttgaacccaggagttccagaccagcctgggcaacatggcaaaacctcatctctgaaaaaaaaaaacaaaaattagccaggcatggtggtgcttgcctgtagtcccagctacttgggaggccaacgtgggaggatcgcttgagcccaggaggtcgaggttgcagtgagccatgatcgtgccactgaactccagcctaggcaacagagctgcccagagctgcttgtcaccgtagtttcctgatctgcaaaatggtaataatcctcacctcggagtttgttgggggtggggagtttaatgtgatggcataaatgaaaaagcataataaatattgttatctgtaaccacacatttttaaacgaggctgggaaaggagaagcatatttctcccaggaggcacaggcgcttgaatctgtttctttgttgtgttttgttttttgagacagggtcttgctctgttgcccaggtaggagcgcagtggtacgatctcagcttgctgcagccttgaccttctgggtaactgggaccgcagcgatgcgctaccacgcccggctaatttttgtattttttttaatagagataggacttcgccatgttgccaaggctggtcttgaactcctgagctcaaaagatccacctgcctccacctcccaaagtgctgggaatacagtcatgagccaccacactcagccaaatgagtgctttttatgtgatccacaatcataaataacttttttttttttttgagatggagtctcgctctgttgcccaggctggagtgcagtggcgtgatctcggctcactccaagttccacttcccaggttcacgacattctcctgcctcagcctcccgagtagctgggactacaggtgcccgccaccatgcctggctaattttttgtatttttagtagagacggggttttaccgtgttagccaggatggtctcgatctcctgacctcgtgatccgctggcctcggcctcccaaagtgctgggattacaggcgtgagccaccgtgcccggcccataaataactcttttgcttcatacagaagggttttacagtcatttaactgtattctttttgtaactatattcccattttacagaggagaacatgtactttgcccaaggccacacaatgaagcatagaactggggttatgctcttaattatgctatgccaagtgaggtctccacctaggtaccccagcaacacacgaaagtcacttcgtttagggcacttaatttcatggtgtcaaggtctgttttttttgttttttgtttttttagagacagggtctagttttgtcacccagtctggagtgcagtggtttgattatagctcactgcagccttgaactcctgggctgaaatgatcctcccactacggccttccaaagtgcttggattacaggtgtgagccaccacacccggcttgtttacttttcacatgttccttctttattatgagctccctgaggtcagggagtgactttgcaccattgcaactccagcacatatatctgagcctgacagatagtaggcacttcgttggtggaggatattctaggaaaatgtatgttcaaaggcatgcaggtgtaaaatagcacgcttaatctccgaactatttaagtaggtaagttctactgaagtatgagtttgagaagaaaaactaattctcattgtttgagtcacggactgtgggcgaaaaggtgccacatttggagaatatgctcaaagggagcaatagcttcctttgctgccccaaacgtcactgatggtgaggcttctgctgcacaggagcctggagaagtaacaaagatcacaaagggcctgccttgtacttgaggctaaacatttggagtttacaatgtaggtaatgtgaagtccttgagagattgtatttatttttaaaccatccagcccaaaatgtcatgtgagagattttaaacagtgagactcaaagggaaagtaacgggcccggtagcatggctaactaataataaaacaaatctcagccaaggggcctttttatctcggggccctttccaccaaacttgcatggcttcagtggaaacctaacaatgcggcagcggggaggctaagcggccgaggttccaaaacaacgtctggcaccttctaaaagtttaacaatgaaccagcctctaaaattaaggtttaatgaaaccaaggcgctttctttcgtgaaggaattccgttggcaacatctttgcagcgatgccccgctttctggaacccctccctgcccagcgcccccttcattttagtcctcccctcacgctcccacctctcctctcccattgtttcgatctactcccgctgaggcaagctgggaagtgtagttgcacgccctgctgcctgagtcggttaggtagctctaaaaactcgtaactccacaacagctcaatggattttcgagaggtggggtaaagcctgaaggctcagccggtttatccaacgagcaatctgggatttgcagtttccagcgcccgaagtgcgcccgctagcagagagctcttggactctaatcccgccccctccccgagcctcgcgcatcctgatggcgtcacgcggccccgcgaggtctgtgggatacatagtagtcctcaaggcgggtctcactcttggccgctgcaacttgaggactacacttccaaggaggcagcgcggcgcgccgagaaccacccgaggccgtgattggctggtgagccggccgcacgcggaggatcctaaggagcagctctgttgcgacataggccgagcagcgaggcccagtgagttaggggaaggggagctgtagggagagggtccccgccggtgagggggaaagagaattagaagaggaagcagggacggggtttggatggagggctctgcgagggggaagatagggctaagggagagaagctgacgggcggggtgggggaggacccgggggtgacgagcgtggagactcggaggggactcacgcgggcgaggacgagtgcgtcccggcaagaggctgggctcgacggccgggtgatgtggagagggacgatcgagaagaggcccgagacggacgggaggaggaagcccggaaagtgaggcggctagctgagtgcggagcgccaagttgtagggaaaccggagacggagacctccgctgaggggcagaacctggtccccagccggaggccctgaaagaaggagcgtttccaaagtgaggcagtccgtgggggactggtgcctgtgggaagagatgttaagattagaagagccgctgagaatcggcattggtttgggataccctgaccaagttggaacagacgaggcgggggcaggccagggcatcagaggcttgatgttgatacgaagattcctgagagggatggagcagggcccaggcattcttactagtaagtttagggtttgggggtatctgtttgccttccttcaggctccctgaaacaacagtaacctacccctgtgggtcatcatcatgccctccgacctggccaagaagaaggcagccaaaaagaaggaggctgccaaagctcgacagcggcccagaaaaggacatgaagaaaatggagatgttgtcacagaaccacaggtggcagagaagaatgaggccaatggcagagagaccacaggtgaattgagggaggggtgagttggggatggttgctaagacttaatgcatgccccagccagagttggaatcttgatgctgggggtagtggagaatgtatctggtgtcatgcaacttttcatgatgaatcaaatcagtagagttggaattcgtgccaccctgtcattgcgcaaggaagccgaagacga

SEQ ID NO: 3092 - DNA, 6000 bp, Homo sapiens
gaaaaattccaggctttgagaatcacagagatcttgattaaatcctggccctgacatttactagttttctcatgtgaaaaatacaatagtaacaaatagggttgatgtaacaattaaaggacataatataaagaatgtactgctgatcccacagtaagctcaaataactattattagatagctattgttacgataatagaacttagcagatgctgatttacaatccaagtatcaaatctattgactcacaatattagtgaaactgtcaaatagattaaaattattatgtccactgtgtattcttttctagttaggaaattttgcctcggaaaggttgcttagagaattaagagaaacagtttgtcataatggctatcatcaccaagctctgatgcctgatgtattagtcttccctaagaggattaaactgtcatgtcaagcagaatttacttgggttccctttaccctggacacttaacaaactcttctttcgcttctgaaactgcaggttgaccataccttgcttctattgactctttccttgaatctggacatcattaattttaattttctgtaataggcctatgtcagatttttggagtacctcttttcttatccatggaggatatgttccaagacccccaatggatgctgaaaccacagatagtagtgaaccctatatacactatgttttttcccatacagtaatgaacaggtagtgtgtacagcatggatatgctggacaaagggatgattcatgtcccacgtgggacagaacaggatggtacgatattttattatgcaactcagaatgacatgcaattattgaaaacttgtgtatttatttctagaagtttctgtttaatagttccgaactgtggttggctataactgaaaccacagaaaatgaaactgcagataaggggggaccagtgtattttctgcctatgtttagaagtttctttttttttttttttgagatggagtctcgttctgtctcctaggctagagtgcagtggtgtgatctcggctcactgcaacctccaccttctgggttcaagtgattctcctgcctcagcctcccgagtagctaggattacaggcgcccaccaccatgcctagctaattttttgtatttttcatagagatgggggtttcaccatgtcagccaggctggtctggaactcctgacctcaggtgatccacctgcctcagactcccaaagtgctgggattatgggtgtgagcaacaattacaattgttaattgtaatattaacaatttgcttggcttgtgaattgttaatattatccattacttgtaaatttaaatctatttcctatttctgggaggttctttcaccccctttataattcagtatactctgctttgacgttgtaaaacgttgctttggatattctcagtggtggacagtttttctcctttgaaattaaatttgattttctaagtaacagtggaaagtctgatgcagattgcctaatccttgtgggtaactaagaggagtaataccatcttcgcccaaaagagtcccgtcaataaaattataatactttttttctttttttttttttttttttttgagacggagttttgctcttgttgcccaggctggagtgcaatggcgtaatctcggctcaccgcaacctctgcctcagactcaagcgattcttccgtctcagcctccccagtagctgggattacaggcatgtgccaccacgcctggctaatttagtatttttagtagagacagggtttcaccatgttggtcaggctggtctcgaactcccaatctcaggtgatctgcccaccttggcactcccaaagtgctgggattacaggcgtgagccaccgcacctggcctataatactttcttgagtactattttgccaggatttctcaggggtgaggattctacagtgttttgagaaatgacagtaagagtaaacaattggagtgtcttcccaagttaatctaatgaggatgttattcattcgtatacatgcctttgaagatattttatagttgtttccacgtgctctttcttgtccatgaaagtctctctgtcttgctgggcgcagtggctcatgcctgtaatcccagcactttgggaggctgaggcgggtggatcacctgaggtcaggagtttgagaccagcctgaccaacatggcgaaaccccatctctactaaaaatacaaaaattagccaggcatggtggcacacgcctgtaattccagctacttaggaggctgaggcagaagaatcgcttcaacccaggaggtagaggttgcagtgagctgaacttgtgccactgcactccagccttggtgacaaagcgagactctgtctcaaaaaaaaaaaaaaataaagaatctgtatttttctttgagttatactctttcagtcttgtagcccagtggttcttataggttttagtcttaggactatgtaacacatttaaaagtgggagattccactgggcatggtggctcatgcttgtaatcccagcactttgggaggctaaggtgggagaactgcttgagtccaggagttcgagaccagcctggacaacatagggagaccctgtctctgcaaaaagtaaaaaaattagctgggtttggtggcacacacctgtggtcccagctactcaggaggctgatatgcaaggattgcatgggcccaagaggtcaaggctgcagagagccatgatgtcatcactgcacactccagcctgggtgacaaagcaagaccctgtctcaaaaaaaaaattattgaagaatctaaagagcttttctttatgttatatgtgtccatgaaacaaatttaaaattttaaaatatttacattcatgtacagtgacacacacattgaatatttttataaaacatatttttatgaaaaaagctgtatttttctaagaaaaaactgagaaaaatgatgttgttttacatatttgcaaatctttttaatatctggcttaatggaactgggttcttatgcagtctgttatcatatgttggttgggttaaagtatatgaagaacatccatcctctcagagaaagtcacgttgggaaagggaggagtattttaagaccttttcacagaattatagatattcttcttggttactgttaccaaagcttgacaagtagtagttttcctaaaggctaactacaatgtgggatataaaatcttaagaccttggccaggtgcagtagctcacacctgtaattccagcactttgggaggccaaggcaggtggatcacttgagcccaggagttcgagaccagcctgggcaacatagtgagaccctgtctcctaaaaataacaaaaaaaattagctggacatagtggcacgagcctgtagtccagctacttgggaggccgaggtgggaggatcacttgagcctgggaggttgagtctcatcgtgccattgtactccaacctgggtgacgggagtaagaccctgtctaaaaaaaaaaaaaaaaaaaaaaaggtttgtcttacagttggagtgaaatcttttacccaggaatgatttcacaccatgcatcttttggatggttcactgagttatgtgttaggcacagttttccagaggagaaacacaaccaacaaccaataggatacatgtagatatataagaggaaatttattatggaaattggctcacattgttaccagggcagcaagtctggttggggtccacagtccttagttcttgtcttcttggaagaaagaattcagccaagacagaagtagattcaaggcaggactgaagggtttttgaagtaacgttcacttggaagggaccaaatgggcaacttgaaatattgaatgcccctatttcctgatccttcctggtctcctctcatccttctccttggatgggctgctggctaattgcctcatgtgcagtgacttgccagcatctgaaaggggccacgactgccatttggtgtttggagttctgtgcatgctcgtgtagggcaattttcccgtactggtctagtgctcccagagaaaggtcatatactggtcacactccaccattttgctccctactgcacattcctggacatgtttgctcaattcctaggatcttatcaggaagttgttgcccgtaagcccaagatgtttcctgttaggaaattttcccctccctggtgccagctgcaaccagttatcattcctgaagaggccacctggacattccttggggcctgtcttgccccactcacacctgtctgtctacctactctaatagcgtgatgatggaggccaggaaatcccagacacaccatctgcaagctggagaaccagaaagcctgtggtgtaattcagtctgagtctgaagggctgagagccaggagagcccgtggtggaactcccagtccagggctttaaaggctcgagaatggtgtagggttgggggacaggcggcactggggtaagtcccagaatcaggggctccaatatctgagggcaggagaagatgggtgtcccagttcaagaaaagagggattggaggatgcccgtctgcattagtgaggatggatcctttttaatcagtctactgatgatgctcgtgtcctccagaaacaccctcatgacacacccagaaataatgctttaccagctatttgggcatctcttaacttaatctagttgacacatacaattaactatcacagccaccttcaggcttaataagtctctagaagaactcagaactcagtgaaagctgttatgctcatggttatggtttgcaacagcaaaaggatatagattaaaatcagccaagggaagagacacaataggacaaagttcaggaagttccaagtacagagcttccagctgtcctcttccagtggagtcatcaacagtgctaaattctcccagcaacaatgtgtgacaatagaatattggcaagcagggaatctcagctagactctggtgtccgaaggttttattggggctctgccatgtggacatagtcaaccgcctgcatagctgaccttagcttccagcacttccaggttggcctaacactgcatgacccaaagcccccaccataaatcacattgctgtgtggctcaaagttctcttgtaaacagagactatttttggggggggggggcagggggacagggtcttgctctgtggcccaggctggagtgcagtggcataatcttgactcactgcagcctcgacctcctggactcaagcgattcttttctgtcagccttctgagtagctgggactacaggtgtatgccaccatgcccagccaatttttgtattttttgtagagacagggtttcgccatgtttcccaggctggtcttaaactcccgggctcaagcgagcctcctgccttgtcctcccgagggactaggattacaggcgcgagccactgtgcccggcccaaagacacttttatcaggcaagacattccaagggtttagaattacctctcaggagccaaggacaaaaaccagacctccctttgggcaaggttaaattattcactacacagtatgtttctcatgtcatcacaaagaatattttttaaagtgtactcaagggtcatgatttagtaaaagcagtctttttttttttttttttttttttttttacttcaaagacattcttacgtaaagctggttttgttctgcctgagtgcaggtagtgcttggcgatgtgtgctaatacatttccacaccactgccttgattacgctagctgtcagcaggtacccactattgcttttaggaccttagtatcaaactaggcaaataacatcttaatttttactttttctgtttacgaaaatagttttggccatgggtatgccctcagaacctctgctctaattaagcaccctgtaactttaccttgtattatgacataatctcatctagaggactgagactgcacattctttgagggtaggttgtcatcttcatctttgtagtca

SEQ ID NO: 3093 - DNA, 6000 bp, Homo sapiens
cagtgtcataatctctgctcactgcaacctccatctcccagggtcaagcgattctcctgtctcagcctgtggagtagctgggattacaggcacctgccaccatgcctggctaatgtttgtatttttagtagagacggggtttcaccatgttggccaggctggtcttgaactcctgacaacaggtgatccacccatctcagtctctcaaagtgctggtcttacaggcgggagccactgtgcccagccacgtttttgttttcgtttttttaatctagatttttaaaataatactggttggttatattctagaatataatgtacctcagtttgggtttgtgtaatgtttgtgcatgattagatttgggttatgcattttcggtgggaataccacagaaaggatgctgtgttcttcccagtgcactgtattaggaggcacgtgatacctatttttctcattacaggtgatgttaagttggatcacttggttaaggtgatgtttaataggtttctccatggtgcagggcatggtgcctcacacctgtaaccccagcactttgggaggctgaggtgggtggatcacctgaagtcaggagttcaagaccagtctggccaacatggtgaaatcccgtctctactaaaaatacaaaaaaattagctgggcggccgagcacggtggctcacgcctgtaattccagcactttgggaggccaaggcgggcagatcatgaggtcaggaattcaagaccagcctggacaatatggtgaaacttggttgctactaaaaatacaaaaattagccaggcgtggtgttgcacgactgttgtcccagctactcgggaggctgaggtaaaagaacctcttgaacccgggaggtggaggttgcatcgcgccactgcactccagcctgggcgacagagcgaaactctgtctcaatttaaaaaaaaaaaagtttctccatggcagggtcactcttttctttgtaattaacaagtatcttgtagggagatactttaggctatagtctgtctttaattatacttttatccagtaattttagtatcaattgattactcttaatctcctcttccaaactattactgtggcaatttgtttttctttttttctttttttttttttttttagacagtctcactctgtcaccaggctggagtgtagtggcgccataggcatgagccactgtgcccggcctactgtggcaatttttaaacattttaattttaggttcaggggtacgtgtgcaggtttgttatacaggtaaactcatgtcatgggggtttgttgtaggaattacttcgtcacccaggtactaagcctagtacccagtagttattttttctgctcctctccctcctcccaccctccagtctgaagtaggcctcagtgtgtgttgttcctttcttttcgtgcatgagttctcatcatttagctcccaattataagtgacaacatgtggtatttggttttctgttcttgcgtttttttgctaaggatagtggtctccagctccgtccatgttcctgcaaaggacatgatcttgcttttgttttgtttttttcttttttgagacagagtctcactctgttgtgcaggctggagtgcaatggcatgatctcagctcactgcaacctccacctccctgttcaagcaattctcctgtctcagcctcccgagtagctggtattacagtcatgcaccaccacacccggttaatttctatatttttagtagaggcaggattttgtcatgtttgccaggctagtctcaaactcctgacctcaggtgatctaccagcctcagcctcccaaagtgctgggattacaggcgtaagccactgatgatttcttttttaggaggtaaaacatcatgtgtttctaaaagttagagctggccagtcatggtggctcatacctgtaatcttggcactttggggatggcgaggttggtggatcacctgaggtcatgagttccagaccaacctgaccaacatggtgaaaccccatctctaccaaaaatacaattagccaggcgtggtggcaggtgcctgtaatcccagctactgaggaggctgaggcatgagaatcacttgaacccagagacagaggttgcagtgagccaggattctgccattgcactccagcctgggtgacagaacaagactctgtctcagaaaaaaaagaaaaaaaaaattggagctatcaaaaaaagttacacatagggaagtgtccctcaccccatctcttttaccctattttcatcctccattttttccaacctatttttatctaccctccgtagataaagaatcctctttgcttctcatgtattcttcctgtgtttctttttacccaaatgagcagagacatgtgtatctttttctttcccctcccttgttacaagaaagctagcaaactgtagacaccccttcctctttgcctttttcacttaacactatatcctggaaatcattccttacagatgcatagagatcttggccattctttgttgcagctgcatagtgctccattttgtggcagtgccgtattgttttcaaccactctcctatgtataaacatttaggccatttccaagattttgcaattacaaaccatgctgcaatatgctttttttgcatacacgtttttgcaatgttggaagtatgacttcaagctaaattcttagaagtaggattgctgagtgaaaaagttaataaatgcgtcattttgttagatagtgccaaaatcggccaggtgcagtggctcatgcctgtaatcccagcactttaggaggcaggaggatcacttgagcccaggagttgtaaaccagcctaggcaacatggcgaaaccccatctctattaattaaaaaaaaaaaaaaaaagatattgccaaattcctttccaaaaagaccgtatgttttcatgcctaccagcagtttgtgagagcgcttcaagtatccttttaaacgagaagtgatgtttccggagcattaaaactgaagtgatttcaaaaccatgttgcactcacacgaacaggtgtgcacttaatggactaaactagttcagctgacatgtcttcttcattaggaacagtgtggagactgaaaaactaatttagcctagagcagctatttaattgtaaagtctcctttctcaaatattgatttactatgtgaggaaatatttactttgtatagaagtgtgtggaattggacgagggggttgacctacacatgtggtttggtatacacatatcctcattacagagggtgtaatgaagatataggtggttcagcaccataggaaagggaaaaaagaaaaaaaaaagacggtagaggtggcctcccaagcatccactcccactcctcttgttaatgattcacaatttgttgttattgttgtcatttactgttctccacacctttccacaaggcctgtgtgctttgaaaaaatatgtctctactccggatagaagtggggcacacagggccaggcgcggtggctcacgcctgtaatcccagcactttgggaggccgaggcaggcagatcacaaggtcaggagttcgagatcagcctggccaatatggtgaaaccccatctctactaaaaatacaaaaattagcctggcgtggtggcacgtgcctgtagtcccagatacttgggaggctgaggcagaagaatcacttgaacccgggaggcagaggttgcagtgagccgagatggtaccactgcactccagcctgggcgagagtgcaatgagactccgtctccaaaaaaaaaaaaaaaaagaaaaaaagaaaagtaagtggggcacacgattcaggcctaagctaaccagaccaacctcattcctgatggttgttaatgtttcagatacgggcccgcagccctacgtagagaagaggccaaggtagaaaacatgaatctgaggtaaaaagaaatgaggtacttgtttgcctcatcaagcctctcaattaaactaaccttgaagcctgtcttacctttggacttctagtgatgtcacccggtaaagcccatttgtttcaggacgtaagagttgggttttctgtgacttggaaccaaaaccattccaatttacaaaatgagcaactttaatattacccatgagaaatacttcattggtatatgctctttcctagcgtttttgaaaactaaactaggtgggtgaaaagtatatctttgcatgaaactttttcattccagaaaacattttgtcatcttgataataatggccaatgctactatatccaaatttttgtctttttttttttttgagacagagtctcgctctgccgctcaggtgtgatggcgcgatctcggctcactgcaacctctgcctccctggttcaagcgattctcctgcctcagcctccctgagtagctgggattacaggcatgcgccaccacacctggctaatttttgtatttttactgtagacggggtttcaccattttggccaggctggtctcgaactcccgacttccagtgatcctcctgcctacctcaaaaagcaacttgataaatccacaggctcggtatattttaaaaattcttttaaatacagtatacttttctctttttttccagaattaaccatgaatcgcacacacagccagaggcttttaacccgagaacggacaaaggggcctgcttgtgcaatacaattatttttaatggttaaacaaattaatacataagaccagctttacctaatataataataacgaaccaaagtttacaacagacaagaaaagcaccagctgtccccgccaccccggagcgatctccaaggggacgcgggagagcgccgcgggggacgcggaagtctgacgtcacaggaactgggggcggggcggggaggcccgcacaccctattgcgcatgctcccgcctccccggccgcggcctggcgcagtgcgcacgcgcgcgggtgggcgggtttgactggccgtagagtctgcgcagttggtgaatggcgttggtggcgggaaagttgagtctctcctgcgccgagccttcggggcgatgtgtagtgccttccatagggctgagtctgggaccgaggtgagagccgccgggttgggagtgagggagatgggaacaaggccgccggtgggcgaggggagccgagggaacccgggggattgggaggcttggggcggcgcggcctggccgggctgggaccggcctctcggcctagacgcccgcgatgctggcaccctctgccacctctcacctgggccccaggggtccgcccctgggcagcctggagtcctccgaggtgggaggaccgggcggaggtggaggaagtctttctttggaagacttgctgcctgcccagatcgatataacatacgaggtctctcctcccaagagttatggtctaaaaacccctcacaaattaactaccgttggaaatgtcaagctatgcaagaaaagctagaaaaggggaggggtcgcccgttggagcatttggagcttttctggaacaggtggtgtttgcggaggttgcctcacctccctgtagcccacgtgtctctgcttagggcagctggccctcgccaccccctagtattcgtttccagcccaggtagctccagagccacacaagccggtggatgcccctcaagaattgaaccaagtgtccagcacttactgtgtgtcaactacgtgttaagggataggagtaagcaacaaaagacataacttctgccattaaagaactagtaagggaggctgctgtaagaattacagtattgcacaaaagtttgttgtccattagaggggcgggcatcatggaagatgcaggaggagatgactgaagtttcaaggaccatttgaaatggtttggcaaggagaggatgacattcagagcggagacagtcgggagtacatggattctgaattaagcaagagcatggctaatttagataactgcaagtatttctgtaaaattggaacaaag

SEQ ID NO: 3094 - DNA, 6000 bp, Homo sapiens
aagggtatcacacctccccccaccgccccccccccacataagatgtgcctacttccccttcaccttctgccatgactgtaagtttcctgtggcctccccagaagcagaagccactatgcttcctgtacagcctgcagaaccgtgagccaattaaaactcttttatttataacttacccagatcgcttctcggccttttggctaagatcaagtgtataacttacccagtctcaggtatttctttatgacagtgcaagaacagactaatacatgtctggatgctaaaaaaaaaaaaaaaaaaaaatcccaaaatcaatttttagattaaatataaaacttagctctgaatttcctgtgagttgtaagtattatataagtaaatataaaagaaatgtttgctaaaattagaactatcatacagtccaacaatcccaccactgggtattaatccaaaggaaaagaaatcagtagatggcagggatacccatactgacatgtttatcatagcactagtcccaacagcaaagatgtggaagccacctacgtgtccatccacagatgaatggataaagaaaatgcggtacttatacgcaatggaatcctgcttggccataaggaagaatgacatcatgtcatttgcagcaacgtggatggaactgaaggccgttatcttaaataagccaagcacagaaagacaaatatcacatgttctcactcatgggagctaaaaggaacttgaccttatggacatgtaacatagaatgatggataccagagactgggaaggttgtgagaggtgatggaggaggaagaaaggatagtcatgggtataaatggacagatagaagaagttaagttctaatgtttgatagcagactagggtgactgtactcagaaacaatattatatgtatatttcaaagtaactagaagagaggacttaaaatgttaccaacacattaaaatgatgaacactcaaggtgattgatatggttaggatccatgtccccacccaaatctcatgttgaaatataatctccaatgttggaggtaaggcctggtggaaggtgtattggtccattttcatgctgctgataaaaacatacccgagactgggaagaaaaagaggtttagtggacttacagttccacatggctggggatgcctcacaatcatggcggaaggcaaggaggagcaagtcatgtcttacatgcatggtggcaggcaaaaagaacttgagcaggaaaactcccatttttaaaaccatcagatctcatgagacatattcactatcacgagaacaacatgggaaagacctgcccccatgattcaattacctcccactgggttcctctcacgacacatgggaattgtgggagttacaattcaagattagatttgggtgggaacacaatcaaaccatatcaggaagtgactgaatcatgggggtggatttctcatggatggcttagcaccattctcttggtgctgttcttgtgacactgagtaaattgtcatgagatctggttgtttacgtgtgtagcacctccctcttctctctctccttctctatttgtagtgctgctccccgttcgccttccaccacgaccataactttcctgaggtctccccaaagcccagcagatgccagcatcgtgcatctggtatagcctgcaaaactgtgagtcaattatacctttcttctttataaattattcagtctcaagtatttccttatagcagtgtgagaatggactaatacagtgatgggtaccccaaatatttaacttgatcattacacattctatgcatgtaacgaacacacaaactccacaaatatgtaaaggagaaaacagaaataggtttgctaacagtgtgaacagattgcagtttactgaatttaatagaacaattttttaatacagaggaattgttaacatacaataaaccaaaatcaaatataaacccttgtgaatccattcattcattaaaacagaaccttggagtttgcacgatgaatacacaacacattgctaatctcactagtgttttgtgtaaacacgaaggtgacaacggtttgaatgaatactatcactcagacttggcacagattccttctggccttgcccccattcgcctgagtaatgagtctcagctgtatttacatatacttctacctataatcaccctccttacaaaagataggttagctcagacatgcccacacttggaaaaagttgaaaacattatcgaggcctgtaactaattcaagaaaacaaggctatcacaaagctatatatgtgtgtgaatcaaaagtggaggtgggagagtaagtgctttcagtttcagaggcagcaccagtcactcaggcccactataaaaggggaaaccttcacataggatggaagaatttgaagaaaatgggagagctttaatagcagaaaagaatgaagaaagcaccccaggtaaggacacagacaaaaagattaaaagccatatttaggcaagatacaatgatttggctagatcagaatgttcacataagtaacaggacttataaaaaaaaaaaaaaaaaaaactttgtggtgccttttaaaaaaaggcatgaggcaaggcgcagtggctcacgcctgtaatccatggggtggaccatgaggttaacagatcaagaccatcctggccaacatagtgaaaccccgtctctactaaaaatgcaaaaattagctgggcatggtggcacacacctgtagtcccagctactcgggaggctgaggtaggagaatcgcttgaacctcggaggcagaggttgcagtgagctgagatcgcaccactgcactccagcctggcaacagagcaagactccgtcaaaaaaaaaaaaaaaaaaagacacgggacatgaacgcagtgaaaaatcactaaaatatgagtaaaatggcaagtctactcaatgaagaagaaagaaaaaaatcacttcaccagaaaacttagacttagtaattcgatttaaattgtggtgacaatgacaggagtcaccagtatatacatatgtccaaactcaaactcaccacgtcatctacattaattatatgcatgttttttgtgtacccactactcaataaagctgggggtggtggggagagaagcacctataggaattcagatttatcaagatgaattagcaagacactagcgactttataaaaggttttttaattgacaaattgaatacaattatgatgtacaacatcacgttttgatacattatggaatggttaaataaagctatctaatgtatgcattactatatatatatatatatatatatatatatatatatatatatatatatatatatatacacacatttttttctttttttttttttgagacggagtctcgctctgtcggccaggctggagtgcaatggcacaagctcggttcactgcaacttctgcctcacaagttcaagcaattctcccacctcagcctcccaagtagctgggataacaggcatgtgccaccacacctggctaacttttgtatttttagcagagacggggtttggccatgttggccaggctggtctcgaactcttgacctcaagtgagccacccacctcagccttccacagctgctgggattataggcgtgagccaccacacccagcctcacatacttacatttttttgtgtggtgagaacgtttcaaaacctactctctcagcaattttcaagtacacaattcattactattaatgaatagctgtcaccatgctgaacaatcgatttcctgagcctattcctcctaactgaaattctgtattcttacaaaaggtttaaaaataaaagttctttaaatatcaacgaaaaataaaaataaatttaaaaattaaaatgaggtagatgtctaactgacataaaatacattagtagtatatgaaaaagcaatttacaaaccatcatataccatataagccatgtatgcattgaatattactagaaaaaaagtcaagcccatacatggaagtatttacgtggctggccatctgtatagtggtatgtcagaactttttactttttttaattattattatttgagacagggtctcactctgtcacccaggctggagtgcagtggtgtgatcccactcggctcactgcaacctccacctcccaggttcaagggattctcctacctcagcctccctcagcctgggattacaggtgtgcaccatcacacctagctaatttttgttttctgtttgtttgtttgtttgtttgtttggtagagaaggtgtttcaccacgttgaccaggctggtctggaactcctgacctcaagtgatccgccagcctcggcctcccaaagtgctgggattacaggtgtgagccgccgtgcccggcctttactttctttaaataacttttgtgaatgttcagaaattccacacagtgagcagctatttgttcccaaatcagctatacgtatatacatacatatatgtacacacacacacatatgtatatacatatacgtatatatgtatatatataaagttcccaaatcagttcgcttgctgtctctatatatatacacatattaaaaaaagataattttgtttttaattaaaattaaattgcaaaattaaattgcaaaatttagctctgagtttcctgccgagctaaatgtctccctttacagttttactgcaaggacaggaaattgggcggacagttggcaccttgctcaccaggctgcgggtcgggtgccacctgccagctcttcccagccgcacgtccctccctgccggggcgcccccaagctgctcggcttctcttccccgcgagggtctcccggcgggtccgggggctgttcccacccacgtccgcgtggcgccgccgcccagtggggccgctggacgctctggccgggtagcgcagagcctagacccggcccctagtccaccatggggatggactcgtgcggagtgcgggaaaatcgcccactgtggggctgcccgggagggggacgttggggcaagagggggctcaggaacgtctgaagaatgcggagcccggtcctcgattggccacagcctgcgggaaccatgcggcccccagcgccggggatggagctgcctctgcggaccccgagcccccactccctgctggggcctccgccatctccagctgcgcccacagctccgcgggcctccgggtctttgcgtcggaatctccagccctgggcggctccttccaaaagccccgcggatcgcgctctgggatctgttttgattccacacctggggaatcaccgcaggggctcaggccgcgcccctactcgcctggcccggccttggcgaagggggcagagatcagcgacatccttcaggccggcaggcattcacgaagcgtcccctctgcgcgctctccagagaccccgccccgaggcgagcggcccctggcctgggtccctcccccgcgcgcgcccggcccctcggccctgcgatccccgccgtcccccagcagaggccgcgcccaagagaacggcggcctccaccgttccctcttcccggaacagaagccgcctctcccctctccctgagacgccgtgtggcgccccccacccacctcactgtaggggaggctcccgccaccggcctcccaggcccagggcaagccccatgaaccacgcgggacaggaaaccgggttgtgagcgtccttagcccaaaatgccttctgttctagaatcaaggggagggcgtcccagcttatcagagttggcccctaaaaccagcacgtcatatgaaaatcaccaattgccaaatgactaaaatccctgaaaggatttccctcttccacatccacaaaccatccccagaaaatgcaccacagccccttgccctgagaactcgaggaaggcgggcgctggcagccaagtcaggtgaatgcggctccggagtccctttggctgggggaaaacgggatctcacctcaaggggg

SEQ ID NO: 3095 - DNA, 6000 bp, Homo sapiens
cctcacacactctcattggtacagatgacacctcagggccccaagatttgaaaatgctctttctggagactcaagattgatgtcttggccaagtgcggtggctcacacctgtaatcccagcacctcgggaggctgaggtgggtggatcacctgaggtcaggagtttgaggccatccatggccaacatggcggaaccccatctctactaaaaatacacaaaattagctgggcgtggtgacaggcgcctgtaatcccagctactcgggaggccgaggcaggagaattgtttgaacccaggaggcggaggttgcagtgagccaagatcatgccattgcactccaacctgggcaacagtgcgagactctgtctcaaaaaaaaaaaaaaaattggtgtctcgagtctcaaatagaaagcagtgtcttcattgtgacccagttaatgaggtttaaaaaaatgattccagaatcatacatccaaagagcattgttcctcaaagtagccttggaaactgaatttctcccagaagacaagctgctaatgactgggaagttagcacccctaagtttccaacagctggccggagagactgaatggaacaaagaaaactgaaccctgctaaggaaaggaagcccagattgaggtaccatgcctgactcatttacaaatcatgtcgggtctccagaccatctggttgaaatccttttgtctcttagtcaagggaacttgcccaaagccacagagctggtgtgaggaagagcaacattcactgaccgcccaccctcactaggagggccatgggaccgacccagggtactgcccttgcagttaatgcgcctaccatgcgggggcgcacgtgttctccctttcagcttccattacagcctgagttttccagcggtcaatccctcagcagccccgaaattctgccaacaaaaatcacttgctgctaatcgaacatgactgcatgtcaaacgctgctagcagctttctatagccgcaggaaacacttccatatccccccactcacgttttgcacataaaaaagatatggcctacggatttttagtcacttgttgaaggtcacagagctagtaagtggaaatcagggttcaaacaacatctatttcactccagaatctgggcttttacaccccactcttgtgtctcctaaacagtggaaatctacaaaatgggaagccctgcgcagtctgggtttagacggcagtccaagaggaagagtctttcagtgtctttctaggagttgaggagaatccttggttccaaattctcccaacttataagtaatgaaagaaagacctagagacattggggaatagggcttactgttcatggccacatacccccaaaaagggacaactggaagagcctgcggaacctcactcagcccctgctcctgaggtgcccgtagagccacatggaccctcaccgtgtgcttcagaatccccaaactctcagcagcaactcaatccgttacaggatcctagtatttttctctttcactcccttcctcgcattctttggggtggctgtattttaatctattttcatgtgcattacaactctagctctgttggaaaaaaaacaggggcacaaaggaagggggagcaattgattctgcgcctcctagaaagctgggcgcccatccttttggagctgaggcccactccagtgggcttgggggttgccccaatccaggaggcagacaaatattactactactactactaataataataatacaaataatattttctaaaacgtttagtgatgctatacaccagatccagtgctggagacccagtgcagtcaccagacccaatgcagtgatggaactgaatcctttcaagaaatcccacagaggccgggtgcagtggctcaggcctgtaatcccagcactttgggagcccgaggagggggcagatcacctgaggtcaggagttcgagaccagcctggccaacatggtgaaaccctgtctctactaaaaatacaagaattagcagggtgtggtgggaggcgcctgtaatcccagctactcgggaggcagaggcaggagaatcacttgaacctaggagatggaggttgcagtgagccgagatcgcaccactgtgctccggcctgggtgacagagcgagactgtcaaaaaaaaagaaaagaaagaagagagagaaggaagaaaagaaggaaggaagggtgggagggagggagggagggaggaaggaaggaaggaaggaaggaaagaaagaaagaaagaaagaaagaaagaaagaaagaaagaaaaagagaaagagaaagaaagaaagaaaataaatcagtaaggtcataatttacagatgaagaaactgagatgcagaaagagtgagttacttgcccaggctctcccagctgagtggtgggatgtggacccaggcagcctggtatgggagcaggtttctagccactcctctgtggagtcactattctaggctggccttttccaggcagattattcagcctttttgtcttagaatgatgattgcatatgcttgcatagcacttgcatatacttacagtttatgtgtgtttcttagctagtatctcatttaatcattcacataacatggatgaattgaatcattcactcaatttgttgagtgtctaccaactgccaatagctgatgctctaaattcttgctgctcaaaatgtagcccctagggccgggcgcggtggctcaaacctgtaatcccagcactttgggaggccaaggagggaggatcacctaggttaggagttcgagaccagcctggccaacatggagaaaccctgtctctactaaaaatacaaaaattagctgggcatgcttgtgcgtgcctgtaatcccaggtacttgggaggctgaggcgggagaatcccttgaacccaggaggcagaggttgcagttagctgggatcgtgcctgggttgcactccagcctgggcaacaagagtgaaactatgtcacggaaaacaaaacaaaacaaaaatgtggcccctagaccacagcatcagcgtcacccagcagcttgctggaaaggcaacatcttgggccctggtatagaccttagaatctgcatttaaacaaggttcccaggggattcataggtacattgaagtttgagaagcgtggctttgtgatatttctataataccatttaatagatatcccatttaatgaatgaagtcagagatactgtgacttgcttgtatccccacaactaataatgaagcaatatatgcaaagagctcacaacagtgttttgcacatagtacgcgctcaataaacaataacaatcaatgacagagccaagctgtgaaccatgagattttcaattgcatagccccttagcctcagaagaacccctttaggcaccaggcattcattccaccaggtaaggcgaggactgtggctacggcttccctcccggctcagccactctacagaaagagaaactagggggcccagaagctaccattgtggtgagcctgatcctatagcaggggcatcctgggggtgggggggtcgttattctccagaaaaggccggacatagaaagagggggaccagaggctcttcaagggatgcctcctgcaaaccccatgccctccaacctcatcccctctgcctccagatgcctttctagatgaggaccctataccctaggcctccccaggcctccctctcctcacctcctgccctagcctgttcagtaggtgaccactgtgggaaggccacttgtaacctccctctcaatcagtaggacacaaccatgtctctgacggtgggctgggcttgtttccctgtgctgaccaagtccttccccagggacccctcagctagggtccatggtgacttcaccccagcctatttcctgaacacctgctggggagttccccagactttcctcccaacttcctggaaagtgctggctccccatcctccttcgagaactaaagacaagaaaacatatgtatctttaaacagcctattgttttatctcttttattctatgaaataaaaaatttaatacacaaatactttaagcaaaatttgcttatagtaaaaattcaagtaataaaattcaaataatagaaagcaaaaaaatcccacccgttcaacatttcacgagtcttgaacacctgtttcctttgcacccgacttcattaggctcggaggccaagcagaacccacagaaaggcttgccattgtgggaacacccaggctgtcccattcacacacccattgacttttccctataactgtctccttgagacaagaaatgttccaaaagggccgggtgcggtggctcacgcctgtaatcccaccactttgggaggccgaggagggcggctcacctgagatcaggagttcaagaccagcctggccaacatggtgaaacccggtctctactaaaaatacaaaaattagccgggcgccagtaatcccagctactcgggaggctgaggcaggagaatggcttaagcccaggaggcggaggttgcagtgagccgagatcgcgccactgcactccagcctgggtgacacagcgagactatctccccccgcaaaaaaaaaaagtttccaagagcgtctctccaatgttagtcccagcctgcacccttcttccatccctgctttcactcgcgaccctctaatgcagccctgcctccagcgacccccgggatggaacccctcgcccacccacaaaagagcagcctcgacctagacccactttccagggaatgagccctgcgcctgcgcgcaccccgccaccccctccaggccggagtccacgcccacttgggggaggagccccgcagcctccacctacaggggcgtcccctaaggggacggaggccgcatgggccgccgagccgggaaatctccgcccccagctggagcggctgtgcgggctgcgtagcggtgctgggtcgggccgacgtgccacccacccggagccggtgagtgcagccgcccgccctccggtagatctgcggcctggcggagaagtcgggaggggacaggaagggagggcgggccccgggccctcctccgtctcagccgcctgcggaggtgctgcccacgcctggaggcccccactgaccctcagacccgcgtctgcgcccctctccccgcaccccgaggcagagttgggaaagcagtggtcttagaccccccacctcgggcactcggaagagaacggcggagacaacccctcctcttccctggctggcgcagcgccagcctcgagctcctcggtagcccccgggcagggagggccggagggtgggcgcggcatcttcagcgactcttcgaagtcccttccgcgtctcatctttcaaggctgttgcagaggcggcttgcttcccacctgtccatctccataaaaatccctaaacgaaacatgcccacgtgtccggagattttcaggacttggtgcatttcagatgaaggcttttccagaagcttccccgtagaagaggatcaggcatccaactggttaaggtcagcagcgtttggcacgtctccttccagcctggcggttttgtcaggattccctggggagtgtctggaaagcctgatgaggggaaatagtacatctcagcgaatcggcaccagcgagtgtaagatgcgcgttattgaatgtgctgctgccgaatatgagaatgccgagattgtgagccgtcaccatttcttagattttaaaagtattctaaaatgttttttagaatcactgaaatataatagctaccccctgcccgatatctacttagttcttttcgattttcatcataacttatagagaggctggtgcaggaacaggtggttaggcagctgccccgggtgaggctgggagtctcctctgcccgaacagcccgggtgtacaccactcagactgcctcatgtaggcggctgtcagtggactgggatgatttgggggcagggagagtagaggtggccctgg

SEQ ID NO: 3096 - DNA, 6000 bp, Homo sapiens
ctagacctgccctagctagttaccacaactttggtggcttaaatgacagaaacttattctctcccagttccggaggccagaagtctgaaataaaggtgtgaacaggatcacacctcttctgaaggctctagggaggttctatccctggtggcgtccagcttctgttggctttaggcaatccttggcttgtgactgcatctctgcccctgggtcatattgctgccgctttctctgtcacatctctgctgtgtatctcttacaagaatacttgccattggatttagagccaatttgaaaaatccagggtaagcactttgtctcaagatgtttcatgtaatcacagtttgccatatgaggtaatgttcacaggctctggagattatgatgtggacatcttcttgggggccaccattcagcccactacagtccaccctctggcaccccaaaatccatatttgtcctacatgaaaaagacatttattcctcccaacatctcccaaagtctcaactcatacagcatgaactaagaccaaatttgcatctatatattagctcagaagtcctgcatctcatcatctaagtcagatgtgggtgagaccccgtgcatgattcattttaggattaaatttctctggctgtggacctgtgatactacaggttatcagcttccaaataactttggaatttggataaataaatttatttaaaatgatgtaataggcatatgatagatgttctcattctgaaagggaaaattggaagggataaagaagtcaccattcccaaccaattttgatctagcagagaaaattccattaggattcaaggcctgcaaataattccctagcttgaagtgccgcccactgggcccacaacagttgtgcagacctttgtgtctgctcacagcagaaccatgggcctctctgtacccatggtggctccataggcctctgagtctgtgctcacagtgacctcataggcctgtgtctctgcatccatcacttctgtctgctcctctggcctctgcctctgtgcccctggctctgcccttggagtcattcttgctttttcttgaaggatcgcatgtttgcagcccagtagctctatcagcccatttcttgcccgtagcagtttggatttcaacagccttttctcatttcacactgtctctgtcacttccaggctaagctgtctctgctgatgtaacattctcaaaaatcttgtgggtcccctgtgtaatgtcatggagttcaatgccattagacaagagggtcctccacaaattttctgggataatcccatctctattcctgacttctactgagatggttgaatgagtccaagagtcccatgcttcatctcttcgtgccaccacacccagtacatttttcttatttttgtaaaagagatggggtctcgccatgttgcccagtctggtcttgaactcctgggctcgatcctcctgcctccacctcccagagtgctgggattacaggtggccgtgtttgacacttcagcaaaactgcaatttaagttattaactttattgagtacttacgtggaaacaaaaattaagtcccttctcccgtggagctggcattgcacattggtgggaggaggagtgagcagggagtgcataatgtgcaaccacgtgtgaatatttccagtccttcttagtactgtgaaggaaacacacaagtaaaaacctgggcctggtccaggaacgtgacaagggtgtgactgccaggctgggacctgaatgatgagaagaaggcagccagggaaagaaccatacaatgaggggacaatgctgagcaggcacatgtatgtatgaaatatgggcgtgtgtgtgtcctaaacaatgagaaaagtggcaagaaatgcagtaggagagcaggcaggaggtggatcacataaggccttgtgggccatgaaaaggagcttggatttttttttttttttttttttttttttggagactcactcttgttgcccaggctggagtgcagtggcccgatcttggctcactgcaacctccacctccagggttcaacctccctgcctcaacttcccaagtagctgggattacaggcgcccaccaccacgcctggctaatttttgtatttttagtagaaatggggtttcaccatgttggccaggctgaccttgaactcctgacctcaggtgatccgcctgcctcagcctcccaaagtgctggaattacaggtgtgagccactgcgccccgccaggagcttggattttatcctaagtgcagtgggagggtgtataaatagggacatattttgatactacatcctaaaaagatcaccctctgtttggggaatattctataagaggacaagagcagaagcaggaagcccactgaggaggctttggtaacagttcaggaggtcatgggagtttgatctagggcagtggcagctcgggatgagaggtcatccagttcagcacatattcctgagacagaacagacaaggtctgctggcagacgggatgtggggtgtgaaaagagcaattaaaaatgactcttatgggtttggcctgatagcagggtggattaaaatgctattaactgagatgggggaaagttaaggagaagctggtggggcaagagtcaggagttctttaggacattttatctttgagatgcctattatggactagagctatccagtagacagcctgatgtatgagactggaactcaagggagaggtcaagacttgaactatgagtttaggagactttcaagctagacatgccatttaaacaggtaaaactggacaagttggaaaagctggttagaagactgaagtgtgaagccatttcccataaaggctggagagtggaggaggagctgggaaccagtgctcaggcgcacatgtgcgcacacacacaccctgctgaggactggccagtgaggaaaaaggaagcccagagcatgtggaatcttagaagccaattgaagcaagttatttcaagaagaactttgtgaagcagatcaaatgtcggttgttctaagacgataaggacagataatggattattttccttggtttctctggcactaattttaaaaatatagtatttgtaaaaatgggctaggtgcagtggctcacgcctgtaatctagcactttaataggccaaggcgggtggatcacttgaggtcaggggtttgagaccagcctggccaacatggtgaaaccccatctctactaaaaatacaaaaattagctgggcatggtggcaggatcctgtaatcccagctactcgggaggctgaggcaggagaatcacttgaacccgggaggcagaggttgcagtgagccgagatcgtgccattgcactctggcctgcgggacaagagtgaaactctgtctcaaaacaaaaaaatttgtaaaactgatcccacaattccctacatttgtaacttttaaaattcagaggtaaatacatttttatttaaggaggaataattcttcagagcaaaataatctgaatatcacctggaatagagattggacagaaaaaagtgtgaacagggaaaactaggacaagtcatatatgtaaatgagagtataaagagtaaatgagagtggtcactgctcactgcagcttaactaatcagatagttaagttgcaggcataaagtttttttaacttttattcctcaagtaataaattgaggaaaatacaaatatgtacaaaatttttacaaaagctatccataaaagggcaagtagtaatatatagaaaagatctaccagattagtaacaaactacccccattaggaaaatggtaaatgatatgaataggaaattcaaaaaaagaagaattacagatttccaataagcataacttaagatatacactgatattgtaaggaaacacaatcaccacaaccttgctaatcaaagaaactaatgatatttattggaaaataatgggaatttttaatagactgggttagaagactagaagtgtacgtcccaaaatattaatagttcagctgtagggtgagatcactgattttaattttctccttttatacatttttccagatttctctacagcaactacgtatcattttgtaataaattttaatttttcgatgcacaaagcaattgcctggaattgcagttcgatatgaacccaggagttacgcttgtaaaataaactattgctgatgtgacatttccatttctcaagcagactgtaaatttctcagatgtaggtcatcatgttataattagggttccattgctcatgatctagatgaaacacttctccctttcttgtggtctcttcattaatttggtccctaccgcaaaggcagggggattaaaaataaaatatcttttgacactggttggcaggtgtactaacacgtgtgcgggaggattcctgttctcggcatggttcacgccgggctccggcagcgccctagtacgtaaggggctgcactggagtgtggactgcccggtatccttagagaaagttttgacagtgtgacgccagtgtcgcctctaaccacgtacaaaacgcgccatgcattgggtagctattacagtgcacatttttgtgcaggaagctaccccaccagcgcaagtatttcagaatcaagatcgcactcccgtttccccttctagggaaaggattccagataaacactgagaaaacagatttaatatcttaggtcaaaactccaggtcttcccataggaaggcccctgggctgtcattctgaggtgcctatttcccccgcgccgtgtccacgtccacgagtccacgaaccctccgagttctctctcctcacctgccgagggctcgcccctctagccccgccccgccccgcccaggacgcgtgacgtcacaacaagcgccgtgcgccccgccccccatcgggggcaaccattgttccgccggtcgcgccggagctgggttgctcctgctcccgtctccaagtcctggtacctccttcaagctgggagagggctctagtccctggttctgaacactctggggttctcgggtgcaggccgccatgagcaaacggaaggcgccgcaggagactctcaacgggggaatcaccgacatgctcacaggttagcaccgggccgggccccgctggctttcttctttccttccagcctcttcccctgccttccttctctcccacaccgacagtccagtgggtagggtaggttccttgcagcgggtcgtcttccgtggggatctccctccggcgcccctggctggttgtcagtcctgccggctacacctgggccatcgcttgggctgcttttggtctggcccttggaggaaacgggtggtcactgtctcttagaggctgccatatccccttccagaaaacagttctcgtttgtttactcgtggttcttgttcacccgagccttctgttgcctttcagaactcgcaaactttgagaagaacgtgagccaagctatccacaagtacaatgcttacaggtgggacagtgcagcattctcgggtagcatacgttctgggataccctgtttagtgtggcaattaacaggactgagggcccagtggatatttggtccatctgcaagagcgggaaaaagcaagaatcgaggctggtaccttactatttcttgaagaatgtgggcagtgcgttataggatcagttcagataagttcccaattctgattgcagatagctgtagcctgatacgtattttgtcatcatcaaacatgaattactagaaatgcggtgtaattttaaccgtaatgaaagacagcggatgaagtccatactgtgaaatatatgtggttcaaggaatcacattttttcttttggttggtctaaagttgatcctgtgggatcctgatcctgatccttgttccttgttcatgggatcctgtccttgttcatctcaccaggggccttatcctattcattctttccacatccacctgcttctactccttagcctat

SEQ ID NO: 3097 - DNA, 6000 bp, Homo sapiens
accccttttctaattatttacagttatagtgcataagcactatatgtatctcttctggcattatatagtgttgtgagtgattcagtcctaattaccttttgaattttcctgttgatgctttaccataatattttaaacttatactcccattccaaaatcttgagccagtgagagacctggatggtatggttcttgctctcctggcatttctgtagtaaatggaggtgttctgaagaactggtttgctgagaattggctgtgaataggtgcttcatcatgctgaagcatatgcttagttgctgtttcacactgaatttcctaacagccttattgagatgtaattcatatgtcctgtaattcatccatttaaaatatacaattcagtgacttttagtatattcacagagttgtgcacagtgtaggaaccatcactacagtcagttttaggacatttttgttatctcagaaagaaccctgtacctattactagtcattcccccattgcctccccttacccccacctcagacctaggcagctgctcatctactttctgtctctacggatttgcctattctggacacttaatgtaaatgaagtcatacagtatgtggtcttttgtgactgacttcttccacttagcatattgttgtctgagtttatgttgcaggatagtatttgaaaatataattttgcaggatataagagcggtaaactgtaaccccttgccttgtcagtagacagcagtttactttgaaaataatgccctaacttaaatatatttatttactcttgttacatgaacacatagtttatttacaaataagtttagatggagcctttgaaatattacaaagaatgacacttaaggatttttatccagtttaggaataaacctccccccattcactccacccccaattttgctgttgtcatctcagtgaattcattctagccttgatttgtgagaatgatctgctggtatggcacggacaattgttataaaaggcaatttaatttttaaggagatttaaattttacgaaaatcttttgtctacttattctgtctttatagatattttggggactttgaaaaaagaattcctcgtgaagagatgttacaaatgcaagtaagatgtgtcaaattatattctttgattagaattgagagtgtcacttggtgaaaagccattttgggaatactgacttaatttttcttctattaggatattgtactaaatgaagttaaaaaagtggattctgaatacattgctacagtctgtggcagtttcagaagaggtaacatacttcctaatcttgggttatttttgccctgatgttaaaattgcctaatatatgggaagaatttggattaaaaagatgtaatttgtggtacttcatagactcactaagacctagtagtattagttaagggtatttgtttatagatgggaatatgtaactaggggaaattcatcctgattttattataggatgatattttaatgactagttttaacgacgtttattaaatgactttaagtatattgaaatgctagtaatggttgtctttggccttttggctggatgatagtgaagttgtgggtagttttgttaatttacctttctttttcctttttttttttttttttgagacagagtctcactctctcgccacgctggagtgcagtggcaccatctcggctcactgcaacctccgcctcccgggttcaagtgattctcctgcctcagcctcctgagtagctgggactacaggcgtgtgccaccatgcccagctaatttttgtatttttagtagaaacggggtttcaccatgtttgccaggatggtctcaatctcttggcctcgtgatccacccacctcgacctcccaaagtgctgggattacaggcgtgagccactgtgcccaactgcccaagttttctataagagagctaagaataatgtcttagaagtaccagttcaaaaccaattcttacaacaaccgggttcatcagaagagttctgcttagtgtgtgaatgtgagcaaagtaagaaccatataatcctggtgtcttactggtttaaaatattgaaaagctcatacatgcttaaaaatattaacttttggccaggcgcggtggctcacgcctataatcccagcactttgggaggccgagccgggcggatcacaaggtcaggagatcgagactatcctggctaacacggtgaaaccccatctctactaaaaatacaaaaaattagccaagcgtagtggtgggcacctgtagtcccagctcctcgggcggctgaggcaggagaatggcatgaacctgggaggcggagcttgcagtgagccgagatcaagccgctgcactccagcctgggcgacagagcgagactccatctccaaaaaaaaaagaaattaacttttaaaattggaatagaaaaaccttatttaaaacattttagagtatgttagagtagatagagtagatacctgaactgaatctctggccacctgtggagttttgtctaggaagtaggtgatggcctatcaggaatactctgggtagctgctgtaagaatctagagttggagagagaaaactaaatccatactcactgatcagtagaaagaacattggactggggtcaaaagacctggggtctgaggccaaatctaccactattatgtctctcctgatcttagattccatactcgcaaaatgagagaactgaagttaaccagattttcaagtatgtctgcatcagaaatacctaggacttaaaaaaaaatacatattgttgtacccttctgcaaataagaatctccttaggtgggaactgggattctgtattttcaaaatgtagatttggaagcacagcaagccaaatgcatgctatgttggctatgacagccttcctggatttatttatttctattttaattttacttttttggggtatgttgtatggttatatgctttcacataaaaaggtatactctaagacatctcacttccacagtccctatgcactctttcctactccttctaagtcccattaagaaccacttccctatggattcttgtaacgtttcttcatgaaaatacaactaaatactagtataccatctttatttctttcttctctccctttctttcataaagttacataatatatatacaatactataccttgcttttttcacttacaaataacatcctagagatttttccatatcaatatatagaaaacttccttatttatttattttttgagatagggtccctctctgtcacccaggctggagtgtagtggcgtgatctcggctcactgcaacctccgcctcccgggctgaagtgatcctcccacttcagcctccagagtagctgggaccacaggcacgtgccaccacacccggctaatttttttttttttttttttttttggtagggacatggttttactatgttgcctgggctggtctcaaactcttggctcaagtgatccacccaccttagcctcccacagtgctgatattacaggcatgaaccaccatgcccggccccttattcttttttgtagctgtgtaacattcagttgcatgcatgtatcatacttcatttgtttatccagtccgctattaatggacccttgggttgtttctctttctttgctcatacactttgtttttgttttttttttaataaagtgaaacatttttgttggtaggcggacagtgaaagacatccagcttttaggaggaggaaatgagaacaagagaaggcaatagaattttcttgattaaaatagtttccatggatgtccagtacacattcagtctagtcttctttttttcttttttttttgaggcagagtctcgctttgtcgcccaggctggagtgcagtggtgtgatctcagctcactgcaacttccacttcccaggttcaagcaattctcctgcctcaacctcctgagtagctgaggttacaggcaaacaccaccatgcccggctaatttttgtattttttttttttttagtagaaaaggggtttcaccatgttggccaggctggtcttgacctcctgacctcaagtgatccgcccaccttggcctcccaaagtgctaggattacacgtgtgagccaccttgcccggcctggccttctttatatttaaatatttggttaaggcactgtggctcatgcttgtaatcccagcactttgggaggctgaagtgggaggatcgcaaagacactgcaagctctttagttaccaaaagggtgtttggcctctgttgtacttatcaaaatgaaagggaggagatagattggattcttttatgctgtataccaggcactatagtggatgcttttacatatgttcttatttacttacacaatagcatatgaagtagtttttagtagtttacatataagaaaactgaggtctagaggaatgaagagtcctcacttgcaacactgaaaaaaaagtaaaatgaaaaaattccatctcagtggagacagaatttcatagaatataggaaaagaaaggtttaaatagctgtatataacttgcctgaagctatgtggttgtagagtatagacctattaattgagttcaaccataagaattgaaatgagttttctttttaaaaaaaaaaaaaagagagtgcctggatctctctgtgttgactgggttggtctcaaactcctgggctcagcgatcctctggcctcagcctctcaaagtgctgggattacaggcatgagccaccgtgcccggctgaaatgagttttctgattaacctttatagagttagagtatattgtttaatttgagatttttacatatagagttgttcataggtgtattttaaagctattttaaaatattgtttttattcattattgagtagttacttaggtgcatttttaatacattaaattaactcgttgtatgcaatgtatatctaatgccaattactgttgtcatcacagattctgctgtctacatcaatacacctgaatagttggacagaaaattgaaatcttttaactaattctaactatgaagcacagtgaaatagaaagttaggctgtaagaagtaaggctcttctgtgtgtcatcagcttggttccatttgcccaattgatacatttacatggacaatctcatatgtgtcttctgtcatcacaggtgcagagtccagtggtgacatggatgttctcctgacccatcccagcttcacttcagaatcaaccaaacaggtgcctcagagtttataatcaatggtgatcagtcttacacaacagtgaatttcactttttaagtgatagttgggtattttcagaataagttttgttttcgccttcctgaaaagtctgaagagctttgtactgattgaattctgcgaaaggcaaatttctcgaaaaggatacctattattcttccatgagttgctgggaggacagtctaacatttgaaagagaaaacattgaatacaatagttttagaacgatttactgtctgtgataaatactttagaaatactataatcagattttcattaaattttatcttaaaaaatgaaatattgagaaaccttctattagaaaacctgtgaaggcaaaacattttttattttagaatatatgcctttggaaggtgaaacagctgactctttgattgcttttttttcccatgagccatttcaagaacaggaaaactctttgatttaaggaaacagataaatacaactgatcattgtttttacaatcgtaataccttaaacagtggtttctaaaaatatgtttcatttgataagatgaattttctattagagggaaaaagtacttgctcagaacattagaaaacatagagatggccgggcacggtggctcatgcctgtaatcacaacactttgggaggccaaggcaggtggatcacgaggtcaggagatcaagaccatcctgcccaacatggtgaaaccccgtctcc

SEQ ID NO: 3098 - DNA, 6000 bp, Homo sapiens
gcccagttccaaatttaaattacaggggagatagcatgaaaatgtcaaggcaacaatgttcccagggcgcataatgggtttttctgtgtgtgcatgtgtgtgagtgtgctttgatcgcaggtactgagcttcctgctagtgggagggtccatgaatgtcttggctattgaggccccacaactctgagggttaaaaagtcaagtggattaaaatggatctgattttcatgttacagagagaacatattagtttttttgctgtactaacttcttagtacagactaaaagagcagatcagtttaatgaaaagacaagaaaaataaatcaggaaaggattcagagaagtgggatttcaatttggccttaagggaggacaggatgttgaaaggtggaggagagatgtggtatctcaggtggagaaacaaccagggcagtggcaatagtgcacctgagaggcggcttggctgagtgtgggcatccactggagagagatgggaaatcattcaggaggtatcagtggaggctgggttctggtaggttgtgaaaatcaggccgtggtgtttgggcttggcatccttggccagggtggtaaatggaccattttctgctataactacctatggtagttacaccaacatgggatgacaagactttttttctgctgaacttggatatggtcttagaaatggctcttcagataatcattactggcaatcaatatgaaacttactaccaatctggtggtaggcaaaaggaagcaaatgcaggttttctcaatcagtaaggacataataaatgtggtgtttaagaaatattgatatttaggataggtcagctagaggctgttgctaagtatataatgctgaggtcactagaactcagcagacaaacttggggaaagtttaataatttgatgataatattagagtttttctctgcactggtaagaaatttcagttaggttattgtgtcaggtccctttgtgagaaaaacagtctcattttggcttgtcaagttacagtggcttgagagtagataaggatagtatattatgattcttctttatttcctcttctgttttttttttttgttttgtttttttgttttttttttgaggcagagtctcgctcttgtcatccaggctggagtgcagtggtgtgatctcagctcactgcaacctccgcctcttgggttcaagcaattctctgcctcagcctcccaagtagctgggattacaggtggccgccaccatacctggctaatttttctatttttagtagagggagggtttcaccattttggccaggctggtattgaattcccgaccttgtgatccacctgccttggcctcctgaagtgttgggattacaggcgtgagccaccgcacctggccccctgcatttttttttttaagacagtgtctcattctgttgcccaggctgtattacagtggtgccatcataactcactgaagccttaacctcctggctcaagtgatcctcccatctcatcctcctgagtagttgaggctacaggcacgaaccagaatgccagcttttttttttttctcttaactactttttctcctttttttttttttttaatttaaattctggggaacaggggcagaacatgcaggtttgttacagaggtatacacgtgccatggtggtttgctacacccatcaacctgtcatctacattacgtatttctcctaatgctatccctcccctagcccccaacccctgacaggccccagtgtgtgatgttcccctccctgtgtccatgtgttctcactgttcaactcccacttataagtgagaacatgaggtgtttggttttctgttcttgtgatagtttgctgagaatgacggtttccagcatcatccatgttcctgcaaaggacatgaactcatcctaatttatggctgcatagtattccatggtgtatatttgccacattttctttatgcagtctatcactgatggccatttgggttggttccaagtctttgctattgtgaacagtgccacaataaatatacatgtgcatgtgtctttatagtagaatgatttataatgctttgggtatatacccagtaatgggattgctgggtcaaatggtatttctagttctagatccttgaggaatcgccacactgtcttccacaatggttgaactaatttatactcccaccaacagtgtaaaagcattcctatttctccacatcctctccagcatctgttgtttcctgactttttaatgatcaccattctacctggtgtgagatggtagctcattgtggttttgatttgcatttccctaatgaccagtgatgatgagctttttttcatgtttgttggctgcataaatgtcttcatttgagaagtgtctgttcatatcctttgcccactttttgatggacttatttttttcttgtaaatctgtttaagttctttgtagattctatatattggccctttgtcagatggatagattgcaaaaattttctcccattctataggttgcctgttcactctcatggtagtttcttttgctgtgcagaagctctttagtttaatcagattccatttgtcaattttggcttttgttgccattgcttttggtgttttagtcatgaagtctttgcccatgcctacatcctgaatggtattgcctaggttttcttctagggtttttatggttttaggtcttacgtttaagtctttaatccatcttgagttaatttttgtataaggtgtaaggaagggatccagttccagctttctgcatatggctacccagttttcccaacaccatttattaaataaggaatcctttccccattgcttgtttttgtcaggtttgtcaaagatcagatggttgtagatatgtggagttatttctgaggcctctgttctgttccattgatctatatatctgttttggtaccagtactaggcaattttttttactgtagcctcgcagtatagtttgaagtcaggtaggtagtgtgatgcctccagctttgttccttttgcttacgattgccttggctacgtgggctcaatacccctgatgaacattgatgcgaaaatactcaataaaatactggcaaaccgaatccagcagcacatcaaaaaagcttatccaccaagatcaagtcggcttcatccctgggatgcaaggctgcttcaacatatgcaaatcaataaatgtaatccatcacataaacagaaccaatgacaaaaaccacatgattatctcaatagatgcagaaaaggcttcgacaaaattcaacagcccttcatgctaaaaactctcaataaactaggcattgatggaatgtatctcaaaataataagagctatttacgacaaacccacagccaatatcatactgaatgggcgaaaactggaatgaaggattctttttattttttatttttttttattttgagatggagtctcgctctgtcccctaggctggggtggagtgcagtgtcgccatctcggttcactgcaagctccaactcccgggttcacgccattctcctgcctcagcctcccgagtagctgggactacaggggcctgccaccatgcctggctaattttttgtatttttttttttttagtagagacagggtttcactgtgttagccaagatggtcttgatcttctgacctcgtgatccgcccgcctccgcctcccaaagtgctgggatccatgcccggccaaaagcattccctttgaaagccggcacaagacaaagatgccctctctcaccactcctattcaacatagtattggaagttctggccagggcaatcaggcaagagaaagaaataaagggtattcaattaggaaaagaggaagtcaaattgtctctgtttgcagatgacatgattgtatatttagaaaaccccatagtctcagccccaaatcttcttaagctgacaagcaacttcagcaaagtctcaggatacaaaatcaatgtgcaaaaatcacaagcattcctatacactaataacagacaaacagagagccaaatcatgagtgaactcccattcacaattgctacaaagagaataaaaatacctaggaatacaacctacaagggatgtgaaaaatcttttttttttttttttttcagttttatgtagagactaggtatcactatgttgtccaagctggtctcaaagtcttgggttcaagccatcctcctgcctcagcctcccaaagtgttaggattacagaagtgagcttcggcgcccagcctgtattactttcctttttctttctttcttttttttttttgaaatggagtctccctctgttgcccaggctggagtgcagcgatttctgctcactgcagcctcacctcttgggctcacgtgaccctcccacctcagcatccctagctgttcaaatttattgtccaactcttttgaatcgtttatcaacgcaaatctgtcaatgcccacttatttttatttatttttttgaggcggagtctcgctctgttgtccaggctggagtgcagtggcgcaatcgcggctcattgcccctccgcctccccggttcaaacgattctcgtgcctcagcctcccaaatagctgggattacaggcgcgcgccaccacgtccggctaatttttgtatttttagtagagacggggtttcgccatgttggccaggctggtttcgaactcctgacctcgggtgatccgatcgcctcggcctcccaaagtgctgggattacagacgtgagccaccgcgcccggccctcatgaacttattctttagcgtttcattttgagagcgggattcacaagggaattgcggaaacagcagcgaggccccgcgacccctcggcccacgtgcgcgctgtccctcgggtcgccccgcgcccgccgggggcggagtccgctgtgacgcgtgcagggcggcgcgctcccggaagtgacgcgcgacggttcgtgcgtgcgtgcgggcggctgcgtcgggctgcaggagaagatggcggtctccacaggtcggttcccgggccgggctgcgtgattttccgctccgacccggctctgcccctccgtctgctgctggcgcccgagcgctgaccgtgcgggagaagcccgagtgcgctgtctcgaatgccgcgctctccgcagagcgtagcctgggaccgggtgggaccggcgccgaggccccggcggccgtcgggttggcgggtcgtgctcgcgcgtcggccgcgcgccggcgggctgggggcggggtggctcccgcgcgggcgcccccgtaggttccggcgggcgcgggtccgagttgtaggctgaaggctctacgggagggaggcgaggaggcccaaggtgggcgggtgtcaacctccggcaccgaagatgggtcaggccaaccggcaccgaagatgggtcaggccaagaggtgtcctggatcagagtaggggtcccattcctttggactctccttgacatgggttggggagtagaggacgattgctccttaaaataagagcgagaggatctttcttacctgactgaatacgtgtgatctttttattatttatgaggaaaactgcagtgcaaacaaaataaaagaccagagcaagatgaaagctaattgaagaacaagtggtttcttagataagctgttcaactcctctttcctactgaatacaatgtttggtttcctgtgagcacacaagtattaacgttgaggttttagacattagaccatttcagaaatgttaaaaacgttaagctttagtttacatttaaaaatgttaacccgtgtgatctgcctttttcttttcttttctttttttttttttttttgagtcagaggctcaccctgttgcccagttggaatgcagtggtgtgatctcggctcactgcaacctccacctcccaggttcaagtgattctcctgcctcagcctcccaagtagctgggattacaggcgcgtgccaccaggcccggctaatttt

SEQ ID NO: 3099 - DNA, 6000 bp, Homo sapiens
acatggtcatacctgcagtaggtaatagaaaaagaaggtctagagggtggatagttacacgaaatgatcctgaccaaggagaggttttgcaaagtagggaagagtaatacactaaaatggaaagtaaagtttagggggaagtagtaaccctagtggcccacagctgtactggatatgagtgggagaggcattggagcaaactagcctagaacctgtcatgggaagctgtggtctagggtgacagcaaagtttcatttaaggcaagatgtaaagggaagactctgtcaagaccctaaagatttagaagagtttgtttataccatgacagaggtgagaggagatgccagcaaggtacaagaagcagggagcatggagcaataagcagaccaatttgctaccaaaagcaaaccctatttgcatcatgctcctcttcaatttttttctgggctctgattattagacctgtgttgttaccaagcaacagatagaaattgtgggatctgttttccttcatcactctgccactaccatctttcatcctggcaatcagacaataagttgggctaagttatagtatttcccagcagggaagaactgggcctgataaaggaaggaggtggctttacccagaaggagctgtagaaccctgccaacatgaagcagctggaacaagacagtactgatgggactgccttctgaggatgctgaacaaaaggagagtggaaagtaaatttgtatgagagagtttattgatttgagagcagtctccagggagagaggatcgaacattccagcaaggactctgggaaacattgctatcatgcttctatgacggcttttagaagtttgtggaaaagtggtggcccacgctaagagaagtaaaaatgccacagctgccatggcagatggtagaagtagggatcaaactgctcagggaaatgggtatgctacagtggccatattatgtacggctggaaaccccccagatgtcaaaattccagttcagatgtgccatttattaaagagacatggaattctctggtgagaagggtaccagcatcactgagaagctcagtggtaggtctcctctgtaggtcatggttgatgataaaagatgctgttatggaattgagttcccagataggactggggataatagaatcctgacatgatagaggccagctggtggtacttaaccatccgaatggtataattatcttgagtggcaagattgaagtggcagcagagctctcgacccagagtgagcttaaaagatgcttaatagaataaggcacccctgtggggaaagacagttaaccaagagtaaactcaatctgttcagtgaacaggtatcaagaatggaagacacaaggctcagagcagcagcctcaacaaaaagtcacagtctctttccgaatttcctgatttgagccactttgccaatccagaacccattgactggtggagaggcaggactgccagtaagaaggaccctgcaatcccatagcaagaatatatggtaatgacctccccgcaccccaccctactctcagtctttcccttaagggacctatagccattcgcttggaaaatcatacactgaggaaaagagaatgcccaaatacttggagggctgtgggacatgatcattattgatacccatgaacccaaaatattatgactcctggttaaagcagaggtattcagaagccagagagttaagggagtccttgtccaggtctggcatacagtgggtccaccgaacacatagacttacgtggtggtcattttcctagttcccaaatatataattgaaatgaacatccttggtagttcttacaatacccacctcagctccttggcctgtagggtaagaactatcaacgcgggcaaggccaacagggagcagcctcaaattgtacagccatgacagtgagcaagaacaatataggggaatgatagatattagtgctttctttttggctccctttttatctccatttaattcatcatacttgacctacaaaagcctaacagttcctggagaataaacagccgactactgcaatcaacaaagtaataaccccaattagagctgctgtaccagatgtgaaatctttacaagagcagaacaacatgacctcaggcaacaggtttggggtgattgatatgatgacatgtgcttccccaaccttaacagaaagtagaatccaaaagtgctcatatttaattagaaaaaataatagaaaatacttgcaatgttgacccagagctaagctgtatctccttaacctctatcataatgtattcccaagagacctgaagtgtctggacatgctgcagaacatccactgttctactacagtgatggtattatgctcaccagattggatgagtaaggatttggcaaacaggttggaggccttggtgagatatgtatacttcagaatgtggaagaaaattcctgcaaaatgttgatgcttcactaaatcagtgaaatttagggattctatgatgcagggcatacttttgtgtgtcctacttaagaaagatctgcctactttgaaatcatgttttcttccactaatatttattattttactttcctatgtaaataatgattcatctggaatttagatgaattctaattcatctaaatgaattagggggatcagtcttcatttcctgtgttatgttaacacatttcttgtgtcacgttaataaacgggatcatttatttgtggggtggggtggggtcacatgagactttcctttgttgccctgtaatcaccttcgaaaaatcaaattaccttatgtgtccactttttttaggtccctctattctgactcatttgcctgttttctatccttgtaccaagcaaacactgacttaataactgtaactttataatagatcttagtatttcataatttaaatattccagctttgttcttcaaaattgccttggctattctaggcatttgcatttccatataaatgttagaatctgctcatccatttctactcaaaaaaagcatttgagattgctgaagttacattgaatctatagaacaattttgggggaaatgacatcttaacaatctgtgaacatgatccattatccttgcatttatttaggactttttaaactttctgtcaataatgttatgtagtcaatcatgttttgtattacatagtttgatcgatgtattaccaagcactcgattattttggtgccattataattaaacatgtaattttctatttattttctggaataaaggtatacaattaaattttgtatctagatattgtatctataaccttattaaattcatttattaattaaaatagtttgccaacagtttttttgattttcaatataggcaatcgtgtaatttgtgaataatgactgttatttcttcctttccaatctgaatgtcttttgttactctttctcctttattgcattggctagagcatctaaagccatgctgaaaataagtggtaagagcgtgtacatccttgtttcattactgatgtcatggggaaatgttcaataatttaccttaagtataacgtaaactgtagttttttttgtaaatgtcctttatcagatcatggatgttttctctattcctactttgcagagaggtttttatcctaaatgggtgcttaattttatcaatttctttgctactatcaagataatcatgatttttctcctatttaaaattattatgatgaattacatttattttttcccccaatgttaacccacccttttgtttctggataaatctcacttagttatgattattctttttatactactacttgattcaatttgctaatattgtgcttaggagtttgcatctatgatgataagagattggtaaaccagcctttttttttttttttttttgagacagggtcttgctctatcgcccaggctagagtgcagtggcatgatcatggctcactgcagcatcgaactcctgggctcaagtgatccttctgcctcagcctcctgagtagctgggaatacaggagcatggcaccaagccctgctaactttaaaattttttataaagacagggtcttgccatgttgcccatgctgatcttgaactcctggcctcaagtgatcctcccatcttggcctcccagactgctgggattaaaggagcgagccatggtgctgggcctaaacaagcctttttaaagtgacttttcccccctattacagaatgcttttgaaagccaaaatgtatgtgatcaggagtgtgctctcagatgtttatttagtagtgcgcaggatgtagactacattatgtgggacgtgggtggtgatgggttgggaagctactggaattaggaggagagcttgaaccagcttgagacaggtggaagtggaaaggaagggtattaaatacaggagactgcccagtatttagcatgtgattagctgaaagtgtggcattatgaaataaagacgttaagacaagttgatttgaacttagaaaagagtaaaaataatgagtttacttcgaggtgaaatccttatcttcatcattattatcaccattactagattccaaaggaatacctgcaatttaagaaactgcaaacgcacgaaactacataactggtaagtattttaatgcatttaattaaaaattttccttatgttgctttggagttagtttttaaaattcttttcgttcataatcaggaaaggtagtaaccttacattcagcgacaccttagaaacatacccttttaacgcagcacatttcaatacagattgtgctgttccttttccaaccaccaggtggcgggcaagcgcccaagtcgcactcccgcctcatccaaggcagcctgcgtggctcccgggagcgcgcacgtcccggagcccatgccgaccgcaggcgccgtatccgcgctcgtctagcagccccggttacgcggttgcacgtcggccccagccctgaggagccggaccgatgtggaaactgctgcccgccgcgggcccggcaggaggtaagggcagaagggaagcctcggggcctattttcccggtagcgactgcctcgggggagggcctgcgggtgattcctgcgtcgcgtccgttcctgcccggggacgctgcggaagcggtcgcagaagcggcgagtacgctgtatggcaagcgcatattcttcccgggcagcacggcggctgtgagctggaattcagcgcgggcggtggggtgattgcggcgccccctggtggcagtcctccgcgcccctcccctgactccccctccctcccagcctcacccccgcgccgttgcagcgctagggctggatggcctgcgggtaagcggcagcaggcgcctagtgggaacccccggcaggaagttagcatgggcggaccacacgggggccacacatgacttgtgaagaactactggacagtttggggaaatgactaccacgaaaaggcttactttcagttttgtttcagactccttttccacaatgtcatcagaacaatgggaaaagtcgattttttcccattcatttccagcggtgtgaaatgtgatcacatgttaattggttgcccgtggtgggtgtgaagggtcttgtcctcgggaagtttacatgatgattggcaaagatctatgtagagactaaatggactggcagggtaagagagtatggagagcgccaaactaaataaattttatactgtgaagactcacaggtcaaggcgtccctggagacctggctcttctggactccctactctttatctgccctaatctccctgccactcgggtaatgaaattatgctcccagactcaactccgcatgtctccaatatatatactgttactccaacaacttatgatttacagcaattttaaaagaaactgataaccctttcccactgattggagatgttatctttaagataaaaacaaattttcaaaaaatgtacacgtgcatcttagtc

SEQ ID NO: 3100 - DNA, 6000 bp, Homo sapiens
tggaatatatgtttggcctttgaccccgtttccctggtatacaactcctaaaatccttacgacctccaaagtaatgtctgtttgtgtgctagtgattgattgatggctgacagcccctaggtagtttcaggatgtgagttggttacgtgaaagaccaaggcaccattagagagttggaacgttcagcctcacccctatctctggggagaggagagaggctgagggttaaattgattaccagtggccagtgatttaatcagtcatgcctatgtaatgaagctttcttaaaaagcccaaagccctgtgttgtagagcttcgagatagctgaataagtggaggtttctgggggttgtgcctggggtgggcatggaaactttgtgtcccttccaccataacttgccctatgcatctcttacatctggctgttcatttgtatcctttgtaatatcctttataataaactggtaagcgtgtttctggagttctgtgaccactctagcaaactaatagaacccagaggggattgtgggaaccccaacttgaagctttttggttagatgttctggaggcccagacttgtgactggttgtgtagcaggacgagccacagacaaaacctctcagacaccgagttgtagaaggaagggctttattcagctgggagcatcggcaagctactgtcttaaaatctgagctccctgagtgcacaatttctgttccttttaagggctcacaacactaaagatttcacatgaaagggtcgtgattgatttgagcaagcagggagtacgtgacaggggctgcatgcaccggtggtcagagtgaaacagaaaagagcagggagtttcacagtgttcttccatacaatgcctggaatctatgggtaacatcgggttctaagtcatgagttaatttttaactactaggtttaggccaggcaggcccaggcctggttttggacctggcgccgggctgcctgtctttgatttcacttccttgtttttttcttaaaacaggtactgagtataaaacaatataaaacaatatgagagggtctctctcttccctcaggtggggccatggggtttgtggtactgagctcttaacctttgagatctaacactatctcctgatagtgttggaaagttgaattagaggatacccggctcctctccactgcagaacttaacttcttgcttggtgtgtggggagaaactcccacacatttggtcacacaagtcttcatgttgattgttgtggtgtgagagcagaggaaaaacagtttgagtttttcactctcagacagcacagtgattcttcataaaactctatgactacaccaacgagcattggcaaagaacaaaaaattattcgatgtcttttaccagttccataaactggcagtgattcatagcatttacacatatattcgtaatattcttaacaagtatatccatgataccttttcatagtctgctttagaaagtcctgcatagtattttccacttaattctgcatcagtagtatagcttcttttaatttaaaaacttgtccattctatttttaaactagaaagataattttattgtaatataatcaaacagtaataaatatttcagattaatcatcaattacaatttacataggttatcactaatttgtgctgtctgcattgaggactaagctctgatttttttttttttaatcttgcctaaattcctatctaaggggtctggggaatcatgctctgtaaaccatacattctcatcagatggttttatttaaccctgtatatcatgacttactttccgatctgactctggcataacatggaagaaaataaaaatattttaccccaaaacatgtttctctgccatatcttgaaatggtcgtgcaaagccatcccttgtgggaaaaatccacattctatagagaatccactttccccttgttttccttccttcctttctagatccaggagataatcaagtaagagccaggcactcttttaggtctgataataaacaatatacaacctgttctctctgaagtctgctatctgagagcttcctctgcacaataaaacttggtgcctacaatcctttatctttacctgaacatacatttcctttctattgatcccaggtcttcagataaactcaaccaattgtaaaccagaaaacgtttatagcctggaacaccgcccccgccgccaccccgcccccgccttgagttgtcccgcttttctgaactaaaccaatgtatttcttaaatatatttggttgatgtctcatgcctccctaaaatatataaaagtaagccatacgccacccaccttggcacatgttcttagggccacctgagggctgtgtctttggccatggtcactcatatttggctcagaatcaatctctaaaaatattttatacagagtttgactcttttcgttaacagcgtgatatattcaaacacactatgatctgcgtctttcattttaatgctgcctggagtagaccatgatatggatgtattgtatgcttttaactccaactgatgtgcttttagattgcttccactgtatgcaactgcaaagaatgcttcgttgctcccgtgtgcattttatttttctaaggtatattctgagacataaaattaccacaattttagaagatttcctactcatgtaaaatattagtagatacttccagatcaccatccaaaatgtcattttacactcccttcagtggtacagaagagtactctttcccttctatccttttccactcttggagtcttcttttttttctttttttgaggcagggtctcgctctgtcaccgaggctggagtgcagtggcatgattatggcttagtgcagcctcaacctcttgagctcaagtgatccttccacctcaggttcccgaatagctggaactacaggcatatgccaccacacctggctaatttttgtattttttgtagacatggggtttctccatgttgcccggtctggtcttgaactcatgtgctcaagtaatccttggcctctcaaaactgttggattacaggcccatgtgccactgagcctggcctcactcttggcattttaagtcttaaaaaattttgctaatctaggaatgaaaatcatttttagtatacatttccctgataactagtgagattgaacattttttcatattttagtagtgtttcattcttaacataatacctgtatttcttctgaaaataacaaaataattatctaaagtatataccctgtgttctgtaatacctgtatttcttctgaaaataacaaaataattatctaaataaagtatataccctatgttctttctttggttctcttttaatgttccaaaagctcagaaaatgctagaatgattttgagtacctgtggtccagttgttgttggggcaggtcgattttctttttgcatctctatggacaagaatcatttgcattactgatttctacaatttacagagctgtgaaactgctcaaagacaatgaaagggtagaactattatggaatcaaattactcagtagcgtataccagacaacatctagcattccgtagaacatccagcaatctttcactgttttctgaaagataatacacttaaagcttttaacacattggctcacagtgagagctcagtaaatgtaatttgcttctccattgttaaaagaatgaaaaacaagataattgagaatttatagcatttctgtggaactacagttccctggataggtgctgtatctagattcatttttgatttcattgggtcttgcacagtgcctgggagcatttatatacgtggtcagtaattaaaaacaatttatttttcctacctcttaataactatcacagttgttcagtaatagttttattggatagaactatgttcaagtatgttctaatttattcccctatctggaaaaatatgtatattgtgagaaaataggtttgtcttgcttacattattatgtatcatatattttcatactggggttaacaaatatattctaagcaccgaaactggtggccttgaaaatggctagactagctgtttcctttcatagtccaaactgtgtgaatatagctaaataaaaaatctggctctattataatagcaaatgtgattttgtatgtggagtcttaaggcgtgattatactgtttctcaccatgaacagtgattttttacacatgataaggcaggctagcaaattcacatacattacggctagaataatccattgctttaaaaacatgatttttacctgctttttagattgagtgttctataaaaattttttcttaagtgaaaaaaatatgcagaggctaatgtagactgtaaaatgaaggagaagcttagctttactgtggagtctgggtctgggtgtaacctaactagctagaggatatgcaattcctgattgacagcagatccagcattatgcagattttgtaagggagaacactcagctcagaaacagtgatgagaggctctgttaggaattactacattcactactcatatcttttagttttctgtctactggatttgtaaataaatagcacaaaacagttcctcttttgtttttattaaagtgatactgcaatgcagttcagtctgtcagctaggcatacatgtgtgaaatttgatattctcactaaattagctaatttttagctgtgttccatgcttatctctagacctttgtgtattaaatcctgtctcgagctgttccctttatacacaagtgtgttttgcttgtgccttcctgtcttcttcagtgagaagctttatgtaggtcaggcttggcttaagcagatttcctgaacctgcgtcagcttaagctggaggaattttaataaaccctcccctgtaggcgtgggcctaaatgaggctagcctagttaagcctgatctttttctgtttgtgaaaagagctgagcagagctgaaggctgcatggtggtttcagaaactgcctacttaatttgaaaagaacaatggtaggaaaggctagatcttccaattttaccttatccgaaaagcttgatttgctaaagcttgtgaagccatatgtgaaaattctcgaagaacacactaataaacattcagtaatagtagaaaagaatagatgttgggatatcatagcagttaactataatgcaattggagtagaccgccctcctcgaacagcacagggcctacgcaccctttataaaaggctcaaagaatatgccaaacaggagctattgcagcaaaaagagacccaatcagattttaaaagcaatatttctgagccaaccaagaaagttatggagatgattccccagatttccagtttttgcctggtaagagacaggaaccacatacaaaggtaagctttattttgttttgttatggaaaattatggcgcctcctatctattgggctttggcttagtcgtgatagagatatgcatagtaagcatccccacaacgggagcaatgaatagtgtctttgttttgcattttttaaaaagagaaaagtgaggctatgaggaatttttctgttgcatttaagctactttttactgtcttcccctcccccttccctcctgtagtttctaaaagtaaaggttagggaggaataagtgggttgaaatttgtgacatcacttcataaacttcttaagctttaaaattaaattatttagtttgcttctgagagatactttttttctcatttaagattacatttcactggaattttcaattttatataaaatttatataaagttagcagtttctagagaaatggaaccttgcttttttatgaattgtcattgtctacacttattgaatatatgttaactaacaaatataaacaaaatcaataagtaaacttgttaatggcatgattgtgtatatgaagacagtttaaattatttttctaacacgtttaaaataaagatgaacacaactaaagg

SEQ ID NO: 3101 - DNA, 6000 bp, Homo sapiens
agtggtaatggagacaaagggatcacatagaacagatatttgtcagatactgtaatactgctagaattaaattaggccatgatggcataaaactcaataaagcagttactgttctgaaataactttctaatgggagaagagaggggcaggtgcttgggagcagaatgaggaaaatgtaggtagcattttggaacagcagaattgaagctcaaacgtctggaggtttccggatgtgataagtagtgccacaggctccaaatggatcacagagggtgaaggtgaagatgaaacgacaactagatttggcaatttggaagattttataacctttgtgatggcaattttattggaatgagaatttgaaggtaaggtaagcagaatccgtaatgctatttgttggcatgattgagaaatgaaagtataggcgatgggtactttttcaatttgaactgaagagagattgctaaaaactatgtgtatcaaagccatccgctcctcaactgtttacatataatgattgactttggatatgtggccttagactgttatctgcagagtctagttatgttttttgtgcttccacacttttgactacagacttctttgaaattccatttctgattattgtgttttaagttgttatatctactttcatatctgagatgttctgtcgccaggctggagtgcagtggcgcaacacggctcactgcaacctctgcctcccgggttcaagcaattatcctgtctcagcctcctgagtagctgggattacaggtgcccgccaccgtgcctggctaatttttgtatttttagtagggacgaagtttcaccatgttggccaggctggtctcgaactcctgacctcaggtgatccactctcctcggcctcccaaagtgctgggagccactgcgcccagccacatattcttgagtttaaaatggaataaggttttgaggtattcatttagaaaaaaaatgctgaattacatgacttattttaaagcaatagacaaaactaaaatattagttaaataaacattcttaaactttttttcaagttaataaatcttgacaaattatttgagttgacaaactgtgttgtattccccactgaaggtctcttggtttgctaagagatactttaggcatattttggtaaagctttggtcctctttaagtctgcagctgctttcagttgttgcctctaggaaggatgcttttagatgttctggtaatcctggaatggtagaattgctatttactctgatgaaacatttcacttggtccttccagaacaagttagggtcctctggaatcactgttctctttaagctaaataaggaatcaaaaataattcacctgaaagcccaagtcatataaaataaatattatccaaaactgttctataaccatgtgaaacttattaatttttttttaattgaagtgaagtctcactatgttgctcaggctggtcttgagctcaagctgtcctactgcctcagcctaccaagtagctgggattacaggcacgcataagcacacccagctagcatgtgaaactttaaaaaactgttcaataattttccctccgaaacttacttcgatgaaaaagtaagaaattagtaatgaatagagctaggtactaatcctgcctttgccattcattaacttctgtgtgatatgaacaaatcactagtggggtgttattttctcatattctgaaacataaaatagaagtaggaatatgtgtggtgggaggtgaatatgaatcaaaagagaaatgtattacagatatttattatagagttaaagtaaaaaataacagtccagaattgatcaagtgtagtggctaggagacaagtgggatcacaactgaaaaagaagggtaatcagactaaaaggaggtgtccaaattatttttctcctctccactcctcccaccccagctgtaatgttgatgctgcttaatcaattaactaacattaccaataagtaataaccaattaatgtgttaattcaacattatagttacagagacttttacctccaatatttgttactgttaaccccaaggcatagtataatatccttataaaaatatttaggggtgacatacttggcattgaatgattaaagaaggaaatgaaacgaataccaatatattcatttccaaagatatatgtatccacataattggacaaagactttgatttttttcttttgagacagggtttcattcatgttgcccaggctggttttggactcctagactcaagcgattctccccactcagcctcccaaagtgttggcattacaggcatgagccaccacacccaggcctaaattgcattttattagtttcctttagagataatccaaaatcagactatacacttctgcagaaaagtacttttgaactacacattacagtgtcctttgcattaccaggtacttcatgtttagtatttgttgagtaacagaaatcttgttttttaaacttcttttttttttgagatagagtcttgctcttttgcccaggctggagtgcaatggcacgatcttggctcactgcaacctccacctcctgggttcaagcaattcttctgcctcagcctccccagtagctgggattacaggcactcaccaccatgctcaactaatttttgtatttttagtagagacagtgtttcaccacgttcaccaggctagtcttgaactcctgacctcaagtgatccgtccgccttggcctcccaaagtgctgggattacaggcgtgagccaccacgcctggcctttttaaactttttacttgaactaatgtttgacttacagaacacttgcaaaaacagaacagagtgttcatgtgtacacttcttccagctttctttcttttcttttcttttcttaagagacagtgtctcactatgttgcccaggctggtcttgtctcaagctcctggcctcaagtgatcctcctgccttggcctccaaataaatatcaacaaatatttattgagtgcggtctgtaagactagtacagttctggctgggtgctgtagctcatgcctttaatcccagcactttgggaggccgaggtgggcagatcacgaggtcaggagttcgaggccagcctggccaatatggtgaaaccctgtctctaccaaaaatacaaaaaattagccaggcttggtggcggcgcatgcctgtagtcccagctgcttgggaggctgaggcagaagaattgctttaacccaggaggcagaggttgcagtgagccaagatcatgccactgcactccagttgggtgacagagaaagactccgtctcaaaaaacaaaacaaaacaaaaaagactagtactattctaaacacatgggtacagcagagaataaagcaaagatcctgccctcatgtagcttatattctgagagtaatagaaaaacaattaacaaataagtatatgttagggaatggaaagtgtgatgaactctataaagcagggtaagggagatacaagatgagacaagagagcaatgcactgtcagataaagccctttgacaagttgatatgtgagtaatgatctgaagtgaaggatcaaaccagatgcaaatctgcaagaggaatgtcccaggtcacctttagccaatctgttttagattttctgaactccccagatgatattaaggtaggctgcagacactatgaagctagcttgttttctggttacccttactctttatgtgtcccagtccaaagaagaggggggtgcggtttactaaggtgcccaaccttggcaggtccccatttcaaattcttgtaacgctggctccaggagctgccaaaagcacaactcaacctatgaggtgctctttatgactggaaaaagtccccaggataaaagctccttaagcacattactctttttttttgaaacagggtctctctgctgcccaggctggagtgctgcggcaccatctcggttcattgcagccttcacctcccaggttcaagcgattctcccgccttagtctgctgagtagctgggattacaggcgcgctccaccaaaaccagctaatttttgtatttttagtacagaccgggtttcaccatgttggccaggctggtctcgaactcctgacctcaagtgatccgcccgcctcggcctcccaaagtactgggattacaggcacaagccaccgctctcagcctcaaattactcttttaaatggctgtacctatttacactcctaccagcagcccaagagttcccattgtttcacatcttcatttcacccttgatattttttagcttttactttttgtcaaactgctggataaaactcaataaacaacctttagccattctctctcctttcagattagcctttctaataccatttttcagggatagttgactgtgttaccgcctagcacttagaaggtgctcagtaaatactcattgaatgatgtaactttcctacttaacatgctttaatgcttttccaagtccggaggcggctccccttttctgagagcctaataatcacgtattcgtttctatattcccagaacctaacaaagagtttgaaaattatcctgcaggcaccgctaagtcaatgttttttcggatgaatgaataaccaataggatatcgtatacttctgcgatgcacgcatttctattatcgcacacaccgaatcataccgtatttattacttatccacgcagatggtgaggtctgtagcctcggcatctacactgtgtctgaaagtaggcactaaaccagtatttttttaattgaaccgtaaacttgaatcaaacttggaagcatttaaagccaaacgcaaagatacatgcgcagtgatgcagtagggtcgtccaatcagagtagggcaggacagggcagtgcagcggctaggtagtgcgcacgcgcggcgggctcgtccgcgattggcttcgccgaggcgggatccttgagcttctccggcggcgaggggatagctggttaccagaaggacttctttgcagggccagtggtttctgtcagattttcgccggtgcgtcctgcagggggaagctcgggaggctgcgacagcctgtaggctcgtgcgggacaaagcagggagtggcgccggagcaggccaacgagggaggagggagggaaggcggcaggagcgaccgaagtggccttctgcgggcctgcagctttggtctgaagtgccagggacgccctggttgctggccccgggggccttggagcgaagggcgggcggtgggggtttagggttgtgcgtttgtgtgggagggatggttctgggcagtggcccctggggccgccactgcggtcgctttgcgcaggctcctcttggcttttgggtctctccctcactcctgcactgggaatttccttccccagggccagggggtgaaggctctgcgagcgtcctggagagtgtcggtacgccttctttaggggcttttacctcttcactggtcaggtttttcttgtatttccttaaaaccttttaatcgattaccttatggaagattttctaggtaggaacagatgcttctcgacttactacggggttgaaaatatcccaaatggaaaatggatttaaaacacagctaacctactgagtattaaagcttggcctagcctacttttgttatcaaaaaaattattttcagctgtttattttagatttgggggtacatgtgcaggtttgttgcatcggtatattacgtggtgctgaggtttggatacgattgatcctgtcacccaggtagtgagcatgttacccaatagtttttgaacccttgctcctcctttcctctcccttctagttgtctccactgtctattgttgccatctttatgttcatgaatgcccaatgtttagctcccatttataagtgagaacatgcaatatttgattttctgtttctgctttaattcgctttggataatagcctccagctgcacccatgttgctgcaaa

SEQ ID NO: 3102 - DNA, 6000 bp, Homo sapiens
tgagacagtctcactctgtcacccagggtggagtgcagtggcacgatctcggcttaccgcaacctccacctcccaggtttaagtgattctcatgagttagcctcccgagtagctgggattgagtaagttcttattgtcgtcaataggttcttggaaactgcaactctaattgaaatgaaaccagttttttcttatcaacattataatgaaatgatgttatttgagaacctgctgtttgtcatttcaaagttacagctaagaacctatcaacggctttaattaattaattttttttttttttgagatggagtcccgctccattgcccgtgctggaatgcagtggtgtgatcttggctcactgtaaacctccatctcccaggttcaagtgattctcctgtgtcagcctcccaagtagctgggactgcaggcgcatacaaccatgcccggctaatttttgtatttttagtagagatggagtttcaccatattggccaggcttttctcaaactcctgacctcaagtgattcccccagctcggcctctgtgtgagtcaccacatccagccaatggctttgaggatttatgttatagttttttccggaggtacatgtcacacatctgataaataagcatgttaaagctgtagcctcctaataattctctttaatcagacctactgatgaataattttctattagtacaagaatatcatattatgattttttctttttaactctgaccctattaaattcttaaagtgttccagctaaaatgttcttatttaaagaactagactcaaagcttggcaacataaaattgttgatatattgagtcttcagcagggtttaggaaacagctaattaaatagacccaagtttaacccaataaagtgaccttggggcaagttactaaatttccttgagtgtcagatttatcatctggatttaataatctatattttatgttactatcaagaattaataagatgtatattaagttcagagccggctgctccccataattggtgtttaataagtagtgcaaagttttgcagttttggaactttaaaactattatgcttttggctttatattttttcaaaatataacccttcttatactttgaaaagcaaatattgtcagagccaaagatttattaaacttatctctttaaatagttatatacccagtgggaaattattctatatcaatgtatcttcaaattagataaaattctttatcagattttaatttactaattaattgaatgaagatgctgtttctttcataactgagtttcatatgattacttttttaggtcaattggcatgattttgctttttttgatcctgtaatgtatgagagtttgcggcaactaatcctcgcgtctcagagttcagatgctgatgctgttttctcagcaatggatttggcatttgcaattgacctgtgtaaagaagaaggtggaggacaggtaaagcaaatatacacttttctgattctggcaagagaatttggttaaactgctgtgcttgtcttatgtatagacagtttagttagggaatgaaagagatgaacgtgtgtgtacacataggagagatggatactgtcggtgttaaagatggatcaagagttagtgagacagactgaggtagaagggcttgtactttttgtgtgtgtgtgtgtgtgagatggagtcttgctctgtcgccaggctggagtgtagtggcacaatctcagctcactgcaacctcttgactccctggttcaagcgattctcctgcctcagcctccccagtagctgggattacaggtacgcgccaccacgcccacctaatttttgtatttttagtagagatggggtttcaccatgttggccaggatggtctcgatctcctgacctcatgatccacccaccttggcctcccaaagtgttgggattacaggcgtgagccactgcgcctggcggcttgtcctttttttggcctaaaatgtttccatctcttagattctggtcaaataaataattgtgtttatatttaaaaattttaggaactagttttataaacagtaatgttttactgctttgacaaaattgcctttaaatagcactggtaaatttttcacaggttgaactcattcctaatggtgtaaatataccagtcactccacagaatgtatatgagtatgtgcggaaatacgcagaacacagaatgttggtagttgcagaacagcccttacatgtaagtgtttctagaaagtgttgtgtgatccaatgaggctatttgtgtcttaatgtgtggtaaactagctaagtatattcagcttatttataaaaggacaaattttttaaaccaaaaggaatttatttacaatgtaaattacacctaagtttaagaatccagaccaagtactcattttctttttgataaaactacttggaaaaaccacgtcattgtgagaaagtagctttggcaaacaaaagtgtggaaagggtgcttatggtaccaaaatgactgttttagggtcctactgttttagtggtagagttattgagacagactgagaggtacaaaggctttttataccaaaatgtttccatcacttagcttctggtcagataaagaattgtctttatattttaaaatgtatgcataaaataatatatcttagtcctttgtcctactgtattagcggtaggaccctaaaacaatcattttggtactgcaaacagctttagttttatttaccaaagctactttgggtaacctgctaaaagaactcaacaggactcagaagcagttgtacttaatagttattgtttattgtagcaaaaggacccacagcaagatcagcaggggaagaaacaaacattaggcggagtcttgaggaatccaggtgcaggctttcaaagttctgtctcaagcaggggaatgagttattgcaaagaacacacttcttccactagtgaaatgtatcaacatgtatacattatttgtgcttagggaagcccactttagagtcagagctcagtgtttttattggaagctagttccatgggcattttctatctgcacaaccagccatgattactgaaattccagaatccctgaagaaagcacatgttcatcttgaactgcattgtttgcacaaatagtccaggcagtctgatacagcatggttcattgctccagacattcaaaacagccttaccagttagtaatgttggaatattgcaaaaaccaagttctcagacaccagccaatgccagccctactagtcaggcccttgtaaagagtaacatcaatcctactatgttaatgtcttccccatccagggtaaaaaaaaatatttttttttttaagacagtgtcttgctctgtcaccaggctggagtgcagtggcacaaccttggctcagtgcaacctccgcctcctgggttcaagtgattctcctgtctcagcctcctgagtagctgggactataggcgcgcgccagcatgcccagctaatttttgtatttttggtagagacggggtcttgatctcatgatctgcccaccttggcctcccaaagtgctgggattacaggcatgagccaccacacccagcctgtaaaatgtttatatagctttatgactgatggtgttgagtgtttctgatccctgtgctacaataattgtgcaggctttggagtcatactgttagagttgaaatcatggctctaccaccctctagctgtatgatgttaccaagttaagttttttgtgccttggttccctcctctgcaaaatgaggataagattaaattgaattaggtaaggtactaagacaattcctggcacatcataatttctcagtaagcatctagcttttgagtttgtgtctgggaggtttgttgttgtcaatttatctttcctgagatactgacagggtagcactttttaaagattgaagctattcttaatgactagcctgtttgttattaacaaaacttttaaaattgttaaatcactgggatataatactacttcactattgaacccatagcttattcactatgccttccctccccacttcctgcctttctctcttttgaatcctaagaaataaaaaatacaggactgaattttttttgctatctggcataaaatgggaactagcattgttagagaaggctgctaaaattatgtcttgtgctttaataatataaataaatgttacatggaaaatgaagtattattgtttctgaaattctctaggcaatgaggaaaggtctactagatgtgcttccaaaaaattcattagaagatttaacggcagaagattttaggcttttggtaaatggctgcggtgaagtcaatgtgcaaatgctgatcagttttacctctttcaatgatgaatcaggtaggacatttaaaaaaaatgtttaaagaatgaactatatagataggtcagtcagcattttctgagtttctagttcttaaggcctgtttatagggtttgggaaattgctgtattactcaagcattaaaacaattttttacattgtttttaaaggtatgtttgaagtaaatagtattttgatggcttagcattaggctattcttaactcttttactgcttaatttttctaggtttcaaaaaatatgaatacaaacaaaaatttttcatggtgagcaactgtgtaaaaaaggatttgtatatagtggttaagaaaaagtaatccatgtgacaactctctgggcttttctgattcatgttgcttaaactccctaatgaaagaatttgtatgatgattgctctatagagctggacccaaatcacacttctaaaaacacagtagcacacaaacacttcctagattcctagaatctaggaagaataaggagtggtagtgaaagtcctcttgaaagaaaaacttttatctccagtgtttgatttgctgcaattctttcttttgaaagtcctatggtctaggaataggctttttagctgtgactgtacattagaagctccaagaagttctctgtgaaaggattatacctatattccaagattattatgtacacaaaggtactgatttttttcccctttatttttcctattttgcaagcagcttcagccaaattatatattgtaatagtttttgtgctaccttgtaatacagtttttaatactaataagaatttgtctcatttacaaaccaaaaatttaggaaggaaaacagtatccaaataaactgcctaagatcttgccactccaagtatgatcctcagatcagtagcattggcatcatctgaaagcgttttagacaggcagaatctctggtctcccctctctgcattccccacccagtgaatgaatgagaatctgcatttcttgagatcataagaatactgacatacagatgagataaaactcatgtgaatatcagttttaaggctggtggttcatttgttttggtcatattgagtcaggattgactaatgaactgtagaggttttgcattatgcaaatgctcttaatttcttgtattaggaattagacgctcccccccaagtcttaaataatgttttaatctgtatccttttattataagaagattagtaatattctacagataataacaacaactggtatagtatattttatttacattcttcattcttaggagaaaatgctgagaagcttctgcagttcaagcgttggttctggtcaatagtagagaagatgagcatgacagaacgacaagatcttgtaagttaaaaatttcacaagatttgtagaaggaaatacagaagttaaaaataccatgtatgatggccttttaagtttgtaatggttggtcattttaattttgggtagggcaattatagaaggtcacaaataaggcagtttttgtttttctgctctataacaatatctgaagtattactaaagctctaagcagagtgaagtacatttagctgttaatatgctgtccttagtcccagaagatacc

SEQ ID NO: 3103 - DNA, 6000 bp, Homo sapiens
atttgcaagacattcttgtatgctttaaagtattgtattttgtaatggataagcttctgagaactccaattactttgttgttttttaaactctcaaggaaaggctaaaactagattttcagattgtacatagaaaaattcaagctactttccaacattgaatttactactttttgacttcttgatgtgttttaataggttgatcgggatcgagatcttctcattcagcagactatgaggcagcttaacaatcactttggtcgaagatgtgctactacaccaatggctgtacacagagtaaaagtcacatttaaggatgagccaggagagggcagtggtgtagcacgaagtttttatacagccattgcacaagcatttttatcaaatgaaaaattgccaaatctagagtgtatccaaaatgccaacaaaggcacccacacaagtaagtactctacaaataacaagcagcttaaaattctttccttgttcctcaaaccaacagtggtaatcatggtttctatatgtgtgagtgcataaatttgcatttttacatacttttattctagattgatttaatcttgtttaaactattctaatggacaacaatttgctattctacggacacatttattttgataaatgtttgtgattgtactagtttttcatctcaattgttacatgttgtgggtgggtaagaggttgtaaaatacatagtgatataaaaattcaccgatcaaattgcagcatttcctccacttcaatatttaacccacagggatatttgagaagaaaatgctattctaagagcagtgctgttcacattatgatttccaaacttgctcctggtccccagtgagataaggactttacaaccaaatgcaaatccactgtgtcactaagctcactgtttagcaagacttaaaacaaaaaatcctggtgcaagcttattaccccactgaggatcaacactttggggttaggactcttagctaagttttaagattacaaggatcaaattttaaaatttgtgaaaattacaaaagccttaggagattcacatcaagtaggagcagaagattatcagacttgtaggtggatggagactgactgagctgtagaaaggattgagggtgaaaaaatgggtgagagttcctcagcttttcatcagtttcaccatttcactttctataatgttataatgagaagaaattaggagatgtgaatgaggaaactgggaagtcttaacatttccaaactatctgttttgtacacttataggaaaccatactctggcttgggcttaggaatttaaaaataataataggtaatattctggtggcctttaatgctttcatgccaaaaactaagaacagaggatatttaaatgagtctagtcatgtaagaaatttcagcgttatttatagtgacactatcataaccttacttgctatatattatttcacagctttgacatgacaagggagaaaattgattaacaaatattgagtgaacatctatttcgtgccaggtatattctacacaatcacctccaaccctgaaaacccatagggagagaaaggcattaacaacacagatgctagggaaggataatctttagctgtcatgttttcttacatttgtctcatttctttgcattgactttgaaatttaaggtagttgaatttgcattcatctaaatacagtatatttctgattttcttctaggtttaatgcagagattaaggaaccgaggagagagagaccgggaaagggagagagaaagggaaatgaggaggagtagtggtttgcgagcaggttctcggagggaccgggataggtaaattttgtatctttgattcaataccacctttttggatgaattagagataggcctgtaaatgaaagaatcttaattatggattattttttagaaaagtaaagttttaattttgaacatatgtatagtaactaagaatagtctgttaataaaatacaataactaagaatagtctattaactaataaaaagttctgctttaaaaacccagaggcggttgaaattatattctttttatctgactcaagttcctatttgaatttttttacccatatcattctctcctaagtttatcttaaaaagtcttcatttttcaggccacatgcggtggctcacgcctgtaattccagcactttgggaggccgaggtgggtggatcatctgagttcaggagttcaagaccagcctgaccaacatggtgaaactctgtctttcctaaaaacaaaaaattagccaggtgtggtggcgcatgcctgtaatcccagctacttgggaggctgaggcaggagaatcctttgagcctgggagacagaggttgcagtgagccgagattatgccattgcattgcattccagcctgggaaacgagcaaaattctgtctggcaaaaaaaaatttaattttggcagattgtgctatttagaatctttgaagttttctcttgttaagatggattgcattttacttttgactaaaatttccagaattatgtgtggactcttgatatctggtatgttaaggtcctactcccttacaataaaaattttaaattaagtaacaaaatctagataatctttatttcctaaccatcatctgttttggcactctaccacctaggtaccataactgaacaacctatatgctctggttttctaacttttttactagttgtgctaatatttttacttgttagtcaaaggaaatgaagtcataatagttttccttctcttacagagactttagaagacagctttccatcgacactaggccctttagaccagcctctgaagggaatcctagcgatgatcctgagcctttgccagcacatcggcaggcacttggagagaggctttatcctcgtgtacaagcaatgcaaccagtgtgtactgtgtacttagttacctcttaactggctgtgttatttttttgcttttgaattaaagatggtgtttaaaaaaaattgtcagctactggcaaaaccacatgattgaggactctttttagctctgcagtaagaaggaagctcaggagagaataaggcagtgtttactgaagggtaactgtatagcttgaatttattttttcctccacccaccttatgttgggacactgtctccattctaccttccttgcatgctaaagaatttgctgtgcattatatttattgtatcttcatttgaacaaattattactacttttggagcagactttatctgttagcaagctgtagttggaacacattaatgctgattagtattgcaggaagaattttattttgaatgttctatcaagagtttttctttatatgatatgaaacacaaattagttatgttttttgtctttatgcataactgtatgtacacattttatagtgaaagaataacagaaaactattatttcttccagcaagtcctcagccttaaacataggtatatttttctctaccctacccccttctttttttctaccctaaataaaagatatttctggctctctgatgaagaaaaaaatatggaaattgagtatatgtatgtttaactcagagatataaaaaaacctaaaaagaaaacttgtcatacaaatattataagtagccttaacaagatgtggtactgcatggactgtttattccctgccaagtttctctataattgatcttccagtttcataaaagaccttactggttctgaaattttgtatttgttacccaagtttcttattttattttttttttaaataaaagattgtagatgtaattagacaagaggttttagagagtagtcaagtaacatttgttcatcatttacaggcatttgcaagtaaaatcactggcatgttgttggaattatccccagctcagctgcttctccttctagcaagtgaggattctctgagagcaagagtggatgaggccatggaactcattattgcacatggacggtaatgtgtacaattgggaaggcatttcagtttaaacatcagctacttactttcagtatgtgggtgccatcatatcttaaaatttatgtcataaagtataagactttaaatgcatttttatttattttttaaatgatagcttaaattccatgaatgagacagcttagtttcttctcatgtattagaaaggtagggttttaatagttaccaaggttatttggaaattacttgaaagaaagtacatctcaaattcacttatcagaataccctcctggcaaaggccatacatattatactgtgttcttgccataaccatgacatttcttttaggcttcctgatttgtcttaaaaattcatggaagtttttgctttctattctgtaaagtatgaatttaatataaaatctaaaaaatatctaacagattacatatccctttttccaaggtgacaagtaaaagtgacttaggaagataaggccgggtgcggtggctctcacctgtaatcccagcactttgggaggctgaggcgggcagattgcctgaggtcaggagttcaagaccagcctagccaacatggtgaaaccgtatctctactaaaaaaaaagttaaaagtggctgggcacggtggctcatgcctgtgatcccagcactttgggaggccaaagcgggtggatcacgaggtcaggaattcgaaaccagcctgaccaacatgatgaaacccgtctctacgaaaaatagaaaaattagccaggcatgatggtgggcgcctgtaatcctagctgctcgggaggctgaggcaagagaatagcttgaacccaggagggtggagcttgcagtgagccaagaccatgccattgcactccagcctgggcgacagagcgagactccatctcaaaaaataaataagtaaataaataaataagctgggtgtggtggtgagcacctgtaatcccagctactcgagaggctgaggcagggagaattgcttaaacccgggagacagaggttgcagtgagctgagattgcgccactgcactccagcctatgtgacagagcgagcctctgtctcaaaaaaaaagaaaaaaaaagggaagataggtcacatttatgctgtagtttctatcctggggctaatctgatacccagtttgaaactttgaagtgtttattattttagatgaaaagttgtatttttttcttcctaatgagttaggaatttagattagatacactcctagagatgtataagctggtaggctgggcactagagctaaacagccacttctagagccttttaatggtccaagccaaagactgttgagagaactgtattttctttgctgatgctcttttcttctctggattttatgtactgttcgtttattcctctgccctgtctctggagctactgcatactggtatagcttagtccattatagaaaaatcaagaacaatgtacatttttggtgaaaagatttttgtgagtatatgttaagagttgcgtatttagtcatgttttctgttgaatgcaaccaatgtacaatattgacagctttcacctggctttctggagtaaacagtgaatttattggtgttctagaatcattaaattcgctagagaatttgctagtgaatttggattgctttctgaacatttttctgttcttctgtagtgctccctctgagcattgtagaagtgttccagcacccctatgaagaccacattcattttgtcagggagcctttagtccactatcttgaatcatacatgaaggatctagtgatacacttttttaaagatttgtattaccaacttctctgctcatactgcattagtactagcaggtgcattggatatttattgactccaaaacttgaatgtattttgtaagtaagtccttttaaatttaaattatacgctaaattctagaagtctccgttatctggaatgtgaaaggctttttgtttttagggaaaatggagctgatagtatcctggatcttggattag

SEQ ID NO: 3104 - DNA, 6000 bp, Homo sapiens
aaattacaaaaaattagctggacgtggtggcgggcgcctgtaatcccagccactcgggaggctgaggcaggagaatcacttgaacccaggagatggaggttgcagtgagccaagaccacgccactacactccagcctgggcaacagagcaagactccgtctaaaaaaaaaaaaaaagtagttatctgaggttggtttggtaatgcgttggaattggtggtcagccagggccatcagacaaaaggaccattgaagctccagaaagggaaaaaaaacttgcgtatgattcctgtattactaagttgaggacaaaatctaattagtttttttcccttcatttgtaacttttaaatgtaaatattcataggttcttccaacaaaaatgtcttatgctgccaatctgaaaaatgtaatgaacatgcaaaaccggcaaaaaaaagaaggggaagaacagcccgtgctgccagaagaaactgagagttcaaaaccagggccatctgctcatgatcttgctgcacaattaaaaagtagcttactagcagaaataggacttactgaaagtgaagggccacctctcacatctttcaggtatttgctaagaccctttgtttttattgttcagtacagcgttaaaaatatatatccatgtctagttaccatttatagacttgctattagcagctcagctaaggggaaactgaataactagaaagagtagaactttctagatttgtgattcacacttatctgtgctccttttccaagtttgtaattctcttacaagaggtaggttctttgtttatctaacaaatatttgttagtatatactgtggctcagtatgatttgttgactctgttttttggttacatggcataataatttttttgcttagatgggagttaaaaagctagtttgaaaataagatacactgtatatacgttgtctaataacgatgtaagacaggggagaattgtggacttgagtggcccaagcttcctagaagcaatatggattgaattgagatggttagaatgtgcagaaacagactggagagaattagaggtagggaggccagctaaaaagctgtttgttattactaatagtttcagttagttgggggaaagatgctgaggcagaatgttggctttagaaaggacatcatggaaaggaagagaaacttaagatggacttgatcactttgaaggaagaggaggaagaaaaattaaaatctggtctaagtcagggcattagggaaagagatgttactactgaaaaaaaatcaggagaactgtcattgtggtgaagaagccatattaagttttaaccatgctgagtttgaattgagcatcgttgacgtggacatatttatttaacaaatggagattctggttcatggtgaaagtttgaactagaggtggatctgggagtcacctaaatggagatagacattggactttaaggagaggaggtaaaatgaaagacgaagataagacatagcccagggatttatccgtatgtagaatacagaaggaataagggaggaaaaataataagttgtcgggaacaagtagctatggaaaagttctctgttaggacacagtttgaagaagttaagacctcagaatattttttaaaaaaagtaagttactaccattgaacaaaaaccaatcagtctttgaaattggctaaattatttctcccccccaccccttcccttaaacttcttacaggccacagtgtagctttatgggaatggttatttcccatgatatgctgctaggacgttggcgcctttctttagaactgttcggcagggtattcatggaagatgttggagcagaacctggatcagtatgtattttgtgcaccttaaattccattctgcctgataagcatgtatttcagggaataatctgtcatgcatttttttttttttaagatcctaactgaattgggtggttttgaggtaaaagaatcaaaattccgcagagaaatggaaaaactgagaaaccagcagtcaagagatttgtcactagaggtaaaggtatttagattttcttatactatacctgtagtatgctatttatataaattttaaaacatgcaaaataacaatagctttgcttagggatatgtacttataattaaaaatttaaagaaaataaaaagaaatgttaactaccaaatttattttttcgtgtgtgtgtgtgtgtgtgtgtgtggtttctttttatttttttcttattgtaaccaccaaatttagaatagtagttttctctggcagtttggttccctagcatcctctatgaatttttttgttttagtttttaagtatcattatgcatgcattgatttaaactttttttgatgtatttaattccattgagattattattcatattgatgctcagattgtgtcttctttggctaatgggagtcttgagtcagttttgattcctgagttcttttgacatggccccaataatttttgataaactttcttactttctggtatgtttcatcttgggtatttcctgtcacagaccttaaatcagccatttcttaaagtagctttgattccttttagtaggaaattgtgttatgagattacagtctgtgctctaaggttgcatattgctactgggttgatcatggtttctaggcctttttaattgataacagtttgggaatgcattttttttgttctttttaaaaaatcaaataatgaattaatattgatactcccaattcaaattcaggatttaggaccacaaggttgtttttgttatgtttgcttcttagatttctttctttttttttttttttttggagacagtcttgctttgtcgccctggccagagcatagtggcatgatcttggctcactgcaacctccgcctcctgggttcaggtgactctactgcttcagcctcccgagtagctgggattacaggtgtctgccaccatgcctggctaatttttgtatttttaatagagacagggtttcaccatgttggccaggctggtctcaaactcctgacctcaagtaatccacctgccttggcctcccaaagtgctgggattacaggtgtgagccaccacacctggccttgcttcttagatcttaagtctttatctcctttctttcaaactgaatagccaacttcccaacaacattaatcaaattactcatttgttttaatgccacaacatacacagtagcagtcttagaattacatcactggaatctgaggtggaaggatggtttgagtccaggaattcgaggacagcctgggcaacatagtgtgagagactctgtctcttacaaagaattataacatcaacactaccactaacaaaatgattattcaaaataattgaagatttatttgcggatgtttgtccttaggtcatatgcagttagagatacacagttaaattaggtttgttttaaagtcacttgaagtaattcttctttgtaggttttgctaccagctctatataattagggccttttgtttcattttgctttcagattttagggattcgtttttcctcttttggttttattttgtaatcaatgtaaaatatctacagtgtggcagagtgaactctacaaaagaatggatataagtccattcttgtctcttttaccattttttcaagtttatttccttccctcccttttaaaacatataagcatatgtatgtattaattacatacctcctcccacctccccaaacatactatacattttattccatcttgcttttctcacttagtagtatatcccagagaaaatatgagatgttctaccttccttttatagctgcttaatgtactgcactttaatggttgttatcgcagtttttgcagctaatcccttacagactaggtatttgggcttgtttccagtcttttgctattacagatagtgtgatgaatggcctcgtgtttttttttgctagtgtgtccctgagatagattcttagacatggaattgctgggtcaaagagcatgtgcatataattttgctagacattgacaaatacttctgcataagcagttgcataattttgcattttcaccatcaatgtgagaatgcctgattgctcagtctcgccagcagttgttaaatttctagatttttgctaatctaataggtaagaaatagcacctcagtatagttttaatttgaatttatcttattttgagcaaagttaaacattatttcatatagttaggatagttatatttaactcagttgatatgcccatttttctaagttggctttctctcagatttcagaggctttttatgtagctgtaggtgatagacacactcattaattaatatgtatctttgtgacaaaaggtgcaaacaatttttccagtttggttagtccccctccagcctcccgcccacttagcttgtcatcaaggaatctgttttttttctagtattttttttttaacatctctgatcatttggtattttggtgtatcccaaaattgaacaagattattgttttccaatagacctttgaaagaaagtgttagaattgaattaaattctgttgtcctgatttaatttgcaagacattcttgtatgctttaaagtattgtattttgtaatggataagcttctgagaactccaattactttgttgttttttaaactctcaaggaaaggctaaaactagattttcagattgtacatagaaaaattcaagctactttccaacattgaatttactactttttgacttcttgatgtgttttaataggttgatcgggatcgagatcttctcattcagcagactatgaggcagcttaacaatcactttggtcgaagatgtgctactacaccaatggctgtacacagagtaaaagtcacatttaaggatgagccaggagagggcagtggtgtagcacgaagtttttatacagccattgcacaagcatttttatcaaatgaaaaattgccaaatctagagtgtatccaaaatgccaacaaaggcacccacacaagtaagtactctacaaataacaagcagcttaaaattctttccttgttcctcaaaccaacagtggtaatcatggtttctatatgtgtgagtgcataaatttgcatttttacatacttttattctagattgatttaatcttgtttaaactattctaatggacaacaatttgctattctacggacacatttattttgataaatgtttgtgattgtactagtttttcatctcaattgttacatgttgtgggtgggtaagaggttgtaaaatacatagtgatataaaaattcaccgatcaaattgcagcatttcctccacttcaatatttaacccacagggatatttgagaagaaaatgctattctaagagcagtgctgttcacattatgatttccaaacttgctcctggtccccagtgagataaggactttacaaccaaatgcaaatccactgtgtcactaagctcactgtttagcaagacttaaaacaaaaaatcctggtgcaagcttattaccccactgaggatcaacactttggggttaggactcttagctaagttttaagattacaaggatcaaattttaaaatttgtgaaaattacaaaagccttaggagattcacatcaagtaggagcagaagattatcagacttgtaggtggatggagactgactgagctgtagaaaggattgagggtgaaaaaatgggtgagagttcctcagcttttcatcagtttcaccatttcactttctataatgttataatgagaagaaattaggagatgtgaatgaggaaactgggaagtcttaacatttccaaactatctgttttgtacacttataggaaaccatactctggcttgggcttaggaatttaaaaataataataggtaatattctggtggcctttaatgctttcatgccaaaaactaagaacagaggatatttaaatgagtctagtcatgtaagaaatttcag

SEQ ID NO: 3105 - DNA, 6000 bp, Homo sapiens
gctgtattttctggttccccctttttgttttataatccagtcaactgtcttttcttggttgtctccaaatcaggtgtttagggaagtgaaacttttgccactttgcctttggttatgactactttaaaatcatgcttttgaactgatgttttccccacacacatcagcaagtcattagttaataagctcattcaaaatagaaatcatgtcagatctcttaaaagttagatcacttctattaaacacttgctgttaatggacagatggtgctaccagagtttttagaaatagaactgctggtggaggaggaaaaatcttcctgtagaatttttcgatgggatggactcatacaaataatgtgcatcaacacagatttgaaatgacttaaaaagaaaaaacatattctgagatttatattttctgatatatagattaagtattgttggtttctaagaattctcagctcagatttaaagtcacatcctagcaagtgtctcacatgtaataaatgagttaaataaaaatatgtgttgcatatctgagctgtggcaggagcccactcataagcttctgattctttacagctccagtcagtctcagtcatcctacatcatcaggaatccacagcagaggcgcatcagccagtcacagcccgttcggggcagagatgaagaacaggatgatattgtttcagcagatgtggaagaggtgattttaattgtggtagatttaaaaagcttttattttatgagaaaagaagagtagtcagtagaaattacattaatagtagcttgagactactatatgcgtttgcatccagtttgtagatgtttattatatattctcatttgtggttatacatagtaaaattattttaataatttgtgacttactggatattaggaaattggacacaaacttgtctttaaggattaagggtggagatattctcagtgttaacagcaaagatattctgggtttttttttttttttttggagacagagtctcgctctgtcacccaagctggagtgcagtggcgtgatctcggctcactgcaacctctgcctcccgggttcaagcgattctcctgccacagcctcctgagtagctgggattacaggcgcgcaccaccacacccatctaatttttgtattttttagtagagacggggtttcactatgttggtcaggctggtctcgaactcctgacctcgtgatccacctgcctcaacctccctaagtgctgggattacaggtgtgagccaccgcgcccagccaagatattcgtaatgttagaaaaatttagtagttttgtacaatgtatttgaaagaggatactacatatttatgaggtaaattctctcctccctgcccctagtataatttttatacttctaacttgagggttctgtatatgctcagtaatgaactttgggatctgtgggtataatttttttatttttttgagatggagtcttgctctgttgccaggctggaatgcagtggtgcaatcttgcctcactacaacccccacctcccgggttcaagcaattctcctgcctccgcctcctgagtagctgagactacaggcacgcaccatgcccagctaatttttgtatttttagtagagtcggggtctcaccatgttggccaggatggtcttgatctcttgaccttgtgatccgcccatctccgtctcggcctcccagagtgttggaattacaggtgtgagccaccgtgcccggccaggatataatttttgatagcaaattgtcactaacaaatgaagattttcaaaactgcttgatatatgatttcaaattctctatagttagtggtcttcgcattttagttaactagctttgattgtctacaaataagattctggatttaggttgaggtggtggagggtgtggctggagaagaggatcatcatgatgaacaggaagaacacggggaagaaaatgctgaggcagagggacaacatgatgagcatgatgaagacggtatgcaggttatttgagaaattactcagtatgagtaaatcaggtacttttaaagggagatattaaatacagagagaaacctcatttgaatgtatagtgaaatggtcaaacttattttttgccaagggtttctgtagcatctatttagaaaatttaggcgctatatataatacatatataaaatagtttcccttttttctttttaagtcagtttcttaaaagacttttaaaaactaaaataatcatagtcgcattatgaaacatttggaaattagagaaaaggaaaataaatcacccataattacacccagatgctaatagcttgtatatttactttcagtcctcccctgcactgccctgatgtactagtctgttgactaccataatttccctagccattcttctaaggttgagtagttacttagtcttattttagtagttatcccttctctttcacaccattccccttctccccaactcctaccccctatgccttcttagttcccacccttacgatattctggcttatcagaccctgttttaaaccatagtgagtttgtgcttttttcttatttaaatgtattttttagggagtgatatggagctggacttgttagcagcagctgaaacagaaagtgatagtgaaagtaaccacagcaaccaagataatgctagtgggcgcagaagcgttgtcactgcagcaactgctggttcagaagcaggtatgttgccttatcccaactactttcttgcttatgctaaggctgtgtgtgtgtattcagcgtggattgggtcatactttgtgtgatatacgcaagggtagctaagcatttttataacttcatccttgttctctgggtattagaaaagaaagtattattttaataactctttctccagcttttctggtcattaaataatgaatgaattttaaagtttctttaaaagatttttattttcttgccttttttttttttttttttttttttaaattgggtctcattctgtcaccaggctggatattccagtggtgcagtcagagctctttgcagccttgacctcctgagctcctacctcagccccctgagtagctgggtctactaggtgcaagccaccacatcgggctaatttttttttttaaagagttgggatcttactgtgttgcccaggctggtcttgagctcctgagctcaagcagtcctcccacctcagcctcctcagttgttgggattataggcatgtgccaccacacccagctaaaagttacttattcaggaggctgaggcatacaaatagcttgaacccaggaggcagaggctgcagtgagccgacatggtgccactgcagtcctgcctgagccacagagctgggcttgaaagttattttctaataaaaactattttatggtaggttttgtggattattgaatacaatctggcattctgtttaatatgtatgttttcctgaatgagggggtacattgtaattttaattattaaactcacaatgtttttggttttaaaaataaaaattttaggagcaagcagtgttcctgccttcttttctgaagatgattctcaatcgaatgactcaagtgattctgatagcagtagtagtcagagtgacgacatagaacaggagacctttatgcttgatgagccattagaaagaaccacaaatagctcccatgccaatggtgctgcccaagctccccgttcaatgcagtgggctgtccgcaacacccagcatcagcgagcagccagtacagccccttccagtacatctacaccagcaggcaagtctgaaaacttagtattgctaagaatacttagatagattttttaaattatgcatgttcatctggggataaaattagttttatgatagttcctcattgttttgttgagtttcaaatataaaaaatatgtacatatgattatagcagggtttcccagtctttgcattattgcatctttggactgggtaattgtgggaggctgtcttgtgcattgtgggatgttaggcagcatccctagcctacacccactagatgccagtgaaacccctctcacccttcttcccctccccttggctcccacagttgtgataaccaagaatgtctgtagatactgccaaatgtgtagcccctttggcggggggaggtggcgtgggggtcagatttcccctggttgagaactttatattaattcttgtcccctccatactcctctccccaaaatagtgtggtttaggcaaagttttttgcttgggtaccacaattgaccatttagatttacgtaagtatatataatcccagagaaacacaattagcaactgacattagctcattgtggttgtcctttttccttatagcaagttcagcgggtttgatttatattgatccttcaaacttacgccggagtggtaccatcagtacaagtgctgcagctgcagcagctgctttggaagctagcaacgccagcagttacctaacatctgcaagcagtttagccagggcttacagcattgtcattagacaaatctcggacttgatgggccttattcctaagtataatcacctagtatactctcagattccagcagctgtgaaattgacttaccaagatgcagtaaacttacaggtatgaaaccactgaaaagtttcccattccactatttttttttggctgtcaattatgagaattccagtattaggggaattaaatgttagaaacgtttacatattgacatactgctgctgtatcgaatttagctctatttggatagttttaactattttagtttggtcttcatagaactatgtagaagaaaagcttattcccacttggaactggatggtcagtattatggattctactgaagctcaattacgttatggttctgcattagcatctgctggtgatcctggacatccaaatcatcctcttcacgcttctcagaattcagcgagaagagagaggatgactgcgcgagaagaagctagcttacgaacacttgaaggcagacggtatgaaattcttcatatatacagaacgtccccaacttaaaatggatcctcaacttacaattttttgtttgtttgtttgtttgtttttttgagacggagtctcacactcttacccaggctggagtgcagtggtgccgtctcggctcactgcaagctccgcctcctgggttcatgccattctcctgccccagcctcccgagtagctgggactacaggcacttgccacccacgcccggctaattttttgttttcttagtagagacggggtttcactgtgttagccatggtggtcttgatctcctgaccttgtgatctgcccaccctggcctcccaaagtgctgggattacaggcgtgagccacagcgcccgacccccaacttacattttttttttgactttgtgatgggtttattgggggtattaaatgcgtttagactttatgcgtttatgatgagtttatcaggacataaccacatcttcagtcaaggagtatctatacttgcatgtttagatagaatctttgtatcctagaaggttaaagctttttagttgctattatgtaagacctcatcttactgtgaagggagaaagaaatgacttgcttgcattacttaaattgttgaggcagaataggctagttatcatccaagctgtttttaaaaatccattcatatcgtaggaatctgatactaaagcctttttatttttgaagttattggtctatatctttgtctcattatccccaagacctccccctctcctcttaggaagttattttgactataattggttatgaatgtactttgtactcaggagggggaaagtatgtgtgattaccagtgctgctctttttttctcaaatcacatttctttttttctgcctcccctagtctgttgaattaaaataaaatatatatctatgtatttgttatgttctttctattcagttataaagtgacctttttc

SEQ ID NO: 3106 - DNA, 6000 bp, Homo sapiens
tgcttcctgcaatcacctcctaaataaacgatttacagccaaatccttctctcaagctctgcttttggggaaaccaaatctcagatatggcctatttcagggaggcagtccctcaggtctgaacactgagtaagaggggttcgttagcactccccactgcattgggtgaaactagacatcaatccctgttatcttagccccaagtacctgtcagacctgctctacttcagcttctcagtttgtatttctggaattgacacgcatcccaggggaaaagtggctccaaacagaggactcacttggggcttattcatcccttggaccctggtttggtaatccatcattattttgctagctttcttgtgccattaagcaaatttgaagaaatattttgcctaacttttctagctgtcctcaaagggagaattagttcaaattattagaaaggagctccctttaaaaaggagtctgttttctaaggttgtattgcactttgactcttcaaagagcttctgttgacccctgcttatctccattatctgtatttcttcagcccccacacatgtgatggtctttcacaactccatgcttttacttgtttttctctgttcaaagtgtgacccaccaaggtgttacagccctgggagaggaaaagtcttcctaatatgccatctgggacaacaaaaaggtagcaaagccaagatgattatcaaagaccagagaggcagtttcccaataggctgtctagaggaagcagaccaactttcaaccaggagaaaaagtctcagtcctaggaaactaggaatgggtgaatcgagttgaaagcaggataaaagcataatgaaaagacaaaggagatatttggaagaaagagaagcaaggcaaactatgggtatggtgtgatctgtttgggggcaattctaaaaagattagatttaagccaggtattctatttgctcagaacattcttgaaagctcagcttggctgggcgtggtgactcaagcctgtaatcccagcactttgggaggctgaagagggtggatcacctgaggtcaggagttcgagaccagcccggacaacatggtgaaaccctgtctctactaaaaatacaaaaaattagccgggtgttgtggcgggcacctgtaatcctagccacccaggaggctgaggcaagagaattgcttgaatctgggaggcggaggttgcagtgagccaagattgcgccactgcactccagcctgggcaacaaggttgaaactccgtctcaaaaaaaaaaaaaaaaaaaaaagaaagctcagcttgagtgacttttcttaattctcttggctggaatcacttcctccttcaacctccacattactcttcttccatttatcatataatttttttctctattggctttgaatagtctgttccttctaaattattaacttctagatggcagcagtggtatagtggaaagaacaatggaatccaagtcagaagaccggggtttcagtatcagcttcagtccttacctcaggtgtttgagccccagtgtcctcatctagataacagggatattataatttaccctatagtgtgattcaagtattaaaaggtataaggtgtaaaagttgaacatagatgggaggccgaggtgggtcgatcgcttgagcccaggagatcaagaccagcctgagcaacatggcaaaaccccgcctttacaaaaaatacaaaaattagccaggcgtggtagcctgtgcctgtagacccagctactcgggaggccagtgcaggagaattgcttgagcctgctaggtggaggttgcagtgagccgaggccatgtcactgcactccagcctgggtgatgggagtgaaatcctgcctcaaaaaaacaaaaacaaaaacaaaaacaaaaaaaaaaactggaacatagcaccagacaagtaaatgtttccatttgctgagcctactatgtatatgaactgtcctaggtgtctgacatacattatcttatttagatctcactgcaactctgtgtagatagatctattagtatggaatatttaacaaatgaggaaaaaagatgcaatgataggttaaatctaactaatttttttttaagacagattctcattctgtcgcccaggctggagtgcagtggcacaatcttggctcactgcaacctccacctcccgggttcgagcaagcaattctcctgcctcagcctctggagtagctgggactacagccacaccaacactcctggctaatttttgtatttttagtagagacagggtttcaccatgttggccaggctggtctcaaactcctgacctcaggtgatccacccacctcggcctcccaaagtgctgggattatgggcgtgagccagtgcacccggccaaatctaactaatctaaatccaagtaaggccacgtagttaagtagcagaaacaactgaaatttagatctgggctgggcgcagtggctcacgcctgtaatcccaacactttgggaggccgaggtgggtggatcacctgaggtcaggagttcgagaccaacctggccaacatggtgaaaccttgtctctactaaaaatacaaaaattacccaggcatggtggcagcgcctgtaatcccagctactcgggaggctgaggcaggagaatcacttgaacccaggaggcggaggtggcagtgagccaagatcgtgccattgcactccagcctgggcgacagagcaaagactccgtctcaaaaaaaaaaaattttttttagatctgtttggcttgaaatctagcagtgtctactggtctaccttccttcctcagggctcccagggacatctaatagtgaccttgaaatcactttttagtctaaactaatctgggccaatggttgagctggtaacctacaaaagtgttccattatctgccttgagggtaccaggtctgtcctgatttgtaagtattttttcataaattttgctcagaagaacttcctaagcaaaactgtgtgtgtgtgtgtgtaattcattaacagaccacctctgtagaaggaatgtcatgttctcagtttttgccttcgaagaggtactttattttttaaaggaggtcatagaaacctttgagaagaaagtcatgaattggttccttagggaaaaaaaaacagacttatttgattaaaaaaaatttttttttgagatggagtctcgttctgttgcccgggctggagtgcagtggcatgatctcagctcactgcaacttgccaggttcaagcaagtcttctgcctcagcttcctgagtagtggggtttacaggcgcgcacagccatgcctggctaatttttgcatttttagtagagatggggtttcaccaagttggctaggctggtctcgaactcccaacctcaggtgatccgacatcctcggccttccaaagtgctgggattacaggcgtgagccactgtgcgccgtggccaaaactctgaaagtgtcttatagtagaaactcggtataaaagatcctatctcggccaggcgtggtggctcaggcctgtaatcccagcactttgggaggccgaggcgggtggatcacctgaggtcaggagttcgagaccagcctggccaacatggtgaaaccacatctctactaaaaaagaaatacaaaattagccggacgtggtgacacatgcctgtaatcccagctactccatagactgagacaggaaaatcgcttgaacccgggaggcggaggttgaggtgagccgagaccgcgccattgcactccagcctgggcaacaagagcgaaactccgtctcggggaaaaaaaaaaaaaaaataataattttccgttctgattccactgatcataaattgaactcctttgtagaacaggtttatcatctttcatttaaaagtaataaaaaatcacgaatcatttatatcaggaaattagtggaaatttccacattttgtctttgggcatgtgatggtggtgaggaaactggggagaccgaggtaatagaagttgctgcaaagccaactccaggatcctactatctccttctggaaaggcccttacataatttccttacttttccaataaaaggctgtatatgtcttgccccttaactgattttaccaacttcaccataaatacaactgcggatgaaggatgagaagcaacaagaaacccctaaggatccgccaaataattagggctgccccaggggaatccgagcgaaagaacacaagagcccctcttcctcctcgcctcctctgggacacacacttaccctccctcccggcaggttagcccgcagcctcctccttccctaacacgtgctctccggaacactcactctggagacatcccacccccggcggggctgggctcgggagccgaacggaccaatcggcacgcgccttacagcgtcgtggcccgacaacgttgagcagcccaatcgagggggccttgccgcccgtttcccggagccccgcctctcgccgccgcgcccccgcccgccggtctcctccctcctcctcctcccgtttgcccctcccccgccgctccggagcggagcctgcgagacggagaaactggggcagaagtgaagatggcggcggcagcttctcgctagtgacgcgcggtgcgggctcatctccttcccctccttcctcacctcccctagtccggaccccgtccgccgccgggaccagaccgtccccgtagcccgcagccagcagccgcccctctcctcccccggccgcccctctcccaacgcccgtctgccgctggccggcggcgcgcccctggtcccggccgcctgcctcgcactccgcgctgtcgccgggggagcgggtggcgtgtggattcgccctcctgcccgcccctccgggccgcggacacacgcccggcagggaggcggcggcggcccctgcgtatttgcttccctccatttggggactgggaggcggcggcggctgtgggttttggggaggggtagagggctggggggcgggcgagagcgggagggggccgccctcgagtggaggacgagaaggaaagcaccatgacgtccatccatttcgtggttcacccgctgccgggcaccgaggaccagctcaatgacaggtaatagggctggcgggtcggcgggcgcggggggaggggcgcccttccctccctcccctcccccacgggccgtgccgggcgggtgcgggtgtttacgcgccggccggccagctggggtggggtgcgggggtccttactgcctcctgctaggctccttccggggcaaacttctcatcccgggggcagggggccgcggggggagcgcggtgtagacgggactcgcggtgtagactggagagcgctctgtaaacccccttccccctcccgcaaggagcggcgttgaactcggcggagatgggggggtggtttctggctcccggggggcaggcggtaattactgcccggccaaggcccgaggaatccatattagtcaaagttgaattgagacagacaatgcggatgggggatggtggaggtaaaaagagagggaagaggagaagcggggccaggggccccggggtgggctgggctgggcttgtcccgggcccccggcagctgtgtccggtggggtggtctggacctggggatcccggggtcgggttggggagagaagccgattcccggcagattgctgggagcgggcggggggtggggggaaggtgatagttgggggagggagtgagggaggaagcgccatgattattgttattattattaaatttgagcccctgcagtgaggtttgcctgccccgggaggggatggattcaagcgggggtggggaagtgcattggattccctttactctcctcctgaaatggtgctggcagctcctgctactagcccctgtggtgcgagcttttttgtttccttttctattctaatgatagtgttttcctgagttgtaatttgacagctgaaaaccgtgcgtagagtgtcaaa

SEQ ID NO: 3107 - DNA, 6000 bp, Homo sapiens
ttcaaaatgaataactgttacaatgacctgtgattctgttttgatcaaatgttttgagccttttaacatctttaacaaatattctcaaaatcaaaatcctaaattaagtctccgatttagtgtcctcgctggggcttattaaacctataaaaattaatctctgtgaggttataaaatctttgtatagcttccaggtagaccatgaactccagtatcaccacctccagcctgataattatatattggaagaaaattagttaaaggattcccttcagcccccttgaaactgcccttatcaggagttgttagctaatccttgtgctcagttaataacctgttgcaggcccttgactcctgggcacacatgtctaaagaaggcactgacttccaccagtatctgacaaaaactcaagttaactgaaggctcgtctttagacctgggcaaaggggacaacgtaaactgctttcatgagacacaaggacaggcctgtattccaaaacattatgattcatttcataattttgcctttatctgaaataatataatttgttctatgcctttatactaaataatttaaatgtttaacttatttcctggcattctcaaaattagatagggcttatgaccttttctttaaaatgttgttaattctttatgttttcttttacctccaaaatttactcccaccaggcccagggagtgtcataagtgttttcagggccagttttgaggaataaaatgagtgcaaaccttccaaataaaggacaggcacacaaatgcctaaatggctgaacaaagtgcttgtgttttgtgtagctaattgccgcaaaccatgatgacagtagctcatacacagaatgtataaagaagccaattttgtaaccttgccttttggcttttgatttttggttctcatgttgctgaagggggtttaagattaatgagtgcctgcccacctacattcccatctggcctagagtacttcattggctctaagtcttttgactcaaagtcccttggccacaggaattccaccaaggggcatgatggacccagggcaggttgcccaccactcccactccagtgtccacatgggacaaaatagaagcatggctgttgacactgcctctggcataccttgacaaaaaaggaggaaaataaacgtaaataaataaataaaatcctaagcacccccatccccagcagaatggggcccccttaggccaaaaacctgaaaaactagtttaggccaggaggggaagtggagctggtagtcagagggcggggaaggcatggacaagcctcactatacctttcccccaccttggaattcaggcacaactgaccagcattaaaattaaaagaggtcataagactgacaaaacagactggatcgaagaccctgccaggcagggatgaagtttgcaccccagggtagacagaggtgtaagttacaggaacgttttaaaatatgtttgcgtcaggaccaccttcatgaatattcatagctcctctgttcaaccagaagacttcatcttattaaaaacctggaaagaaggatcctctgaggatcagttacagccaagatggaggggctcatcaggtattgttaagcacccccattgccgttaaacttcaaggactcactagctggatacacctgtctaagattaagcccgtttcttatgagtccccacaggcacctgagaaagacactatggccaacacctgtgaactcttagaatacctaaagctgttgttttggaaataaacagataactagcatccttagtccctccctcctactcagcctccttaacaactctcatcccatacaggtttgcacccccagtggatacctatggtcatgtggtcacctattcaatcagcatataaatagcttatctctcatttgggaccatgaactcaatggttaccagcatattgataacatttggttcaggggtcaatgtacaacaccctataatgtacaattatataccatcacttacctgagagctaagtgggcaattcgccttatattggctggggttgaggctgccattggcttacccaccccatggggaaaatttgcctattatgaggcaactcttcaaaactttacttcttcattctacgcactgtctcataaaacaggagacactttagaaacattaaaactctcccttgattcctttgcagatataataattgatgacagattagcacgagagtattatacttattggttgaacaaggagtatgcactataagtaataaaacctgctgcacttacgtaaacacctcaggtcaaatagaagaagatgaacgtaaaatatatgagcgagctgcccagttgcataaatacaaccaaggctgtgatcctaactatagctggtcaacaataaaaagcaccctcctgagtctcacttggtttttgcccttcctaggacctttgatatttatctcattattagtaatctttcgcctttgcttgtttaacttaatggtaaagtttgtgtcttctagattacaacaattccacataaagattattctggcaacccatcccgtcttctgaccttggaaataaagacatcctgcctcaggccccttagatcaggcatccagagatttttacacctccaatactaggcaaagcataagcccatagaatcatcagtcaggctggagttagaacgtatatgactatgtgatcgtaaaccccagacacaaaaaccacttgcaagtggtcatgagtcatcctcaccctgggaagcgaacagaaaccatcactggagggggacataccctccactcagacccccagcctctggtttactaatgacaaatacagatatgccacagataaccagaggcacagaagtgattaagcccccaggagcaaaggcagaagaaacaaagtctccaagttagactcccaaggaattcccatataggaatgattggaggcaaatgtaaacatacagccttgaaaagtcaggaaaaaatcaggtcacttccacttctacatgggatgcagtaggttgtggctgctcagaatgtgacaaccgggcaaatcaatccacagagttaaaagtcacatttgaaaggcccttggacagatgtggaagcaccaaggcctgcatgaactgaaattccgcagagggcgagcccttcccagggtaccctttgtcattgcagatacatttgtcactttgggcaccagctgaaagccaggctggctacagacagggactccggtagggaatgcaaaccagagtgccgtcttggctcacggggaaccaaagtggcccagaatctccaggtacctaaagatcaagacagttttcccatggaagagcctccaagtgctgtggtgggagggaccctggggagtcagagaaggccaagtagaatcccccccagtgtggcagatcccaggagacagagtgcccctagaaggagcctgccacagtcataccactggtctccatcataagccagtggccccgatggaacaggtgtgtgggatgaggttcaaggggaaagtcaaagcctagaaagggaaacccgtccgagctgaggattcggtgtgaaaggtgagcatacaaattgggtcacccttgtcacacccaactaaggcagagtgccaggtagggagaccattcagcactcaggatagaaaacattgctccaagaatgtacttctctgaggcctgactgctgaaactgtctgcggtaacctgaaaccagttttatctgatggctactgagaccacctgctgcaactctaagcctcggttcacccactgccgtcactgattcactcatcaaccagagcttgccagctccccaaaatcctactagtgccaatgaaactcagacagcaatatgtactatttctcttctttataaaaaagagacatagttcctttttttttgagacagagacttgatttgtcctgcaggttggagcacaatggcacgatctcggctcactacaacctccacctcctgggatcaagggattctcctgcctcagcctcctgagtagctgggactacaggcacacaccaccacacccagctaatttttgtatttttagtagagacggggtttcaccatgttgatcactctggtcttgaactcctgacctcaaatgatctgcccgcctcagcctcccaaaatgctgggattacaggtgtaagccaccgcgaatttaaaaaagccttttctttgttctttggacatactgaaggccagccagtctgcccccgtgcccctaattgcagttatttcctcccaaataaaacatttcaatttcagaaattcacctattttatatgacttcgacaagagccaagccacactgtgtaggagatgctcgggtgaagccagctgtccctggccacacacagcttgaaggcaaaatggcaggagctcaagcgaaagccaggcaggtctccccctgaaacctctgcacaggtgggcgctggcggggctgaagggcaagggcaccgctcaagctggctttggtcagggttagggacagggccggctccagaggcgacggggtcgcaccctgagcggaggggctcccggggtccccaggggttatggtgatggcgggaccccctagagggagggtccaggaacgaggcaggtggactgggaccttgagggcagggtgggcctgggcggtgccaacaggctgccgagggtggctgctgtcccgtttctccagcagccagggccgtgcgcttctagaacattccccgtggctttcctaaagggagcgtggatggagccagggtgtgcagatttctgtgagaaatattttcacctgggagccccaagggggaccctgcccacctttgaacactggcagatgggctggaggcctggagcctggggacggggctttgagggtccggaaggagggcggggctgtgcggccggcggaggcccccgaaagttccagaaagcgggtggggaggtcggcgcgggaggctcagatggctggaggcggcgggcacgcacactgcggggctccgaggggcacaggtcagtttcctgaggcgggtcgggacccaggcgtgagactggagtctgcccaggggcccagctgaggcagcctcctcgtcagctgcttgggccgccaggacgccgccgggggtgcgccgcgcttccctggatggggtgcccccactcccctcggagccccagggagaccccccgaactcagctcctctcaggggtgccagggggacccctcaaaactccactccccgcaggttcctggggagacgccccctgctccattcccctcagggtcccagggagaccccctaattcagctcctctcaggggtactgggggacctctcgagctccactcccatcagggtcccagggagaccccccaactatgctcaggggtcccagggagatgccagcaccccaactccgcttccctggggcccccctccccttacagctcaacttccctcgagagtctggggctggggctccgttcagttcttgagtccccttccctcggggtgtcccggggccgcccacccccacactgtctgtgattccccaaggcgcgggtctcgggccgcagcctgttccacgttctgctgctcgttcttttctggctccttgctttcgaaggagagaaggaggccttcgtttccagtctttttgccttttctaatggagccctgcttttccttccgtgtcccttcaggctacttctgccaggtttctatttttcattctttattatgactttgcccaaaatattcttgacttctattgagaaggatttgggggtctatttcttatttggaggtgtgttcttaagttccaaacagatgaggattttccagttaatccttctggggtgacttattgcttaatgccaccatagtcagaaaatggactctcagtgtccgaaactgcattcggctctgaagtgtctgtccttgtcac

SEQ ID NO: 3108 - DNA, 6000 bp, Homo sapiens
cggcccggaacagggggcggggccgggactccgcgtgcccccgccggtcgcctacgagatccactgctagggccgcgggcgcgcggatgacgtgggcgccggagattggccggtgcggcctcgcgcatgctccgtcagtaaaggtggaagccgcgcagtgtgcgctgagccgtgtgtggggcgcgagccgggaacgttgcactcgggaatcctggggtagcaatggaaggtggccggggaggccccaacacctcccttgaagctcttccgaaaagacatcaccccaacctccagctctgcatggggggggtccctcgctggccctggccggccacagtaggatcttgggcctccgaaaggtgggaagagcaaggactggccggcagtgccgacggggctgccccgcgaagggcggggcgacaggctggatggcagttgttgccgggtggccatgttgggggtgacagcagagataaggataagggtgaccaacgtggacagaaaaaaaaacagccacaaattcaacttccaggcacatgtgtaccttgatgaccccctccagcccgagcccagcccagtggggtggctgggtggcagggtagggaacacgtaagaggcgtgagtgcctggggactcccagcttccctgaagcaggcctctgtccaacttcaaccccagaagcactgagctctcagtaaagggagaggaaaggcccagagaggccatcatctctctcagctcacaactggaatcccaaagcatttgcacaaaggaccaggaccccagacggcagccaaatgcagccaaactgagcagggcaatggaggcctgacatccagccccggggcccacagatgatcagccaattatggagcaagtgcagggaaaaccgcgtggggcactgcagaaagcaggggaggcttgaggtgtgcccagaagcaaggtagacccagcaggaaaccagtaaccagtgcttttgtgaaggcctccaccaggggtcccagcaaaggccctgcctacctaaagagactgcagggcggcctgtgtctcacccagagctacttcatcataggctgaagtagtccgcagccagtcgcccgtagatgtccgtggtccagagcacatgggcacggcctgaggctagaagcagctggtgcaactcagcttctacgcgggcaaacttctcctcattgatggaggcctccagcaggacagaggcaggcggcggccagggcaagccctcatagcagtccacagggaaggggtgcaccacagtacgcagctcagcctgtgccactgagtcccgcagcagctccttgaggcccgccatggacagtgggttgccatagaggccaaggtaccggagactggcgcactgagtcaggatgggtagtgtggccaacagctgggtgtctgcgagctgacactcagtcagctccagatgcaacagtgtggctgctgatgcctgcaacagaccctggaagggtgccagctggctgccagacaggtcgttaccactcaggtccaacttcttgaggtgggcagcatgtgggctccgtgccaggaagcgtaggtcctcaggcagcagagcacagaaggccaactccaggctctccagggggctctgcagggtgctacaggggacacaggggtcacagacaggcagagccagggagggtccctacagaagggaggggcagggcagtggtggggcccgctcacctgagcagctggtccagcctccctgaaaggagagaggagcccatgctgagctcacgcagacaggtgaagcggcccatctgggcaaggaagtagcggaagttgtcctcgccatccacggagggctgccttgaatccccatgcacatagtggagccgcaggctggccaggtgctggaagcgggccacgtgtgggatgatcacagacaggccgcgcaggcccagattgttgaagcgcaggtccacgcggcgcaggcagcctgcatccagaagctgcagcagggccacagtgttgcgcatgggcaggtcctcagctcgcaggtcccggcagcagagccgcagcgggctgcccacgctgcttcggagtgcctcccgcaggaacgcataggaggcccggttcacccgcaggtccacgcgcacctccacggggatgggggctggcccaggctctgcggccccaccctgctgctgggcaatgcatgtgcgagctacggcagcagtacagtcccacatgctcatggtgccaggatcctgttccacaccatcatccaagaggcccgtcatgtccagcacccgcagcgcatgcttcctgggagtaggaatggtgtgaggaaggggtggaggggcagcgcccataccccctcccagccaccttgggacaggagcaacgcgcctgctcctgcatgagctcttgctaactttatgacccaagcctcctcaggggacccacttacacacccctggcctgacgaccctccagataagtccatacctgcagaggggctgtgtgctggccccaggctctgaggtgtggagccgggcagtcagccccaggataacagcctgcatgctctcagtgctaggccgctcctgcaggagggcacggctgcagtgggcacactcctgtagcagctgctggaaactgagcagcgggaagggccacgtgtgtaccaactcgcgcagtaccactgtcttcttgtccatgaaggccaccttgaacagcagggggaagagttcgcgtggcagcaagggcagggcctggcaggcagctggctggcactgcagcacctgccgtgtgctcaagaacacaagcgtgtgcatggtgctgggccgggcagacggccacctgcaggagagggacttcagcagggaggagagaccctaggccactaccaagccacacacaagtggtaggaaggcccagcatagtgcctgaaacaaagtcagcagttagcagtggccatggcacagagaagcacctattagatgcctagcgctgggctgggtgcagtgaactggcagacaaactcacaactcagccccagccctccagatgcacaggatctctttagagaaactaagcgtcaagcagtgtggcatcgtcaacaactcgcttgcttgggtatgcttttgacagatgcctgttgccttgcagggccccccatgggtacttcaggcctctcaaattacaaagctgcttcacaaaaccttcttcgaaacctgaataaagcccaggactctccccaccaaccttcatcagcattagtattgacgggacactctaaggagtcaagcagccaaatcacctttccctcccctctcctcacagatgctctccagggctacacttggactccacaaaacaccaaagagctggaagcacagaagcagcttcataagcaacaaggcaggttgaaaagaccgagacccagggaacaccgagtccagatgatgtagcctataaaatacaagcccccgcaaaagctactattctccagagcgtcaccaagcacggagaccccgaaagaaagcaaccctcacctttgttggcccttaccactggcctaaacctctccctcttccctggagagccactgtggaaagaccaagtcttaagtatgtgggattcagaaggtgcaaagctacagactgctcagacaaggcaaagaaagctgcctcagcagcacccaagctgcagagatgcacaaacactcccaaggccacaaggtacctgtgacacagggtgccagccctgctgctgcctgtagcatcctcaaaactaaatcgcagccatctccctgtgacagattagaaaatgaaggcctcggcctggcccaaggtcacagcctgagtgacaagccagggaagggggccggggaagacactctggccccaaggcccttctttttgtcgacttttccacatacaagtaagtccttaaggcaccggttcctgaaaagtcccagacaccaaccctcggcctagttctgccggtggacagatctcaacgatcatactcgctctgacaggacagaccaaccgagcacttgtcacgggagaacaccaaagcagacggcctgcccaccaagggaggcaggcacctccgtgcgacgccccctcccctcccgccggccgcagggaacgcgacggtcctcggtcgcctgcgtttcgcgaagacgcccccgcccggctcctccgggcctcgagccgcgggaggcgctggaccctccgctctttcgcctcccgagcggggcctgctcctccaggtcggatgcgtctcccaccagggcctgacgccgctccgaccggcccggggactcccagtccttcccggcccgcggtggcacctcccaggctcccggcctcggccccgggctcccaaatgcagccactgcctccctcggccaggccgccccgagcgaccggtgccccgccccttgaggccaggcagggccaggggcgtgcgccgccccgctcagacacccccccggccgcccgcgctcaccggtcccgcaaccgcagccaccgcctccagccccgcctagaccgtccgccgctccccgcccggcgccgcggcgccccgcgatgacgttgacgcctcccattggctgcttgtccgaggcccgacggactggctgcccaggggcggtggccccgcccccggcccgccgcgcatccgcattggctgtcggcccccgcgacggctgcgcgggagattcgctggacgatcgcaagcgcggaggccgggcgggcgcgcgcgccatggagcggctgcgggacgtgcgggagcggctgcaggcgtgggagcgcgcgttccgacggcagcgcgggcggcgaccgagccaggtgcgggctgcccaggggccgaggggctgagggcgcggcccgcggctgacgcgttccctttacaggacgacgtggaggcggcgccggaggagacccgcggtgagcgcgcggcggggcggcgggggcgagaagacaccgggtcggcaggggcccaggccccaccctgaccccgcctcccgctcgcccacgcagcgctctaccgggaataccgcactctgaagcgtaccacgggccaggccggcggcgggctccgcagctccgagtcgctccccgcggcggccgaagaggtacccaggccccgccgccccagcctcctcccacttccctgtttggcggagtggcgggagccacggagtcgcggccaggccgccgtggggcacagaacttgggagggggactgggcaaagtgaagaagggccgggcctcgctccaggtgcgggaggggtggctgggagcgcttctgccgccacaacagccttttctggcctgtgcccctgttgtctcctgcaggcgccagagccccgctgctgggggccccatctgaatcgggctgcgaccaagagtccacagtctacgccagggcggagccgccagggctcggtgccggactacgggcagcggctcaaggccaatctgaaaggcaccctgcaggtgaggagtgggcaggcagtgagtccacgctaggtccacagctgcttccggtccgggtcgccctcttgtcattttttccacacagacaggcacgggcccctgtgccaaccagggcacgagtcttcagggagcttctcggggccttcgcccttgactccctttctagtccagccttgtgctaattagcctgctctacaattgagcgtggggactcaggtaggttttagagtctacagtagctcaggggcctgagttcctcctgctgttctgttgttcccctcccaggccggaccagccctgggccgcagaccgtggcctctaggaagagcctcatctaaggcatccaccccaaagcccccaggtacagggcctgtcccctcctttgcagaaaaagtcagtgatgagcctccacagctccctgagccccagccaaggccaggccggctccagcatctgcaggcatccctgagccagcggctgggctccctagatcctggctggttac

SEQ ID NO: 3109 - DNA, 6000 bp, Homo sapiens
cctggtgcaggtgcaggtgcaggctgggaacacgcgctgtaccagcctcttcacagccaggaagtccgtgctgtcggcgtgcacatgtctgcgcagctctcgcaggtcttcgccctgcagggcaactttcatgagggtggggtggaccactgggggctcgagcactggcagtgtggggggggggggtgccaacctggggctgcaggaagaggtggcagtgggcaggctgcccgtcacgcccggcccggcccacggcctgcacgtagctctcgaagcttgggggcagccccagatgcagcacagcccgcacatctggccggtccagccccatcccaaaggccaccgtggccaccaccacccggcaactggccctgcatgaaggctcgctgtacccgccgccgttcccggctgcacatgcccgcgtggtaggcctcggctgtggttttgggggcacgacctttggggaagacaggcagatggtcagtgggatgggaccatgtgtgcccaaggtgggtccacggggacaccagctctgtccatgccgcacctccagaccctgggacccaggctgcgtgcaggcaggttcggaggagcgcagcgatccgctctgtgtcctcgcgccggttgcagtaaatgataatggaatcgaggttttgaaaacgtttgccttgcagcagcgtcaacagtgcctgatgaggagcggttggcgtgggcagtggggagtgaggaggggtcggcgtgtgcagtggggagtgaggaggggtcggcgtggggagtgaggaggggtcggcgtgggcggtggggagtgagaaggggtcggcgtgggcggtggggagtgaggaggggtcggcgtgggcagtcagcagccagggccctgcagggtccccagagcacacacacccacctggtctgtgtccctgtccatggacacggaaaggtgcaggttggtgggaactggggctggcccgtggaggtcaggctcttcagccacagccaggtgctgtgccacgtcactggcagtgcggcgtgtggctgtggctgtgaggcccaggaagcagtgcacgcccatgcgctcccgaagcacctgcaccagaggcggcagtggtgtgaggccgcccagcccatcccggccctggccgcccaccccagttcacatatggctcaccttgcagacgcgcaggtagcagggccggaagttgtgggaccactgggagaggcagtgggcctcatcaatgcaggcaaaagcaactggaggcagctgtgcggctggagggaggcctcccgcccccaccagtgcctcaggtgtcagcatcagcacgtgtacctgggctgcccgaatctgaaggcagcaagatcagaggcacagcccaggtgcccgcccgctgcctccctcacccctaggcccatgaggcccccaccttctgcaggacagattcccgttgcttcctggtcatgcccgagtgtatgcaggccgccttgagacacggtggcaggccagacacctgcaaatgcaggagcgacagccgtcatacgccagcccagccctggcccttccccaagtcatcccagagctgctgccatgtccatcctagtccctcaggggagaggagaaccaggtcctgggtcctagggctaagggtttagagccacctgtgggccttggcccaggagccccagagcagacagactgaagtagggatggctcctttcccagcacatttcccgtaggggtggctgtggtgcctgtggagctgggctgcctttgacctgctgccaagactgggactgaggccacagacaccttgaagctcccaggggagggggtggttaggggacaagcagcagttgcccttgggagtcacaagtgctggttcttggctgtgtacgtgtgcccagggccctgtgtgcacacctggtcatccatgagtgacagcaggggagagacgaccaacgtgaggcaggggctgcgccggctgtagagcagcgctgggagctggtagcacagggacttgccggcacctgtaggcagcaccagcagcgtggagatgcctggatggggcgggagtcagcagcagggttctgcagcctggcctcagcccagcctcagccctggcagccacgctcaccagacaggatccgcatgactgcacgctcctgcccagggcgaaaggcttggtgccccagctgctccagggcctggaacacctcagccggcgtctctgcagacacagatgttgatcaccatgacttgagtcaccccaacccctcagtgaaggctctgggccagaagctgactgctcacctgccaactgccctgagggccccagggagtagagtggcagcacggtggggtccaggctgggcacctcaggtacaggttgtggtgaaggaaccagtggctcaggcccaacagcatctgtgtcttcctcacttgctggggcaggcaggagagggtagaatgggagctccaggtcgggcaagacaaccactggccacaacctctccttcccccaaagggggttggcagcaggcagtgcccttcctctgggctactttttccaaagcagaaaagagtgacagccatcgtcgtccctgccaccctccttcaggggagctagggtagggcctggaccaggggtacctggaaggcctgttgcttggaacataagtgtcccccaaaagagcactgcgccctctccacagtgttggccggacccaccctccagggcagatgtctcacctggccggggacactgggctgcccagtgatcgaactgctcgttcaggaaacaagactccttggttgtgactgtggcaccaccacccccaaaacactcccctttcttccgccacttctgcttccatgcctggggggtgcccacataggagggtcactgggcgggaaatacgggagggctgaggggagggaaagggaatgcctgtcctggcccgtcgctgtcttacctgcttgcggaggagcctgctacggagtgcccggccccgcacgtagtgtttctgcttcatgttgagccgtacgtaattgcccctgtcatggcgggccagccgagggaagatgtgcaggggggctgtgccctcagccttcccagccctagcttgactggaggggctgagtccgtggtacctggggttcgatgggctgctgcagggctgaggtggctgtgcctgtacaggttcccctggagggtcttcctcaactgctacagccccagccccctccgatgggggtccagcttggctgctctcctgctggacctgtgcggggctctcccagggctcctcgttccatctccgcttctcgcctccactgctgctgggctgggggctccccacacggatgctgacttcttggaaggctgaagcctctgggccctgggagccagcaccaggaccaaggacagccgactcaccagggatcagaagttgtgattcctctgagcctagatcaggcctgcaggctttgggggcccccagaaaatctgggacctcactgtgacatcgctgtaaccagccaggatctagggagcccagccgctggctcagggatgcctgcagatgctggagccggcctggccttggctggggctcagggagctgtggaggctcatcactgactttttctgcaaaggaggggacaggccctgtacctgggggctttggggtggatgccttagatgaggctcttcctagaggccacggtctgcggcccagggctggtccggcctgggaggggaacaacagaacagcaggaggaactcaggcccctgagctactgtagactctaaaacctacctgagtccccacgctcaattgtagagcaggctaattagcacaaggctggactagaaagggagtcaagggcgaaggccccgagaagctccctgaagactcgtgccctggttggcacaggggcccgtgcctgtctgtgtggaaaaaatgacaagagggcgacccggaccggaagcagctgtggacctagcgtggactcactgcctgcccactcctcacctgcagggtgcctttcagattggccttgagccgctgcccgtagtccggcaccgagccctggcggctccgccctggcgtagactgtggactcttggtcgcagcccgattcagatggggcccccagcagcggggctctggcgcctgcaggagacaacaggggcacaggccagaaaaggctgttgtggcggcagaagcgctcccagccacccctcccgcacctggagcgaggcccggcccttcttcactttgcccagtccccctcccaagttctgtgccccacggcggcctggccgcgactccgtggctcccgccactccgccaaacagggaagtgggaggaggctggggcggcggggcctgggtacctcttcggccgccgcggggagcgactcggagctgcggagcccgccgccggcctggcccgtggtacgcttcagagtgcggtattcccggtagagcgctgcgtgggcgagcgggaggcggggtcagggtggggcctgggcccctgccgacccggtgtcttctcgcccccgccgccccgccgcgcgctcaccgcgggtctcctccggcgccgcctccacgtcgtcctgtaaagggaacgcgtcagccgcgggccgcgccctcagcccctcggcccctgggcagcccgcacctggctcggtcgccgcccgcgctgccgtcggaacgcgcgctcccacgcctgcagccgctcccgcacgtcccgcagccgctccatggcgcgcgcgcccgcccggcctccgcgcttgcgatcgtccagcgaatctcccgcgcagccgtcgcgggggccgacagccaatgcggatgcgcggcgggccgggggcggggccaccgcccctgggcagccagtccgtcgggcctcggacaagcagccaatgggaggcgtcaacgtcatcgcggggcgccgcggcgccgggcggggagcggcggacggtctaggcggggctggaggcggtggctgcggttgcgggaccggtgagcgcgggcggccgggggggtgtctgagcggggcggcgcacgcccctggccctgcctggcctcaaggggcggggcaccggtcgctcggggcggcctggccgagggaggcagtggctgcatttgggagcccggggccgaggccgggagcctgggaggtgccaccgcgggccgggaaggactgggagtccccgggccggtcggagcggcgtcaggccctggtgggagacgcatccgacctggaggagcaggccccgctcgggaggcgaaagagcggagggtccagcgcctcccgcggctcgaggcccggaggagccgggcgggggcgtcttcgcgaaacgcaggcgaccgaggaccgtcgcgttccctgcggccggcgggaggggagggggcgtcgcacggaggtgcctgcctcccttggtgggcaggccgtctgctttggtgttctcccgtgacaagtgctcggttggtctgtcctgtcagagcgagtatgatcgttgagatctgtccaccggcagaactaggccgagggttggtgtctgggacttttcaggaaccggtgccttaaggacttacttgtatgtggaaaagtcgacaaaaagaagggccttggggccagagtgtcttccccggcccccttccctggcttgtcactcaggctgtgaccttgggccaggccgaggccttcattttctaatctgtcacagggagatggctgcgatttagttttgaggatgctacaggcagcagcagggctggcaccctgtgtcacaggtaccttgtggccttgggagtgtttgtgcatctctgcagcttgggtgctgctgaggcagctttctttgccttgtctgagcagtctgtagctttgcaccttctgaatcccacatacttaagacttggtctttccacagtggctctccagggaagagggagaggtttaggccagtggtaagggccaacaaaggtgagggttgctttcttt

SEQ ID NO: 3110 - DNA, 6000 bp, Homo sapiens
taagggccttaggatttctgaaatggtaaatgagcgttggcttcagtttaaagtctccatctgcattagtccctaacaagacagcctgtccttgaagctttgaagtcaggcattgacttctctctacctgtgaaagtcctagatggcattttcttccagtagcatcaaagatcaaagatcactgatcacagatcattgtaacagatataataataacgaaaaagtttgaaatattgtgagaattactaaaatgtgacacagagacctgaagtgagcacatgctgttggaaaaatggcactgaaagacttgcttgacacagatttgccacaaactgtcaatttgtaaaaaatgcaatatctttcaaatgtaatagagcagagcacaaagcaggtatgccagtatgtatgtgtttcttggggaagagaggagagagagggatgggcaagtgggactagttctgtgaagaggaacgggaggtgaaatacataagcactgtggagttacagtatgatgagcttaacttcaggcctgagggacttgagatggatcagggcagggcaagtttccaggactgtggtggatattatggtagccccccagccacgtggagttatttaactattaagtaaaaaatgtagtttctctgttgtactagctacattttagatgctcgattgtcacgtggtgggtaatttattggacagttcaggtttagaacatttccgtcattgcagaaaattctattggacagcactatttgaggttacctgatttctggccttgtgtggtctatcagatcacttgagttctttaaggaataatcagaatttctttctgacggatcccctcaactctagaatgaaagatatagagctgggccgggcgcggtggctcacgcctgtaatcccagcactttgggaggccgaggtgggcggatcgcctgacatcaggagttcgagaccagcctggccaacatggtgaaaccccgtctctattaaaaatacaaaaagtagtcaggtgtggtaatgcacccctgtaatcccagctgctcaggaggctgaggcaggagaattgcttgaacccatgaggtggagtttgcagtgagctgagattgcgccactgcattccagcctgggcaacagcaaaactctgtctcaaaaaaaaaaaaaaaaaaagatatagaggtgaaaaatagagaattgggatttatccacctagatgtgagaatggatgggattgcccaaagagaggaacagagcattccatcgtaagaagagccatagaaggaagggagagagaaggcaggaaagaaaactgggataattattactctcatgcagagagtaaatagcatttgataattcacttgtaaatatttattgtatgcccgctgtatgccaagtgttagattaggtgctacagatatattgataagcgaaaatggacatgacctctattgtcatagttttcagtttatggagttttactggagggactgggttgaagattcaggaacacccatccttctgcacttgccatattgtaaaacactccatttctaaaagttggaattggaggctgaaacgggtgaagttactatttaaggttggttacataactgttgtgcagtcactacttcagcttctcaggaagtagtaaaaaggaacaccataacttgagaactttgggggaataaagtatctgtattgatggagggcagaaagggtagttcttattatcctgcatctgccagccatgctctctgctgctcactggattcctctcttgccctgctctcaaaatctgttctcttctggcttctcttattgtcagtatgagtagtcagtcaccacatatttcccaatgcctagtgaagacatatttcacttctcagtctgttacctgctcattcatctgtttccagcaagtgcaaacagatgccccttggaacgcatagcatttaaaagtgggacctgcccataacaccatcatcatttgaggctccaggtttaggattttagatttatagctgactcttcgtgcacctgcatcagctccttcacagagacttgctgaactgcctttttgacctctctggctcacgttatattaacagcctcctcactaatctctgactctggatttctccatgctagactgcctacacacagctgttaagtgttctttggatgctgttgttttatcttactgtgaagctcaaaacctggcagttgtctcctcttgattatggtaaatgtaaacttttcagcctagtattctttcaacacctctgtctttttttgtgactctccgaggcagctcctctggttcagccaactaagtctgcttttaccccgacctatggcttgccattgccgaaatctgtgttgtcacttgtgctttttaaaatggaatggcccctcccactccatttcttctttatcagtccccttggctcctagccatctctaaccaggaggtttctggaagcctgtactggctaatacaggactttttacctccttagtactcatatactcgcactaatcttattcatttgaatttgcatctcctcagctgtcatttgctcactttgccttgcattgtcttgtctttgcagatggtaatgaaactgatttttaaaaatcgggtttcttttttctttgcttatggacatgaaacttgtgcagagggcatatgtgctgccttgactataggcaggtttccgggagaggcatgttagaggcttgagcactgataagagtctggagtctagagaggcaatctctctctgcccataattccctgtttcacctcattgggtgatctcatcctctctctctttgcctcagcctctgtgacatgttgatgcctctcaaatatatgcatttagtccattcccctctcttgagcttcatacccacatatcacagcttgagtcttggatcttccacaggcaacttaaaataattacatttcaatatgaaattggtccttctctcttcactttcctttttatccccaaattatgtctccttgtgtatttttcatttttgttaatgggcatcttccaaatttgaagtctttggtgagtgtctcgcctttttttttttttcttgagatggagccttgccctatcgcccaggctggaatacaatggtgcgatctctgctcactgcaacctccgcctcctgggttcaagcaattttcctgcctcagcctcccgagtaggtgggaggcacctgccaccacacctggctaatttttgtatttttagtagagatagggttttaccacgttggctaggctggtcacaaactcctgacctcgtgatccgcctgccttgggctcccaaagtgctgggattacaggcctgagacaccgcacctggccagtgtgtccttttattcctttgtcattccccaaatgtcatcagtaattaagtatgtcttccagatttctcctggctcttcttgctctccatcccctttgcttcggccattgttgaggtctcatctctcttctgaatttcttgtctctttctcttttactgatagtccacatggccataagggttgtttttcaaaagaatatcagcacttccattgttttgcgcgttgcgtattgcacaaaattgtcacattcacactttagaaattgtaggtttgcggccgggcacggtggctcatgcctgtaatcccagcactttgggaggccgaggcaggcggatcacctgaggccaggaggtcgagaccagactgaccaacatggagaaacctagtctctactaaaaatataaaattagctgactgtggtgacacatgcccataatcccagctactcgggaggctgaggcaggagaatcgcttgaacccaggaggcagaggttgcagtgagccaagattgtgccattgcactccagcctgggcaacaagagtgaagctccgtctcagaaaaaaaaaaaagtaaagaaattgtagatttgcatatttattatgactgtctcctggcagatgggagtgaaatatattgttctaacatcagtatgtcatgacagggaaggaaaacctatgacacataaagacacctaagcactagagaacatcttttttatgtccttagttctctggcaggcaaactccttctcatcctttaaaaccgcacattaatatcccttcctcgtgaagccttttaaaatattctccacaagagtcagtcagtccttttactgggctaatgccatatttggttactctcttcttgtagtgtttatcacattatattgtatatattggtatatgattctgtctgtcctactgcactccaggctcctcaaggacagggacaatgtccctgttttattcatcctttgactttcaatatgtagcctaatgtccagcacatatcaatacatgtgtaacaggccaggtgtgatggcttatgcttgtaatcccagcactttgggaggcagaggcgggtggatcacctgaggtcagaagtttgagaccagcctggccaacatggtgaaaccctgtctccactaaaaatacaaaaattagccaggtgtggtggcgggtgcctgtaatcccagctactcaggaggctaaggcaggagaattgcttgaacccggaaggtggaggttgccgtgagccgagattgtgccactgcgtgccagcctgggggacacagcgagactctgtctcaaaataaataaaataaataaataaataaatgtgtaataaatatttgattgcctagcatgattcaggcagggaggtaaatacttactcacattatctcatttaattttcacaacagcctcctgagtcccatcattatcatggtttataggtgaggaaattgagactagggtggtgaagtcacttgcctcaagatgaacagctggtagatcacatgcgtggtggcaccgggtgtggccctggaggactcgtgctagtggatctgtttttctagtgattcttttgttttgtcccttagagtgatgatgcgggtgtgctggttggtgagacaggacagccggcaccagcgaatcagacttccacatttggaagcagttgtgattgggcgtggcccagagaccaagatcactgataagaaatgttctcgacagcaaggtaactggtcatagaaatgtggagattactatggttatgtgggatagtgataaccaaagatgcatattttctgggtgatcttgatggaaaatctattgtctgccaaaaatacagctcaggaactgagctcttttagccaacaccagggccctatttattcctgattctgccctcccaatgtgataatgttcaaggcagggtgggtgaaggttgggagcagtcaagttcatactgttaccatgggatggtggaattgagtcctgccctcctttccccagggacattgctcaatgggcagcaagatgtaaactctggagtctacaggtgaaaccatgtctttctgagaagtaatggggtagtgccgtcctttacatattgcttcacgcaaagtattatgagacagtggcatctagcacttgtcttagggtttaataacatgaaagtccttgccctcagaaaaaaatccttaccatgtaccttgttttttcctgtaaacatgcacactgctggctggagtgtgacccccccacagcaaggtttcccaagggttctgaacttagagagttggcatctgcagcactgattatgatctttcctatatgagttaatctaagtggagggatacaaagccatgcttgagctgagtaggcccaagatgcagaagcagtggctgcttctctctctgttcccttcctcacaacagcaactgaaggggcatgtatgtggcaccctgtcctctctggggagcagctatggtggttcttctttcctccctgtctcaactccagataccttgttcatttatcagaacaggaatgcttaatgttaccacttctcacacatgctcagattgttctgtctct

SEQ ID NO: 3111 - DNA, 6000 bp, Homo sapiens
agatgggcctagcagaaaattcagaaacctaattcaaccaaagaatttttgccagtgtgttgtacttgagaaaaattataaactatacttttacctccgagatagggattgttccttctgccaaaatgcctttgaataactgcaatatgattcttagggaactttctggaattgctgtaaaaaatcagtacacgcatcttatccctgcatcttgctttttttctcccggattgcccctcagttcatttagtgtacacagcactacaaaaaacaggtttccctgcctcttaccgctccattctttcctccctgcacaaaggagaaagcggactgtagtttaaaaagcaagtagcagtgctacagcaggttgtctgcagcaggagagatggccttaaaggttgtgaacgtctccttatggagtatcgagaagctgcacagccacctagaaacgtccacagagggattgggtctgaaatgtcacccaattcagagactgtgaggcagtgacaggcgagtggccctcaggcagagagatgctgagagagctggtccccacaggcataacttccaggatcctcagttggaccacggcccagagagaacccaattggggcggacgctttttgatctgggaagtgggcaagattctttcagccaatccgttagagaggtgctggtgacgtcactggtcgcgatacagccggcctctgacgtcatcccgcagcgccggaagcggtgaggcacagatgagtaacgtgaatttgtccgtctccgacttctggaggtaaggcggtcgtcagcctatctcttctgctggctgggctcaatgccgcgggtgagcgttcggccgaggctgctcctacccttgagtgatgtgccttgaatgacgctgctttcatgcgctgctctcacggctgctttctccgtcctcccctgttactaccttgggctgtttcagcgggcgctcgcgttggtcttcgacccactttgcgtttgttcacgtgtgctcccgacacctgtatgtaccttggtcgcaacacaagccgaaaaaatattagagaatgggccctgtccaaccaaggaggcggcccagcttgtcgggaagggcagcgtttccgccagaaatgcttcgtgaaaggcacttgagggaccttagcagcatcctcaacaggccttgtagggaatgccagaagaagcagtccttggccgggcggggtggctcatgcctgtaatcccagcactttgggaggccgaggcgggcggatcacctgaggtcgggagttccagaccagcctgaccgacatggagaaaccccgtctctactaaaaatacaaaactagccaggtgtggtggcgcatgcctgtaatcccagctactcgggagggtgaggcaggagacgttcttgaacccgggaggcggagtttgtggtgagctgagatcgcgccattgcactccagcctgggcatgccaagagcgaaactccgtctcaaaaaaaaaaaaaaaaagaaaaaaaaaaaaagcctttccccatacataccagtgatagtggcttaacaaagcagggataaaatttctatttggaattgctgtgatctaggtttggaacttttggggattgttcatatgtgagacaatacagatttgtgctcgttcttcttagttacacagttattactttctttttttctttttcttttcttttcttttttttttttttttttttttgagacagagtctcactctgttacccaggctggagagcaacggcgtgatctcgcctcactgcaacctccgtctcccgggttcaagctatctctgcctcagcctcccaaggagctgggattacaggcgtgtgccacgacgcctggctaattttttgtatttttagtagagatggggtttcaccatgttggccaggctggtctcaaactcctgacctcaggtgattcgcccccctcggcctcccaaagtgttgggattacaggcgtgagccactgtgcccagccgcagttattgctttcaaatgatctttttatatgtccacagctcctgcttgccctaccttcgctattaacaagagtgataatagtgttgaatgctttttatcagacactgagctttacatactttgtcctttagctcttgtgacaaccccatggtgtagagcaattgttaataccgcttgacacttgagggaatgaaggcttggagaggttaaataacttgcctcaagtcacacagcgagtaggtggtagaaccaatgtttgaattcaggcagtccaacttcagagaccttgatcttcgccactgttctatattgtttttcttcgactgtccattaagctcccagacacctactctttgttaccttttatttttatttttatatttttttgagacggagtctctgtcgcccaggctggagtgcagtggcgcgatctcggctcactgcaagctccgcctcccgggttcacgccattctcctggctcaggactacaggcgtctaccaccacgcccggctaattttttgtattttttagtagagacggggtttcaccgtgttagccaggatggtcttgatctcctgacctcgtaatctgcctgcctcggcctcccaaagtgctgggattacaggcgtgagccaccgcacccggcctgtttgttaccttttattttatggagaaaattagggtcatgagatgtgctttccctcacatttctgcctctgctttcccttttaaagtcatcaagatttatacccttttccttttgtctcagaggatgaattgtctctctaatcagagcagtttctttatgtttgcttctgatattttatgctgtcacttatgagaccttgttttcatttgtcatttctgtttccagtcgtgtataaacaaggccaggtttctcagatctctgacacttcccgttgccgaagaaagaaaaactccttggtggtccattataactttagctgtcatccaataactttctttctctttatatccaaactgttttagtgagtattctgaactctgcctccatttcctcaccttttgtttccttctgtatctagctctcagacccatcattcccctgaaatttcaccccaaggtcaccagtgactattgtcaaaccagataaaaattttttgattattactggatctctttgctgcttttggaacttggtcatccctttactcccttcttctttgctttacgtgtcagtgctctcagatgatttattcaacaagtattgattgggatacagagatgaacaagacagataaattgttttctcttaaggaatttacattctagctgttctccatgtgcctttcttaccagtcatttctgctatgggtagtcattttcctccttccctaaaatgttgggtgtttctgttgtttgtgactttggcatataaacaatgaaaaactgttctttttttttttttagcttgaccaattttttttttatactttaagttctgggatacatgtgcagaacgtgcatgtttgttacataggtgtatactaagtgccatagtggtttgctgcacccatcaacctgtcatctacattaggtatttctcctaatgctatccctcccctagcccctcaccccctgacacgccccagtgtgtgatgttcccctccctctgcccatgtgttctcattgttcaactcccacttatgagtgagaacatgtggtgtttggttttctgttcctgtgttagtttgctgagaatgatggtttccagcttcatccatgtccctgcaaaggacatgaactcattcttttttatggctgtataatattccatggtatatatgtgccacattttctttatccagtctatcattgatgggcatttgggttggttccaactctttgctattgttaatagtgctgcaataaacatacatgtggatgtgaagcttgaccagtttttataaaatgattatacctatgtgaccaccatccagattaggttacagatacataatattaccagcattcagaatgaaaactgttcttttcattctgtacacattgcctgagtgaacccatcagctggcttggttttaactacctcctacatgcccccaaattgaaattgtcagcttagacctctctgagctttaccctcacatctgactatcctcctggacagctctgcctgcaagtcccacagacacttcaaattcagatgactgaaactgaactcagtgtctttcctggacttaactcttatcacattcatcactaagtcctgatagttttaccccctaaacatctctcaaatctgtgcagtcttctccatctctactgttgtccttttacctgcaatatcatggccttctaactgatttccctgcttctaggcctgttcccccatatcttttcttcacattactcccctccacccccagatggtctttggaaacaagtctgtatcaaattcctgcttaatctttaaagatctgtccatgcattcatccattcttttctctaattcattcagcaaacattcattgtctactggcttgcaaaatccattgaaagttctaaagtttgagcttctcagccagggctctgcctgttctgaaccctgcctgtatctccagcctcttctctgcctcatgctttaggttccagcaacactgaatggcatcttcatgggtactgtgctatttcttctttgtgtacttgcccttgttctctttgcttggaatcttctccctgtttcctttctccacctcctgctcctcacctaattaggctgctccttttcacctaattaacccagtttataaatgggactcagttataaagtttaggtccacctcctccaggaaattttttcctgacacctccttcctcccaatctcggttgggtactctagcattgtgcttccaccctttgcacagagcaatcatcatgtttaccacatctactattaacataattgtttgtgtttttctcctccacaagatttattttttttagatgaggtgttgctgtgttgcccaagctggacttgaacccctaggctcaagcaatccttccacctcagtctcccaagtagcagggactacaggtacgtgccaccatgcctggctaaggctgagttttttgaaggctgggctcatatattatctctttattcccagtactagaatggcacaagatacacaggagtgtagtaattttgactgaacgatcaaatgagtgaagccaaaagttatatgatgcagtggttaagaacccattctttggaattcaaattgtagttctggcacatattggctatgtgacttgaacatgttacttatcttctcatcctgaattttctcttctcagaatggagttgtgagtgttaaaatgagaccatgtaagtaagacatttagcatagtgcctagcacatagtatgcacttgataaaggtgctgaaaaccgggggatcctggagtaaagactaggcctggcccaggacagtgatctcccgaaacccctcctcattgttttgtgaatgcgtaggcagtgatgcagtctgttagcagggagattataatcttgtttggaaagtagaattacatccacattaaacagtcagagaactgtgaaggtagtttgaccacatccaataataagatgtagagaagagaagacagctcaatgaaggctttagggaggaggtgaggcttgaaagttaaataggatttgggttttaggagaaaggaataccaggagaccatattaagaatgacttaggccaggtgtggctcctacctgtaatccgtgcactttgggaggtcaagacaggaggattgcttgaggccaggagtttcagaccagtgtaggcaacatagtgagaaccccatctcaaaataaaataaattagcaaggcatggtggtgtgtgtctgtagtcccagctactccagaggctgaggctggaggaccactttagcccaaggaagttgaggctgca

SEQ ID NO: 3112 - DNA, 6000 bp, Homo sapiens
caggcaaccacagcctctggcttcacctgcttttcccttagatcaggtaggtactctgcctccaactgcttttcccttagagcaggagtctcaaaatcttaaagaaagaagggctttcagggggccagacaggttatataagtgagtgggtggaaacagtggcaaactggagagcacatggcagctattcacaattctagctatttgttgttagacttggctagatttattgatttttcccccaagagatcaggaatcctgatttttaaaaaaaattctttttattaaaattttttttatagagagagggtcttgctatgttggctgggctgatcttgaactcctggcctcaagcaatcctcctgactcatcttcccaaatgctgggattacacacatgagccactgagcccagccagaatccaggttttcatgtgagatctcatttctaactgttggaattaaaacaaacaaacaaacaaacaaacaacaaaaccctgagcagagtagccaaaaacaatcttgaaaaaaaaaagaataaagttcttatacttcctgatttcaaaaagtattacaaagctatagtaatcaaaacagtgcagtactagtgtaaagacagacatacagactgatggaatacaatagaaatcccagaagtaaatccttgcataaatgattaaatgatattcagtaagtatgtcaataccattcagtgaggaaagggcagtcttttcaacaaatgatattgttaaaatctgggtatccacatgcaaaaaattgaagttggagccttaccttacatagtacagaaaatgaactcaaggccaggcacagtgtctcacacctgtaatgtcagcactttgggaggctgaggcaggaggattgcttgagcccaggagttcaagatcagcctgggcaacatagcaagacctctgtctctattaaaaaaaaaattagccaggcttggtgggacatgcttgtagtcccagctacttgggaggctgaggtgggaggattgtttgagtctgggtggtcaaggctgcagtaagctgtgattgcatcactgcactccagcctgggcaacagagcaagactctgtctcacaaaaacaaaaacaaaaacaaaaaacaaaaaaataaaaccacacctcaaaaatggatcaaagacctaaacataagacctaaaactataaaactcttagaaaacataagggaaaagtttcatgacagatttggcaatgttttcttggatataacaccaaaagacaggcagcaaaagtaaaaataggtaaattaaagtacttcacaattaagttttgtgcatccagggatacagccagcaagcagagtgaaaagcaccctatgaaatgggaatcttatatttgatcagaggtcaatatccagaatatataaagaactcctacaacaaaacaaaacaaaaataaccccattaaaaaatgaagtacttgaatagacatttctccaaatacatacaaatagacaggaagcttatgaaaagatcaacatcactaatcattagggaaatacaaagcaaaaccacaatgagataccatttcacacccattaggatggctgctatcaaaaaaaagtaacaagcggccgggcgcagtggctcacacctgtaatcccagcactttgggaggccgaggtgggtggatcacaaggtcaggagtttgagatcagcctggccaatatggtgaaaccccatctcttctaaaaaaaaaaaaaatacaaaaattacccgggtgtggtggcaggcacctgtagtcccagctactcaggaggctgaggcaggagaatcgccttaagccgcgaggtggaggttgcagggagccgagattgcaccactgcactccagcctgggtgacagagcgagactccatctcaaaaaaaaaaaaaaaaaaaagggttggcaagaatgtggagaaattggaactcttgtacactattggtagaaatgtaaaatcatccagctgctatggaaaacagtgtgacagttcctcaaaatattaaaaatggaattaccatataatccagcagtttcacttctgtgtatatattcaaaataattgaaagaagaatttttaaaaattgtttcacattaaaaacaaatttcagtggctttaggggtacaaatggtttttggtttcatggatgaagtgtataatggtgaagtctgaaattttagtgtacctatcacccgagtaatagttacacccaatatgtagttttttaaaatctctcatcttcctcccactctctccacttctgaatctccaatgaacattataccactctgtatgcctttacatacccaaagcttagctgccaattataagtgagaacatgtggtatttggttttccattcctgagttacttcacttagaaaaatggcctccagttccattcaagttgcttcaaaagacattatttcattcttctttatggctgagtagtattctgtggtgtatatgtacgacattttctttatgcattcatcagttcatgggcatttaggttggttccatgttcttgcaattgcaaattgtgaaaacaggatctcaaagagatatttatacactcatgttcatagcagcattattcacaatagccaaatggtggaatatccacgggtggatgaatggataaagtatggtgtgtacatgcaatggagtgttattcagctttaaaaaggaactttttacacatgatacaatgtggatgaaacttgaggacattatattaagtgaaataagccagtcgcaaatgggcaaatactgtctgattttacttacatgaggtacctagagtggtcagactcatgaaaactgtaagtagaatggtggttgccaggtgggggagggaaaatagggagctatttaatcgatacggagttttttttttgaggcagagtcttgctctatcgcccaggctggagtgcagtggagtgatcttggctcactgcaacctctacctcccgggttcaagcaattcttctgcttcagcctcccaagtagctgggactacaggcgagttccgccacgccaggctggtcttgaactcctgacctcaggtaatccacctgcgttggcctcccaaagtgctgggattacaggtgtgagccaccgtgcctggccgagtttcagtttttcaagatgaaaaagttctggtgattagcatggcaatatgaagtgcctgaaagtcttcactgcctgccatacctttagctatacattgtgccatgtgatcttgcttttctggccactaatacactatagacaatggactaggcctaacaagcaggacgtggaaactctgcccaattttgcacattatatagtgaatgatgtaattagaatgatccaatccaacttttggatgcaagacacacaaaggcaggtcaaagaagcacccttaaccgagagggatgcttaattgagggaacaacaaaactggtcaggtcaccagagttgcctctttttatcttgggcagttgtgaacaacattcctcagctgtaaggcctgtgtggctgctgagatgctgcttgtgttttcccacttccttatatgaccctaatataaacctgcatcttctctgctaacaaaagcaagcctgtcctctgtgtttcttggaagatcctcccaccttctgtcttgaaggctctgatagcttcatcataccattaagtctctgcttttccatggaaggaaacaatactccaccttgatgaagaatgtgactccttaaatctcaattttgttaaagaaaagattattcaatgatacttgctgaagcatggtaaggaagactttattcaggaacttcatgataggtatatagagctcactgcaacggggttttgcagtggaagagagattaggctcaactccaaacagcagcatgggcaagtgggcatttatggccaaggagctgtgtaggggtcagtggatggaaaattactaagaggaaacatcggggtaaaggagtttctggctaaatatacctaacaggattcttgctggagacaggccaaggtaatcagacatcatctgggggatagtggagaataaggaacctgatcagatattgagaataaccacataaggcggggtggtggtggtggttcttggtaaactgacttagccagggtctgtgctaaaactggattttacagggaagtgcacagatgggcctagcagaaaattcagaaacctaattcaaccaaagaatttttgccagtgtgttgtacttgagaaaaattataaactatacttttacctccgagatagggattgttccttctgccaaaatgcctttgaataactgcaatatgattcttagggaactttctggaattgctgtaaaaaatcagtacacgcatcttatccctgcatcttgctttttttctcccggattgcccctcagttcatttagtgtacacagcactacaaaaaacaggtttccctgcctcttaccgctccattctttcctccctgcacaaaggagaaagcggactgtagtttaaaaagcaagtagcagtgctacagcaggttgtctgcagcaggagagatggccttaaaggttgtgaacgtctccttatggagtatcgagaagctgcacagccacctagaaacgtccacagagggattgggtctgaaatgtcacccaattcagagactgtgaggcagtgacaggcgagtggccctcaggcagagagatgctgagagagctggtccccacaggcataacttccaggatcctcagttggaccacggcccagagagaacccaattggggcggacgctttttgatctgggaagtgggcaagattctttcagccaatccgttagagaggtgctggtgacgtcactggtcgcgatacagccggcctctgacgtcatcccgcagcgccggaagcggtgaggcacagatgagtaacgtgaatttgtccgtctccgacttctggaggtaaggcggtcgtcagcctatctcttctgctggctgggctcaatgccgcgggtgagcgttcggccgaggctgctcctacccttgagtgatgtgccttgaatgacgctgctttcatgcgctgctctcacggctgctttctccgtcctcccctgttactaccttgggctgtttcagcgggcgctcgcgttggtcttcgacccactttgcgtttgttcacgtgtgctcccgacacctgtatgtaccttggtcgcaacacaagccgaaaaaatattagagaatgggccctgtccaaccaaggaggcggcccagcttgtcgggaagggcagcgtttccgccagaaatgcttcgtgaaaggcacttgagggaccttagcagcatcctcaacaggccttgtagggaatgccagaagaagcagtccttggccgggcggggtggctcatgcctgtaatcccagcactttgggaggccgaggcgggcggatcacctgaggtcgggagttccagaccagcctgaccgacatggagaaaccccgtctctactaaaaatacaaaactagccaggtgtggtggcgcatgcctgtaatcccagctactcgggagggtgaggcaggagacgttcttgaacccgggaggcggagtttgtggtgagctgagatcgcgccattgcactccagcctgggcatgccaagagcgaaactccgtctcaaaaaaaaaaaaaaaaagaaaaaaaaaaaaagcctttccccatacataccagtgatagtggcttaacaaagcagggataaaatttctatttggaattgctgtgatctaggtttggaacttttggggattgttcatatgtgagacaatacagatttgtgctcgttcttcttagttacacagttattactttctttttttctttttcttttcttttcttttttttttttttttttttttgagacagagtctcactctgttacccaggctggagagcaacggcgtgatctcgcctcactgcaacctccgt

SEQ ID NO: 3113 - DNA, 6000 bp, Homo sapiens
tttacatatctatctagaagtcttagctccattttcaggtgtcatattaaaggtgcttaaaaacaaaacaaaacaaaacaaaaaaacaccgtaccttcacatttgtcacaaatcacattcttttgcagagccagttttcttgttgcaccattatataagtcttctagggttactgagagctgatgtacaacatttttacctaaaacaaaatatttctcattgcaaatctgtttaagatgctggatcttatttgtgctaaaggcactataaagaatgtggcaaagaataataaaagatgagcctcacagggtacatctgttgactacctactatatacacagaatgttcacgttatcacagatgatcctcaaactgtgatgtaatcacagatgagggaaaatcaggtcagagattaaatatttgcttaagggcacagacgtggccatcttggaaatatggtaagcaaaagcattaccttcaaagtcacttgagaaaaaccaatgttatttaaaagggcacatttcacaataatccaaacattcatttctgtcacaatatattttttgaagctttcacttcgtaccgtattgagcaacatggccaattacttcatccaaaaattctgtagcacagtaaattctcattaatcaagattggccagggaagctgatgtatttattgagtcaccacagaagagtatcaatttctacttcttcctgatttagtagaaaacagcccatttactgctgggccagcactggttgttttgaaggccaaatttctcataccttttataatagcattgcccaacagaactttctgcagtgataaatgttttatatctgttctgtccaacgtagcagccaccaatcacatgtgcttattgagcatgtaaatgtggccatttagactaagaaaccgtatttttgtttttgtcttaaattaatggagccacacatggccagtggctactaaggagtgccttacttcacttaaatcagaataggaaatggaaggtcaagatctcataaggacactgaggttagaagtatgaagtcacctgctagtaagttagtaagttcctaactagtggtccttccacaaggacttattcacaacaatattattgcctttccaccaactgaaaaaagttctcaaactcgtttctgtacaatatgcctaatgaacattttaactttctaatcaagcatgaaataccattaattatgtccttctgcttatagttccacctttagttttggcacgctaaaatctagctgcccttattttgaacagtgttgagtataaggaaggaaaaataaagcttctagagcttgatgaagcgcatttccccagaaataacctctcaatatgatcataagccacataaaagagcttgccaatgttaacctgcaggttctttgtaaggtaagtgaaaaaccaccactacttttttgtggacaaattctaacaatttactaagcaagtcatttggattgtggactttctttttaaggagtttaagtatcttaataaaaacataatcctttccttgaagatctttaaagaaaaactgaataaacaatttcccaaatctttctgaaccttaagaagctcaaagtgaaatttaatggcttggccattcattctaaaactggttctgctcatcagcccttatttgtatacactatactggaaataaagtgagactgatttctcttgaacattttactcctataagcagtatttctagagcccataggccactttcctgataaacatattaaatacataattttgacacaataaagctgaaacaagaatagatagatggcaggcaacgaaccagttttcagccctggctctgttggcttgctatatgagcttgaagaagttttaggtttctgaactttaacttactcccatttgaaaaaggccactgtacctaccatcaaattcctttggggagtgagggaacaccaaataagatctgtaaaaagggcttggaaaattatattgctatatactttgtctttttttttttttttttttttttttgagacaagagtctcgctgtgttgctcaggctggagtgtaattgggcgatctcagctcactgcaacctccacctcccgggttcaagcgactctcctgcttcagccctcctgagtaactgggattacaggcacgcaccaccatgcctggctaatttttggatttttttgggttttttgtgacagagattcactcttgttgcccaggctggagtgcagtggcgtgacctccgttcgctgcaacctctgcctccagggttcaagcgattctcctgcctcagcctccagaggagctgggattgcagatgcccaccaccacgcccagctaattctgtagttttgtagagatggggtttcaccatcttggccaggctggtctcgaaccctgacctcagtgatccacccacctcggcctcccaaagtgctgggattacagaatgagccacagcacgcggcctgttctcataatttgtttgataatatctaagatttttggaagcagtcatttgctaccactctgttggctattttttaggccccttaaatctcattttaaaaaaagcgacaccactggctgggcatggtggctcacacctgtaatcccagcactctgggaggccaaggcaggtggatcaccacctgaggtttgcagttcaagaccagcgtgaccaacatggtgaaaccccatctctactaaaaatacaaaattagccgggtttggtggcacatgcctgtaatcccagctacttgggaggctgaggcaggagaatcgcttgaacccgggaggtggaggttgctgtgagctgagaccacgccatggctctccagcctgggcaataagagggaaactccgtctcaagaaaaaaaaaaaaaaaaccacaacaaaaaaacacgacaccataaatcagaggcaatttgtggtcagtttgcaacattataccaacatgtaaacaagcatttaaaatgggtgatttctcaaagatctgctctgaccaacagctaactttagttagctgcacaaagactagattcttcttacctctcctttctctctgcatccttcctcctcctccaaaaaacatatcaaagatgtccatgggggagccaaaaccgccacctgctccaccctctttaattgcctgttctcctcctttgtcatataattcccttttctttgcatcagagagaacttcgtaagcttgagaaatctgtttaaactgtttgagaaaagaggagtgaatttcattttttaaaaaacaagtgttacctagctacattacacttgatcttagctaaaaaggccgagaagtgatcatagttactatattagatactcgatttcaggccataatagaaatactatacgtctggcaaagaactattcagatacgtttaagagtagatactattcaccttctctccttcatttgggttcttatcaggatggtacttcaaagccagtttcctataagcctttttcaattcttcctgagtagcattgggtttgacccccaaaacatcgtagtaagttgtttctttcaccatcttctactgcctgaaataagaaaatgcaactttaaccggctttcaactggtagcttttaataaaaaagagagctaaggccgagcaatctctttgcaaaatccgattataagaacaccaccttccctaaatttcaccaaaaaggtaacaattcctgcgataattcagctataaactcgaacagacaaaacaaataatcattatcgggaaataatctgagagccgccttctagcagctggttccaattttcctacaccaaagcttccatactaatataacacaactattatctggattcttcccgtttgccctagaggcggtgacagttgtaaccaaaagaagcactgatatgttcagtctaccggtcattacactatcactgtctttggcaaatctgataaactccatatactctccagaaaaagacgtctgggcacacagtggtgggggggagtggtttatagaacaggttactggctccacacagcaagccctccaccgcccacggcttacagcttctccagccgaatccctctcgcccctcaggctggcagagtttacctgccaggtttccccttgcacttggcgctgaccgatttccttcctttctccctcccaccctggacccaagtggcggtggggaaagcccagccctcaacaaacaaagggaggggaaacagagaaagcgaaaccaaaagccgcagtctccgcccggctccccccgcagcccctcgcccctgcctccctgtgcgcgtgcgcagggtcgccaaccccactccccccccccaccccgagcgagcacggacggggaggggggccgcgggggcgcgcacggaggggcagccgaagacagtagctccttggagatcccaggctggggaaggagggaggtctaggaaaggtctcgggcccattcactgtgcgtgccggggatgggttgccagggcaccacaccagccctccaaaagggaaatcgtgggcccaggaactgacagcggtcctacccacgcggccaactgcctcccgaccgcggctccatcggtttcccggcgccaatggcgccagccaggggactaggggcagcgcgagggctcaaactcaccggtgcgggctgaggccggtgtgtgagggagcgggaaggagcgccgagctgtgcgcagccggggtagttaccgctcctccgcctctcaccgagcgttctggaaagttccgcccggcgcgccgcagccgtcctcttttgtagccgaacccgggcgcgtcacccgccggaagtcccgcccttctcggccgctgccaccgccccgccgttacctgggcaacggcgcgggggcgcacgggtcgggaggagctgcgccgaaaggccttgtgggtgttggtgctagcgcggcttcccggcgctcgtggaatcttctggagcccttttctccactcagcgagcctgagagtgcggaagtctccggctggtggggcatggcccaggagcactgcaagtcctagggttcccaaacctgtggggtggccgcctgggcccgcgagggcgggaagggctcgagtacagtgacccagcgggagctgtgtgtgaacgggaaagctcttggaacagtcttgcccccccccccccccctcttacgggcgcctcttctctttttgggaacgtggcgagcaaaaaatgcttgagccaggtgggtctagtccccagaccaatagcataggccttgggtcttgctgtttttcacgcgtggtccaaggcggcataattaatcaaattgtgaagttgttaaggctttttgtgcaagtccaggcccctagacacatgttatctgccctggacctcgctgattcgtgcagattgagctcagtgtgtctgggactgagctaaacagtgagacgtttggaccgtctttgatgtacagagggccgtggactcctctggtcaggttttcacccagtttggctacagagtagccgcaagagtgtctgactaaaacaatttgtttaattatttgacctcacttttaaatcctacgggtcagggaacctggatgtacaatctgcaacgtaagacctcggacttgaaaatggtaccacgggggcttaatgggaattggggtccgcttctttatccagggacacagcaggtatgtcagtatctagcaccaagaaagatggagtttgccacgctcggtggctcacgtgtgtaatcccagcactttgggacgccagcgtgggctgattgcgtgagctcagaagtttgataccagcccaagcaacatggtgaaaccccgtctcgatttaaaacaaaaacagaactggagatgcagagttgaaaagccccagttagactttagtgagaagccaaacaagtcaacagactgccagagaaaccatgaggtagaagtcag

SEQ ID NO: 3114 - DNA, 6000 bp, Homo sapiens
cctgttgctaaagccagaaagctggaagtcattcctcctccctacctctgcatcaagtcatcatgactctacctgaagactttacatgtttttatatttgtgtttatttttctccctctccatttcttctatttaggcctcatcatttctgatctcatcgctcaccataaaaacctgctaagaatccaaccttcgcattagcacccaagtgattattgtgaaatttaaatgtaatcaaatcagctctaaaacaagggttactgtgaggataacaatatggcaacgtttgtagagtgtttagcgcagtgcctggcaggtcctcacaaaagaaagaacagatgaggaaagagaaaagaaacaaaaagtcagctgtcacaggttatatcaccccatccctaaaatcctccagtgtctctcaagagccttcaaaacaaaattcaaactttttagcataatgcccaagcccttattactttgctcctgccaggcctccagccatctccagctacctctatgaacacttacggccatgtggttattgagttattggccaggcgtggtggctcacgcctgtaatcccagcactttgggaggccgaggcgggcagatcacctgaggttgggagttcaagacagcctggccaacatggagaaaccctgtctctactaaaaaatacaaaattagccaggcgtggtggaacatgcctgtaatcccagctacttgggaagctgaggcaggagaatcgcttgaacctgggaggcggaggctgcagtgagccgagatggctccattgcactccagcctgggcaaaaagagagaaactctgtctcaaaaaaaaaaaaaaagaaagtatgaaatatcccactgaaataaaatataatggtaagaaaagaggccatccatgacagcaacaacaaaaaatgcctagtaacacatttaagaagaaatgatgaagacctagtttaaaaaatgaagaaaataaatatacagttatatgttcatgagtaggaagattcgacattttaaatgtgttaattctctccaaactgatatataaaatcactgtaatcacaataaaactcacaatgggatttggggggaatctgccagaaatattcctaagttcctctggaagaataaacatattaaaaaaaatacaaggaatattctaaaaagcaagaacaatgaagggaagtagtaccatgtatttcagtggaaattaagtatacattaaaagtggtggccaggtgtggtggctcacgcctataataccagcactttgggacaccaaggcaggacaactgcttgagcccaggagttcaagaacagcctgggcaacataggaagaccctatctctgcacatacaaaaaaaaggttggggggcggatttcacattagtcaggaaaaataagattagtgttagacaaactagtttgccatttggagaaaaataaagatcagttacttacaaataatcctcagtccttacaccaaaataactttcagatggaataaaaaatttaagtttaaaatggaacaatgattccagatgcagtggcaggtgtctgtagtcccaagtactgaagaggctgaggcaggagaatcacttgagcctaggagttcgaggccagcctgggcaacacatcaaggctgttaatttaaaaaaaaaaaaaaaaaagggaaacaatgaaagtactagacctaacctgtaaacctgggacaacagatttatatttataatgctggactgatgaaggggaaggtggagagaagaaaaaggccaaaaaggaagagtcacaatttatctacataaaaattaaaatctttatatggccgaaaaatatatatatagatactaagtaaaaagcgaagaatatactaaagaaaacaattgtaacacatgacagactaatatctacccctaaaagggctattattaaaatagtggaattacaccacagaaaaatggtaaaataatatgaacagttgacaggagagtcagtaaacatttaaaacatggttaaacttactaacaaagaaactcgaaacaataagatatcactttttatctccaagcttagcaaagatttaacaacaaaaggccctcatattggcaaggcccactcacacactgctggaagcagttacaaaccagtatggaaacttatttattacaattttaaatctacattcatgttgactcagcaatttcaattctagctgtccatccaacagaaatacttgcatgagtactcaaagctgtatttgctaatttctctgcagcagtttgtaaaacactggaaattgctgaaatattcatcagtaggggaataaattacggtgcctacatactacgccattaaaaataacaaggcagattagttatttatcctggcatagtaagatgacaaagtgaaaagggcaagctgtaaacagcttgtataatgatcccatttctgtacaaacgaagaccacatacaaagttattgccagtttttttattttattttacgtaagaatgcttcttaaaagtgttaacttttttgttagtttcgtttttagacagggtattgctctgtcgtccaggctgaggttcagtggtgcaatcaccactcactgcagccttgacctcccaggtccatcctcctgcctcagcctcccaagtagctgggagtacaggcccacaccaccacactaactctaatttttgtagaaacgaggtcttattatgttgctcaggctggtctcaaactccgggactcaagggatccgcctgccttggcctcccaaagtgctgggattacaggcttgagccaccatgcaccccctactcttcctttattagcatttaacactcaactgtttgtttctggttccctatgttgtgagctccttgaaggcagggaccacgacttatgtgatttttttttttttctgagactcgacagagtcttgctctgtcaaccaggctggagtatagcggcaccatctctgctcactgcaacctccgcctcccaggttcaagcgattctcctgccacagcctcctgagaaggtgggactacaggcacgtgccaccatacctggctaattgtttctatttttagtagagaagggtttcaccaagttggccaggctggtctagaactccggatctcaggtgatccgccaccttggcctcccaaagtgctgggattacaggtgtgaggcacggcgcccggcctgacttacgtgatttttgtattacaaagccctagtacactgcctggtaatattagacgtttattaacggttggtttaaacaaaaaactttataccagaggtgatacttgagaaggcaacacctaagattgaaaaaaatcaggtgtctgtcagccaatgcaaaagcatacaaaggtgaaaaggcgtatatgggaaactgcggatagttctgtgactggaatgcacagttaaaattaatgaaagagaaaaggctgaagaggcagcatgaggatgcttccaaggataaagttcaaaattcttagcgtagcatatataccaacagacaaaggcatgccctaactagctttgaagcctcacctccggctattctagctcccttagctatggctatatccaattagttgcaatttcctaaaaacatcatattcttccacaccttagtatagccttcccctgtgctttgtccactgctctcctcccattttcaaaactcagctcaattgccactttcccaaagaaattctctctgatctatcaggttaatataggaggctctcccctactgacttctacctcatggtttctctggcagtctgttgacttgtttggcttctcactaaagtctaactggggcttttcaactctgcatctccagttctgtttttgttttaaatcgagacggggtttcaccatgttgcttgggctggtatcaaacttctgagctcacgcaatcagcccacgctggcgtcccaaagtgctgggattacacacgtgagccaccgagcgtggcaaactccatctttcttggtgctagatactgacatacctgctgtgtccctggataaagaagcggaccccaattcccattaagcccccgtggtaccattttcaagtccgaggtcttacgttgcagattgtacatccaggttccctgacccgtaggatttaaaagtgaggtcaaataattaaacaaattgttttagtcagacactcttgcggctactctgtagccaaactgggtgaaaacctgaccagaggagtccacggccctctgtacatcaaagacggtccaaacgtctcactgtttagctcagtcccagacacactgagctcaatctgcacgaatcagcgaggtccagggcagataacatgtgtctaggggcctggacttgcacaaaaagccttaacaacttcacaatttgattaattatgccgccttggaccacgcgtgaaaaacagcaagacccaaggcctatgctattggtctggggactagacccacctggctcaagcattttttgctcgccacgttcccaaaaagagaagaggcgcccgtaagaggggggggggggggggcaagactgttccaagagctttcccgttcacacacagctcccgctgggtcactgtactcgagcccttcccgccctcgcgggcccaggcggccaccccacaggtttgggaaccctaggacttgcagtgctcctgggccatgccccaccagccggagacttccgcactctcaggctcgctgagtggagaaaagggctccagaagattccacgagcgccgggaagccgcgctagcaccaacacccacaaggcctttcggcgcagctcctcccgacccgtgcgcccccgcgccgttgcccaggtaacggcggggcggtggcagcggccgagaagggcgggacttccggcgggtgacgcgcccgggttcggctacaaaagaggacggctgcggcgcgccgggcggaactttccagaacgctcggtgagaggcggaggagcggtaactaccccggctgcgcacagctcggcgctccttcccgctccctcacacaccggcctcagcccgcaccggtgagtttgagccctcgcgctgcccctagtcccctggctggcgccattggcgccgggaaaccgatggagccgcggtcgggaggcagttggccgcgtgggtaggaccgctgtcagttcctgggcccacgatttcccttttggagggctggtgtggtgccctggcaacccatccccggcacgcacagtgaatgggcccgagacctttcctagacctccctccttccccagcctgggatctccaaggagctactgtcttcggctgcccctccgtgcgcgcccccgcggcccccctccccgtccgtgctcgctcggggtggggggggggagtggggttggcgaccctgcgcacgcgcacagggaggcaggggcgaggggctgcggggggagccgggcggagactgcggcttttggtttcgctttctctgtttcccctccctttgtttgttgagggctgggctttccccaccgccacttgggtccagggtgggagggagaaaggaaggaaatcggtcagcgccaagtgcaaggggaaacctggcaggtaaactctgccagcctgaggggcgagagggattcggctggagaagctgtaagccgtgggcggtggagggcttgctgtgtggagccagtaacctgttctataaaccactcccccccaccactgtgtgcccagacgtctttttctggagagtatatggagtttatcagatttgccaaagacagtgatagtgtaatgaccggtagactgaacatatcagtgcttcttttggttacaactgtcaccgcctctagggcaaacgggaagaatccagataatagttgtgttatattagtatggaagctttggtgtaggaaaattggaaccagctgctagaaggcggctctcagattatttcccgataatgattatttgttt

SEQ ID NO: 3115 - DNA, 6000 bp, Homo sapiens
taacaacttgttgccaaacccaaggtcataaagctgttctcttacgttttcttttttttttttttttgagacggagtctcactctgtcacccaggctggagtgcaatggcacgatgtcggctcactgcaacctccgccacccgggttcaagcgattcttccgcctcagcctccggggtagctgggattacaggcgcacgacaccacgccctgctaatttttgtatttttgtagagaaggtttcaccatgttagttaggctgctttacgttttcttttagaagttttatatttttggctcttatatttagtttgtgatccattgagttgattttatgtacgtatgtatggtcgcgttcttttctttcctgtctttttttttttttttttttgcatatggatattcaattctcctagctccatttaatttgaaatgattgggcaggtacttttgagcagtgcaagtacagagcggcactgccagcagactacacgcggtagaaagccgaccttggtgagcgtgttggtgctcgacagtgagcagagaaaggatggacgattacggagcgccctcgtctccagttaccgctttctggaaacaccatccgccggggcggagctgttccgccccggtgcggtactacgactcccagcatgcacctcgcagtcggccctcggtggaagcgggaacccaggaggacctgggggtgtggcagcgaggaagggccgagccacggactgtggggccgaaactcgctcccgcccaccctttctcgaggctgtggcctccgcgagagccgagcgggccgcaccgccggccgtgcgactgccccagtcagacacgaccccggcttctagcccgcctaagcctgtttggggttgctgactcgtttcctccccgagtttcccgcgggaactaactcttcaagaggaccaaccgcagcccagagcttcgcagacccggccaaccagaggcgaggttgagagcccggcgggccgcggggagagagcgtcccatctgtcctggaaagcctgggcgggtggattgggaccccgagagaagcaggggagctcggcggggtgcagaagtgcccaggcccctccccgctggggttgggagcttgggcaggccagcttcacccttcctaagtccgcttctggtctccgggcccagcctcggccaccatgtcccgccagaccacctctgtgggctccagctgcctggacctgtggagggaaaagaatgaccggctcgttcgacaggccaaggtaacacggttgctggcaccctcggtttgcagcctcaagatccctgaaagcgggtttgcagtggatttaccccaaccgatggggagggactgagcttgaccaaagagccagaaatgactggagaatgcatcccttgccactgctgcaaggggagaaaaaaggattgatcctcagtgacaacccctccctcatgtggcaggtggctcagaactccggtctgactctgaggcgacagcagttggctcaggatgcactggaagggctcagagggctcctccatagtctgcaaggtaggcgggtcctccccaggatggtcagttcccctcttccatagccagagaaacatccgctcctgcgtttttgggatcgatataattactcggggcagggagtcctgtttaaggcacagaggagactggagtggaatcatctttgtacaggcaaatccctctcttccttacacactcacagagtggcatttgaaaaatggtttccaagatggtctgatctggataacttttttgccctttccagactctctgtccaaaggttgggttctttttttaaatccttagctaattggctggagggtgggttctttattgtagctgttttggttggagtggggtgatctctgagttgggattttatttggaggatcttccatgggggagcagtctgtaagaccaacattgttgctccagggctccctgcagctgttcctgttcttcccttggagctgactgtcacctgcaacttcattatcctgagggcaagcttggcccagggtttcacagaggatcaggcccaggatatccagcggagcctagagagaggtgagggccagagattgtccctgattcccctgccatcttcagtctgggtttaagttattgcagggagatgggaggataaacaacatctgtcacctccatggagagaggtgcccttctctgtgctcttcagaccaggttgaggtattattattgtgacctttggggtcctgcaggagaggaaagccagagtgtgtggggagatggaggatgaggtgctacttcagctgtgtgtgtgtctatgtgtgtgtgtatactctacagtgctggagacacaggagcagcaggggcccaggttggaacaggggctcagggagctgtgggactctgtccttcgtgcttcctgccttctgccggagctgctgtctgccctgcaccgcctggttggcctgcaggctgccctctggttgagtgctgaccgtcttggggacctggccttgttactagagaccctgaatggcagccaggtaatagggaaagtgacctgaagctgagggtctcctccttccttcctcctcctttctctccagctgcagtagcatcatcatgtactggacaggcggctgggttggtggtcggaaaacctggattctctctgggactcttgggtgaccttgccctggttggtctctcattgtggggattctcttaggagtgttttttaaaaattggacaggcatggtggctcatacctgtaatctcagcactttgggaggctgaggtaggaggatcacttgaacccaagaggtggaggcaacagtgagttgtgagctatgatcacgccactgcactccagccctgcagcctgggtgacagagggagaccctgtctcaaaaaaaaaaaaaatttttttttggatagggatagggctcttgtgatcttgctcaagtcagctctcagccttagtctccttattagtaactcaaatatggtccttgccctgagtgaggaggcacgctggaatagatcatcactgccccaggtttttcttccttttttttaattcttgcctcatagctatctatctcttagaattgggggaaactacaggcattatgcatagcttcttgctttgtaagggtagctgaggcctgtgtcctcaaggatcaagaggacccttgagctcaaggtctagccaggatagatggagataggagaagacgaggaggttgtaggcttggagcttctggttgtccttctttccccagagtggagcctctaaggatctgctgttacttctgaaaacttggagtcccccagctgaggaattagatgctccattgaccctgcaggatgcccagggattgaaggatgtcctcctgacagcatttgcctaccgccaaggtcagctagcaacctgactcatctcttctacctttaagtggtcctccagactcatgccctctctcttgtcccattcagttccatgggcttcttagacccttgttccccatcatgacccctgctctatagccctctccaagctcacaccctgactgtcctcaggtctccaggagctgatcacagggaacccagacaaggcactaagcagccttcatgaagcggcctcaggcctgtgtccacggcctgtgttggtccaggtgtacacagcactggggtcctgtcaccgtaagatggtaaagacagtcctagggtggattggggaaaccacaagcattatgtatagctttttgctttgtaagggtagctgaggcccgtgtcctcctatccctttagggaaatccacagagagcactgttgtacttggttgcagccctgaaagagggatcagcctggggtcctccacttctggaggcctctaggctctatcagcaactgggggacacaacagcagagctggagagtctggagctgctagttgaggtagggaactgccaggtgaagatgtggggtggaggattcctgaggtgcttgtgatggggtgacttgactagtcaagatccaagtataaggaagtatggctcccaaagattatagatacaatttttttctttctcttttaggccttgaatgtcccatgcagttccaaagccccgcagtttctcattgaggtagaattactactgccaccacctgacctagcctcaccccttcattgtggcactcagagccagaccaagcacatactagcaagcaggtgcctacagacggggaggtgaggttccccttgctcacctgagcttctcttcccacttctgatgcctcccctggggtgtgactctgcttttgttcttgtgacttgggggatgaatgaggcagtggcaggacataggtcgccactcctcagcctcttaccttgcttctagacctgaactgaggactcttctctaagacattaaccttctctatctttgacactctgaagtctcttccccagtccattctgtaactggggtagatccatactgagccaaaattggagccctaagaccttccctccctttctcctcctcagggcccatgaacatccatctgttagctaagagagaacattctcaggacccttgcaggttccctgctagggcctagggtgaggcttatgggcttttactcctcagggcaggagacgctgcagagcattacttggacctgctggccctgttgctggatagctcggagccaagggtgggtgtgtcttcaagcttctctgcaatggggtagacgggttggtgtcccctttgaaatacagcaagactgcaattttttgttttttcctctattctgtctgtccagtctgggggcccaggactctgcatggtaccagagcctggtgaagaggttggggatggtggctcatgcctttcaagacactgcttcttcttcccactccagttctccccacccccctcccctccagggccctgtatgcctgaggtgtttttggaggcagcggtagcactgatccaggcaggcagagcccaagatgccttgactctatgtgaggagttgctcagccgcacatcatctctgctacccaagatgtcccggctgtgggaagatgccagaaaaggaaccaaggaactgccatactgcccactctgggtctctgccacccacctgcttcagggccaggcctgggttcaactgggtgcccaaaaagtggcaattagtgaatttagcaggtgagcccggggtcctagagggggtgtggagggatgattttctgattgggacctgagttggtgagctccatgttcacctacttaccctagagtttctgaaattgattcctcttcacccctgttctgtgtcctacttcaggtgcctcgagctgctcttccgggccacacctgaggaaaaagaacaaggtgatctaaactttcagttttcctcttacctcctggaagtggtagtggtggaagtgggttccctttaatgtgtcccagcccaccaggagacttaagagaaagggactgtggacacaagaagaaatagaggaggatttggggttttggtgactgtgaggctgggaagacacttcttgactttgggagtggtccccaggggcagctttcaactgtgagcagggatgtaagtcagatgcggcactgcagcagcttcgggcagccgccctaattagtcgtggactggaatgggtagccagcggccaggataccaaagccttacaggacttcctcctcagtgtgcagatgtgcccaggtatgtatacttgcatgacgtcggctatgcatagatgtgcaaggacagagaggcccatgggaaatacttgggcgtaagtgtaagagtggtgttctcagacaggaggggtgattggggttgtgctatatatacctagggatatatccaggtgttcaaatatacacagtgtgtatgcagggctcccaagagttccctggtttccccgatatcctcagacac

SEQ ID NO: 3116 - DNA, 6000 bp, Homo sapiens
ttcaagtgattctcctgcctcagcctcctgagtagctgggactacaggcgtgcatcaccacgcccagctaatttttgtatttttagtagagacggggtttcaccatgttggacaggatggtctcaatctcttgaccttatgatccgcccgccttggcctcccaaagtgctgggattacaggcatgagccaccgcgcctggcctacacaaaaattcttaattttgagaaagtccagttcatcctgtttttttctttcattgcttatgcttttggtgtcatatgaaataaattattgcaaaatgccacaacttaattttagaacatttctatcatccccccaaaattccctacattgactccctaatcctaccccaggccaatgatctgttttcggtcttttatttatttatttatttatttatttatttatttatttatttatttagagatggagtttcactctgttgcccaggccggagtgcagtggcgtgatctctgctcactgcagcctctgcctcctgggttcaagtggttctcctgcctcagcctcccaagtagctgggactataggcatgtgccaccacgtccggcgagatggggtttcactatgttagccaggctggtctcctgccctctggtgatccgcccacctcagtcccccaaagtgctgggattacaggcatgagcctggcctgttttcaatcttttttttttttttttttttttttttgagacagtcttgctctgtcgcccaggctggagtgcagtggcgcgatctcggctcactgcaacctcagcctcctgggttcaagggattctactgcctcggcctcccgagtagctgggattacaggtgtgcaccacgacgcctggctaatttttgtatttttagtagagacggggtttcaccatgttggccaggatggtctcaatctcttgacctcgtgatccgcccaccttggcctcccaaagagctaggattacaggcatgagccactgtacccagcctgttttcaatctttataagtttgtaatcctagcactttggaaggccgaggccagtggattgcctgagctcaggagttcgagaccagcctgggcaacatggtgaaaccccgtctctactaaaatacaaaaaagttagctgggcgtggtggtgtgcacctgtaatcccagttactcgggaggctgaggtaggagaattgcttgaacccaggaggcggaggttgcagtgagccgagattgcgccactgcactccagcccgggcaacagagcgagactccgtctcaaaaaaaaaaaagtttgttggtgcactcttttgccccttttcattgctaaatcattggctttgaccaactgatggacattttgattgttttcagtttttagctattatgaacatttttagctactatgagtatttgcaacaaatctcagtgtggacgtatgttttcatttctcttgggagtattctttggagtggaattgctgagtcttatggtaaatttgtgattgacttttttttctttttttttttttgagatggagtcttgctctgtcacccaggctggagtgcagtggcggggtcttggctcactgcaagctccacttcctgggttcacgccattctcctgcctcagcctcttgagtagctgggactacaggtgcccgccaccacgcctggctaattttttgtatttttagtagagacggggtttcactgtgttagccaggatggtctcgatctactgacatcgtgattcacctgccttggcctcccaaagtgctgggattacaggaataagccactgcgcccggcctatgattaactttttaagaaactgccaaacttttctgaagtgagtgtactattttatattcccaccagcagtgtatgagggttcctcatacacatcctcaccaacacttggtataatctgtttttattgtagtcattttatgtatgtatgtgtatagtgtttttatttttatttatttatttttgagacagagtctcactctgtcacccaggctggagtgcagtggcatggtctcagctcactgcaacctccgtttcccaggttcaagtgattgtcatgcctcagcctcctgagtagctgggattacaggtgtctgccaccatgcccagctaatttttgtatttgcagtagagacagggttttgccctgttggcttggctggtctcaaactcctggcctcaagtgatccacctgcctcagcctcccaaagtgctgggattaaaggtgtgagccaccacgcccggctgtgtgaagcgtttttttattttttgagacgaagtctcgctgtgtcacctaggctagagttcagtggcaggatctcggctcactgcaacctccaccttccgggttcaagccattctcccacctcagcttcccaggtagctgggattacaggcatgcaccaccatgcctgcctaatttttgtatttttagtagagacgaggtttcaccaagttggccatgctggtcttgaactcctgacctcaagtgatccatccacctcagcctcccaaagtgctgggattacaggcataacatggcccggccctggccatgtttttaactgtgtttctctaatagctaataatgccgagcatctttttatgtgtttcttagccattagtagatcttttttggtaaaatgtctttttttttttttttggtccatcttaaaattgttttttgttttgttttgagacagggtctcactttgttgcccacgctggagtgcagtggctcaatcatggctcactgcagcttcgacatccctgagctcaggtgatcctcccacctaagtttcccgagtagatgggactacaggtgtgtgccaccatgcccagctaatttttgtattttttttgtagaggtggggttttgctatgttgcccaggcaggtcttaaacttctgaggctcaaatgatcctcccacctcagcctcccaaagtgctgggataacaggcatgaaccaccacacccagctaagattgtttttaaaaatctttttcttgagttttgggagtttttatgtgttagggataccagtcccttatgaggtatataattagcaagtagtttctcccactctgtgactgtgacctttctttttttgaggcagggtctcactctgttactcaggctggagggcagtggtgtgatcatggctcactgcaacctggaactcctaggctcaagggctcctcccacctcagcctcccaagtagctgggtctacaggtgtgttattgtgccagggttaatgttttaaattttttgtagagataatgtctctacaaaagacaccatctttgttgcctaggctggtcttgaactcctggcttcagggaatcctccagcctcagcctcccaaagtgctgggattacagcatgagccacatccagcctatgatttttcttcttttcttttcttttcttttcttttttttttgagatggagtctcgctgttgcgcaggctggagtgcagtggggcgatctcggctcactgcaggctctggcccgcggggttcacgcctttctcctgcctcagcctcccgagtagctgggactacaggcgcccgccacatcgcccggctaattttttgtatttttagtagagacggggtttcaccgtgttagccatgatggtctcgatctcctgacctcgtgatccgcccgcctcggtctcccaaagtgctgggatcacaggcgtgagccacggcgcccggccccagcgtatgacttcttaatgatgtctttgtagtacaagagtttttaattttaataaagttaacttttttttaaattgtacaagcttttagtgctgtgtctaacaacttgttgccaaacccaaggtcataaagctgttctcttacgttttcttttttttttttttttgagacggagtctcactctgtcacccaggctggagtgcaatggcacgatgtcggctcactgcaacctccgccacccgggttcaagcgattcttccgcctcagcctccggggtagctgggattacaggcgcacgacaccacgccctgctaatttttgtatttttgtagagaaggtttcaccatgttagttaggctgctttacgttttcttttagaagttttatatttttggctcttatatttagtttgtgatccattgagttgattttatgtacgtatgtatggtcgcgttcttttctttcctgtctttttttttttttttttttgcatatggatattcaattctcctagctccatttaatttgaaatgattgggcaggtacttttgagcagtgcaagtacagagcggcactgccagcagactacacgcggtagaaagccgaccttggtgagcgtgttggtgctcgacagtgagcagagaaaggatggacgattacggagcgccctcgtctccagttaccgctttctggaaacaccatccgccggggcggagctgttccgccccggtgcggtactacgactcccagcatgcacctcgcagtcggccctcggtggaagcgggaacccaggaggacctgggggtgtggcagcgaggaagggccgagccacggactgtggggccgaaactcgctcccgcccaccctttctcgaggctgtggcctccgcgagagccgagcgggccgcaccgccggccgtgcgactgccccagtcagacacgaccccggcttctagcccgcctaagcctgtttggggttgctgactcgtttcctccccgagtttcccgcgggaactaactcttcaagaggaccaaccgcagcccagagcttcgcagacccggccaaccagaggcgaggttgagagcccggcgggccgcggggagagagcgtcccatctgtcctggaaagcctgggcgggtggattgggaccccgagagaagcaggggagctcggcggggtgcagaagtgcccaggcccctccccgctggggttgggagcttgggcaggccagcttcacccttcctaagtccgcttctggtctccgggcccagcctcggccaccatgtcccgccagaccacctctgtgggctccagctgcctggacctgtggagggaaaagaatgaccggctcgttcgacaggccaaggtaacacggttgctggcaccctcggtttgcagcctcaagatccctgaaagcgggtttgcagtggatttaccccaaccgatggggagggactgagcttgaccaaagagccagaaatgactggagaatgcatcccttgccactgctgcaaggggagaaaaaaggattgatcctcagtgacaacccctccctcatgtggcaggtggctcagaactccggtctgactctgaggcgacagcagttggctcaggatgcactggaagggctcagagggctcctccatagtctgcaaggtaggcgggtcctccccaggatggtcagttcccctcttccatagccagagaaacatccgctcctgcgtttttgggatcgatataattactcggggcagggagtcctgtttaaggcacagaggagactggagtggaatcatctttgtacaggcaaatccctctcttccttacacactcacagagtggcatttgaaaaatggtttccaagatggtctgatctggataacttttttgccctttccagactctctgtccaaaggttgggttctttttttaaatccttagctaattggctggagggtgggttctttattgtagctgttttggttggagtggggtgatctctgagttgggattttatttggaggatcttccatgggggagcagtctgtaagaccaacattgttgctccagggctccctgcagctgttcctgttcttcccttggagctgactgtcacctgcaacttcattatcctgagggcaagcttggcccagggtttcacagaggatcaggcccaggatatccagcggagcctagagagaggtgagggccagagattgtccctgattcccct

SEQ ID NO: 3117 - DNA, 6000 bp, Homo sapiens
acagtgacagagaggatgtgtgccaccaactctcccctacacaaatgaacaagtcagatctgaatttgtaagtctttcgggacactgtccaccaaactaaacccatctgtgggccaaatggcaaccaggagcaatcttataagaccccaataaggttcatgaggggtaaagggcacaatttttatttcctaggttgggaaactaaggttcagaagacttgggcatgtagtcaagctgggaagactgcacatctgtggcttctcaggggttttcagctacagtgcaggctggtgtctgtcactacctaggactgtgacaggtgccatgaatcatttcttactgtcgatagagaagggaacaaatgcataaataatgtatccttccccctcaattactttgaaggatttccctgggctaatgttaacctctttcatgctacataagtgctcacccaagaataactgctccttccagaaagtctttgcataaggatgactgaccagaaatgtccagcttttgctagatgtgtgtgtgggaggtgtcctcctttctcagcttcctgcttcttgtctcagttgtcctctgaagcctccccatgtgcagattcatgcttcaccctgggtaaggaggagggcatggtggtggtgagagccaatgcaatggtgtccttcacatgctggaaggcatctgagatgcacctgttgggttttaagtaatagcttttatgtgtcctgcatgaaaacctggcttccttttgagttaatgtactattgtcactgagttgctgctgccccctatcattcaagagcttttttggaccgaagaaaacccaacagaggacccccgaggagacttgttctggcccgagaaggggctggacgagggagaatagtgagggcaacatgaaaccttttggaaacgggccagcccagagtgctccaagagccctgtgctgacataggacactgtcctgcacaagctgagacacaaatgatgctcaacctttttggcttcatctttaggaacttggcccctttattttgtgcttcaaacttcagtttcttgattgtaagcgcaaatgtctgcaggtgacaggagggtgatgtaaatgaacaaagcagccaggtgtcctcagctggggtctggtggggattgaggtgaatgggagagcagtgcccaatgcgggatcccagtgcccccgacccctgctgaaggttaccaaggtggggaggggactctaggcacatcatggccaaatctacccattttccaagagaagctagaaatccagatgtttatatgaatgcagctaactttgaaaagtggcagtgaatttgactttgcctaagacgcctcataggccaaagaaatcccacgtgcagtctgcaaggggctggtgcgtagccagctttgcatcccacagcctctggctgactggtcgtggattctggcacattgtttgggtaggataagggcatacacctgctatttaataacaatgttgtgcactctccacacataagtaacttgtgaaaatacaacaaagaatatctcataaagcttactgcttacttaaagctcatttccttctgtacccaaatgaaagacatctgcccatcaatgacctagtcaagccatggaagaatgagaagcacattttagagaatgtgttaataaaaacagttcaactataaacatttccaaaaaggttttagaatagagcatctctgaggatatccctttaagtaagtcaccatcacctgcattattgagatttaggggaaggtttaggggtgcagtcacaggaagctcaggacaacatctcagccacctgtgacctgaagcacagagcaggccaagtcccttgctgcatgcaatttgggagagctgtggccacaaagccgtgtagtgggatattctggatcctcaaacttctagtgggcattgcccactcctcaacacaggggcatcccaggcccagaagcttcagcatgtgtctgaactgaagggtggtggtgggtctgctggaaggccacctttgcctgcagacaaaattgttcttcccaattgagatgggggctttggggccattgggactgacataacaaagcaaagtgaggctgtatcatatgtcaaaaaggcagtttcctgaaattgaatactttaaaaatgtgagcagagtagaacagccccaggggtcgtcaatcatctcttctggtccaggctagctcaggagggactggaaatgcacccacccccaactcgaagccgggagtgttcattagtggccttcctctcggaggaggggctgaggcttcaggcctagcctttgttttctctggcctggcatgtaggcagatttttagcgtcataaattggagaggtgggtgctagcatgttaagtaaatcttatttccagcatgtcctggggacctgggactaatacattttaagaaatgtttaatagtaggccgggtgcggttgctcatgcctgtaatcccagcactttgggaggccgaggtgggtggatcacgaggtcaggagtttgagaccagcctggccaacatggtgaaactctgtttctactaaaaatacaaaaattagcccggcgtggtggcgcacctgtagtcccagctactcgggaggctgaagcagaaggatcgcttgaacccgggaggcggaggttgcagtgagccgagattgtgccaccgcactccagcctgggcaaccgagcgagactccgtctcaaaaaagaaaagaaaagaaaagaaaagtttaatagttttaaaagagtaatacctatattccaatcacttaaaattaacatattttatccaatcaaggcatatcatcattttatacatcaagaaagaaaagaaactagcgaacaaacggggcataatgccgcctggctccgcttccccctcccctctccccccgtccttaggagacacctctggagttcagaaatgctaggagagcaagctcttcattcttagaatccaggaagggccgggcttttgcagctctcctctgccaggaagccgctggggggcgcaagacgccagcttctcaccttggcagaagtgcctgcctgcaagcgcagaatggaaacttccccataacaaattcagaagtaccttgtacattcaccacccacctgaagaaagcctgaatgaaaggaacaaagccacggcgttgtttactttcccattatcgccccagtcttgcggcagggcccgggtttccatccaatccacccggcccgccactgtcctggccagtctccaaggcttcacccaaaaaaaggaagcaatgaggtgtcccccagcgcgccttttcacgtagcacagaaggtgctcagtgggtgaatcctctgaaagtgccagcgtgtatggtcaaacggcagcaacctctagcctattaaactctcccaagatctcttccagacttattccattgccggaaaaaaggctttttacatatgcgcatttaagtaattaagatatttcaacatggtataagacgtaggggctcttactccatcagtactggatgggaatttccttttgccctctactccccagggtaactgcagtcccacctgaatgcgttttgcagcccttactcgggttctatttatgcgcagcttggacagggctcactgggcccggccgggcagctccgtggccgtccctctccaccgcccttcccccgcgccaggccaatgcaagggtgtgtgtgttggggggaggggaggacaaaaggggttcaggatctttttaacctgcctgcagatggcgccccgggaaagattccgagctgcattacctaagctccaggggctgcagccgcggggtcccggccacagggcgtccagccgcgaagactgcacagcagctctccgtccttcccaactcgcgcggctgttcggcacccgtgcgaggaacggatggaagggaattacttgtagcagggccagtactgggggcgtgcactcagggaccacggagtggcactcagcctcgaccccacgcgccaggcagcccggcgacccccacgcgcggcggggtcctgcccaccccacccggcggcaggtggacagtgttgctatgaagagaaagcctcgattgtccctacagcaaaccgccacacgccagacctctgctattgtgcgccctccatagaaatgcaaacgagcggcgtgcgccggccgcaatctgctcgtccccgcccgcccccgtctcccgcgccccgccgcgctcggccaagggcggggaggtggggtgggatcttccagagacggctcaatgtacacattgagtatgcctggcaggcatcaccagcgcgctcgggacgctagtggtcagctgcagggggctgtgcccactgccttttgcaagcctctaactggcgctacctgtttttaccttaatttctggctccaatgcaacagtctcatagacttcaaattaaagaaaagaaacaaatagaaaggtagcaatacaaaatgcaaaaaaaaatccctttgcttctataaaggtgcttttcgcaaattgcagcatcatataagcaaacaaggtttttgtgggttgggttttttcttttttttttttttttactttttccttttaaggacttcaaaaaaaaaaaaaagccaggcgagatgaaatctgcaggctccagtctgcctggtaacaccccaacaaaagcggcagatttgaggcattgtcatcccccgcacccctccccacgtggccttctggcacgagccgctggctcgccgcctcatttacatcagaaagcgggtgccggccaataggcgcgcagcctcgcgccagctggcggcgccgcacccaccagcctatataagggcgcgcagcgtagtaggggcgcactcgctggtggtgggcgcgccgtgctgagctctggctgtcagtgtgttcgcccgcgtcccctccgcgctctccgcttgtggataactagctgctggttgatcgcactatgactctggaagaagtccgcggccaggacacagttccggaaagcacagccaggtgggtttcagggcgctgagaaagccgctggtcggtcggcgaccgtcagggttttccagggtgggaatccgcggggtaggaggggagcgcgggggtccgggcgccagatcccggttggagagccggggtgcaggcgctgagccgggattggagtgtggttggagttggggagccaagggtgtgtgccggtggccggggctggggtctccgccgcgccctccggccggctcccgctcactgcgctggctcctccgcaggatgcagggtgccgggaaagcgctgcatgagttgctgctgtcggcgcagcgtcagggctgcctcactgccggcgtctacgagtcagccaaagtcttgaacgtgtaagtgtagacgcggcccaggctgggagacaggggcgggggtgaatggcgaggagactggcggatgggaggggtggcggcgggagaactcggctagccggttctgacctaggtccccgccttgccctcgcagggaccccgacaatgtgaccttctgtgtgctggctgcgggtgaggaggacgagggcgacatcgcgctgcagatccattttacgctgatccaggctttctgctgcgagaacgacatcgacatagtgcgcgtgggcgatgtgcagcggctggcggctatcgtgggcgccggcgaggaggcgggtgcgccgggcgacctgcactgcatcctcatttcggtgagtacagtcccgtcctgtccccgccccagtgtcgttcccgcctcggcccgcggccagccaggctgaccctgctctctctccgcagaaccccaacgaggacgcctggaaggatcccgccttggagaagctcagcctgttttgcgaggagagccgcagcgttaacgactgggtgcccagcatcaccctccccgagtgacagcccggcggggaccttggtctgatcgacgtggtgac

SEQ ID NO: 3118 - DNA, 6000 bp, Homo sapiens
aacttgtatcatacatagttcagagaattcctacctatgtagggactgcagatatcctccccttatccctttcctcctttcccttccccaaataatggcaagtcagtgcccatactgtgtatcagtccatttcattttttgagatttccttgatggtctgctaatttggagacacttctggacaaatgataaatttctggcagtacaagcccaaagtagtaaggttttgttctagacactggagctagaatgaaatttaaaaatggttccttgcttttacactgttggtgggagtgtaaattagttcaaccattgtggaagacagtgtggaaattcctgaaggatctagaaccagaaataccatttgacccagcaatcccattactgggtatatacccaaaggattataaatcattctactataaagacacatgcaaatgtatgtttattgcagcactgttcacaatagcaaagacttggaaccaacccaaatgcccatccaatgatagactggataaagaaaatgtggcacatatacaccatggaatactatatagccataaaaaagggtgagttcatgtcctttgcagggacatggataaagctggaaacgatcattctcagcaaactaatacaggaacagaaaaccaaacaccacatgttctcactcgtaaatgggagttgaacagtgagaacacatggacacagggaggggaacatcacacaccagggtctgtcagggggtgagggatttggggagggacatcattagaagaaatacctaacgtagatgacgggttgatcggtgcagcaaaccaccatggcgtgtgtatacctgtgtaacaaatctgcacgttctgcacatgtatctcagaacttaaagtataataaaaaaattaaaaaatggttcctactctctatttacaaattatgaccacttcatccaaagatcacaaattctaaagtgatacaatctttctgggtagccttaactaaaagagctgtatcactcttgagttcctctatgcatatgccaatcatttcctctttgctacaccctgttttgaagtgtctgcccagacagtagtactcatcaaccaccaatctttgtgggatgagcaactgaccccgtagaaaactatctaaagggtctgttggctggattgagccaatcacatcctcttccctgagaatggggaccttgagatactgagctgattagataatggttagttcttgggctgaaatttcgtatagaattgtgaccaccttctgaactacagcataaaagacgtgcaagctgggggaacaaaaaaagccacagacagcagagacagcagaggcagctagtgtacagagagatgtgcttgaacggagcagaaatgtggacaccctgagatgtggcaggagcttctagttccacttcctatttggaccagctaaaccttttctttccttgggtgttgttcatgagatctttggtcatagccttttcataacacctcttcccccatttgacttgtgctagttgagtggatttctgttctagagctgaaatgcagtgccagcagaatctagtgcaatagagtcttatgtaattaaagtcctaaagactctttgggttgtgagacacacaaaaagatagaaaaccaaggttgataatcagtacaaaataactacatgttggggtacccttcagtcagtcaatgtcttcctcaccggtaggcatttagtgactcgttcaccacccttccctcgtcgaggctaaagaatgcctacgtcatttcatcttttctcaaaaaagaaaaacattctgctgttttctgcttctttattgatcacatttgtccttaattccttcatataacctcaggtagaatattagtctaggtgccaggggatgtgggttctgttcttgttggggttctaacgggatggatggtctctgtaaggttcttcatctctctgtacccctacccccacacctttgccggacagtgaagagttatgctgatcaccgatttctagctgataactcccacaaaacaaggtgtgaataaagagtgtgaagaaatcaagctacttcacaggcatttgctatagatgaaataaatatgcctatccctcacttaatgatgttaattctaagaatcctgccagtaagtgaaaagctagaaaatgaaaaattacttctgttaatttttttgttgttgttttggttttgttttttgagacagagtcttactctgttacccaggttggagggcagtggcgtgatctcccagctcactgcaacctccacgtctcgggttcaagcaattctcgccacagcctcccgagtagctgggattacagacatatgacaccacgcccaactaattttttctatttttagtagtgacagggtttcactgtgttggccaggctgggctcgagttcctggcctcaagtgatccacccgcttggcctctcaactgcagccggctaacttatgttcattttagtggtaaaagttatgatgtgttccatcccaacctaagatgtccaaatactttctacaaatagaaaaatatatcattgagcaatgaaaactttttattagtaaataatccaaaattaaataaatgtaattggtacataaaatgtgttaaaatgatgctttgttgcctcaataaaaaagaggaggcggggccgggcgcggtggcttgtgactgtaatcccagaactttgggaggccaaggcaggcgaatcacgaggtcaggagatcgagaccatcctggctaacatggtgaaaccctgtctctactaaaaatacaaaaaaatttagccaggcgtggtggcgggtgcctgtagtcccagctacttgggaagctgaagcaggagaatggcgtgaacccgggaggttgagcttgcagtgagccaggatcgcgccactgcactccagcctgggcgacagagcgagactccatctcaaaaaaaaaaaaaaaaaaaaaaaaaaagaagaggcttgatgggattgatggaagagggaaggagccatactttggaaggtggttggtgagtcaggtgataaacttttaaggcgtgcattcagcagcaaaagtgcttaataatatttttcattggggattttgacagtagaagaaactcctaatgtggaaacctttggtatattggtagaagggaatcttcagatcaaaaaaaaaagcaagatgtaactttgcttccctttttgtaatttgcaattcatacacctccttgcaggatgcgatattagtttcccgaagctgttatagcaaattactacaaacttgttggatcaagagaacagaatcatatcttgttgcagttctggaggccaaaagtgtgaaaactgacatggccacattccctctggggacaccttcctctcacttctggcggccagcatggcattcctgggcttgtggccgcatccctccaatctttgcttctgtcttcactttgctgcctcctctgtgtctgtctccaacttgctctgcctctgtcataaggttgcatgtggcctaccctaccctgatattccaggacaagctccttctctcaggatcctgaatgttaccactttgtagtagttgttgttgtacaaggtaatagtcattcctttgccatgtaaagtaatattcacaggtcccatgtgctagtgtgggaatgaggtgccgacatttgggctgctaattctttgttgtgggagactgtcctgtgcttggtagatgttcagcggtgtacctggcctctgcccactgggtgccagtgacatccttctcccagctgtgacaaccaaaaatgtcttcaaacattgtcaagggtcccctctggggcacgactgtccttggttgatgagcactgctttaacctaatcagagcccattcttatcccactcaaatatgctgactgggaagtttccagtctcgttaagaagggggagggtggagaatggatgctggagaggtgactgctcctctccactacacctaacattctagtgaagtccacaaatgggccaaatcgagcaggattatgaaatttttgctagacccctgttagtgtattctaacattgtggcattttatattagtcaactaaatctcaatattatgttttaaaaaaatccaatggacctctgaatccccaggttgggttttttctactttacctatgttaaatatgttaaatacctaggttgccctttatcttagaatttgtccatgtatcacctcattctttttcagcaggtccctttctggaggttttcatactcagttggatttatcctccctgcgactgctgcctgctccttgccttgccatgcggcattagtagagtatgaactgcacatttagcacagcagtttatgcactagagaatcaggattggaatttttctgaagtatcttatttttctgtgaaataattgaaacagagtatagacacatttgctgttttgaagtttttatgatttccaaagtaataaatgtgcactctcacagttctcgggtggctgatctctggagtgcttgccgtttctccgggtggttgctttgtacaggctcccctctcgtgttggcctgcaagtgctctcgctgcgacgggtccctgaccggtactggatgagaggactagtactggtgcagatgttggcataaacaaaagctgcagctttttaatcatgactaaggcatgggagaggctgacatataattgtggggaaaagcgagagagatcagattgttactgtgtctgtgtagaaagaagtagacataggagactccattttgttatgtactaagaaaaattcttctgccttgagattctgttaatctataaccttacccccaaccccgtgctctctgaaacatgtgctgtgtcaactcagagtggaatggattaagggcggtgcaggatgtgctttgttaaacagatgcttgaaggcagatgatcaataaatactaagggaactcagaggctggcgggatcctccatatgctgaacgctggttccccgggtccccttatttctttctctatactttgtctctgtgtctttttcttttccaaatctctcgtcccaccttacgagaaacacccacaggtgtgtaggggcaacccacccctacaataatggttcccagagtgtccctctcagaccaataaaacatagcaaaactacgtgataaccaggctggaatgtatgtgaattgttcgagtgagtctgtgtcacttgaactgtactgggcagtacctaggggcttcatgtaaggcatgaagggctccagaaagaacccgctctttgccttcagttgtattctatatgtttaatacacagcacagcagaagcaatcagctctccccaatgttacttatcccataaatcatctttccttacacctacgtattttcttctgtattcaattttattaatggatcatctgatctccagctttgctggtttagaacctctgtgctcatcttaagctcctcaaggagaaaaggactattgtaatcatctttcaacgagtttgtaaaaacaattcccccatcacagcactgtgcctcatagggtttaaaatttgaccgaatgactgactttacatacatccttcccagaccctttaggactactgctcccctagaggttttctctgccctttggaaaacaggtaggggaagagggatctagaaatggcagtattcattaagatagccaaagcttgataggaagagacattcattttactgtggtaattaaagtgaaaatgggagaataagaaggcatgctgcttctttttcaggagtcttggcaagggttctagttttaaaagaaagagacacagccaactagattgaaatgatgtggagttcatccctccacagtcatattttactgagccatttttcaataaatggactaaattgtcccttggaactcagtaggtggtgctcttgtgctatagcatagcat

SEQ ID NO: 3119 - DNA, 6000 bp, Homo sapiens
aggctcctatgtcatgggaaacttacatgcaatgtctatgctttgctcctgttaatcttttattatggaggcctcagccatgaacctaggatgggtacagaaaagccatttttcattccctatagtaatctcgcaataggtatctattgattaatttatcaaataggctcagccaaagtgcgaatgcccagtgacacaatgaagagctgccacctccaggttcttagtcagggcttgctttgcagtgagggagagaaactcactgaagtcagcataggtaaagggatgactgttgcaaggatatggggcaatcctgtggacaactaagaacagaaaaaatatatagtcagttaaccttaaaattaggcttaaaaataaaaaataaggaatggaagctcccctctctctcacagaataaataacagcctttcaacgtcattttgcttttctctgccagccaactttctttgctacttacatatttttcttccccaagtaactccagttggcatgagggctttagctcctgttgtatagagatgttacagtctctcagtgttgcaattccaaattccccagcaatagtttgattggttcagctagggtcaggctaccatctctggttcaattagctgtggctagtaatggaggctctagtacaaacatgtcctcctaggtgcattctttcagcagagcctagggagtgagcatatcgggggcagggtagaagtggcagcttccatgcagcatttataatacatttccctttttccatgaatttccatctcctgcagccatccctttcttggccttttccccttcacggtggcagatcaaagcccttcactattatctgctccgtttcttaaagtgtttctggcacaaaaaatattctcattgttctcttctctagttcaacttacatttcctcagttggaatgttttaatgggaaagtaatgtggtgattagagtgcagaagcctctgggatcacctcaccctattttcaagtcaccagcctgggccaggagcaagaacattataagtaagaggccactgtaaatggagttgaagccaggttccaccctccactagaagagatggctctgtgcatgagtttctgtatctgtgaaagtggaatattaccactgtggattacataagatcactgtgagaatcaaagggaataacccaggccaaggagttagcccagtgcctggaacttcaacacgcattattcacaactgaggtacaagaggcaaatatcaaagccatggacaagatagtgttaagggcgtgatggcatgtgcctgtaatcccagctactcatgaggctgaagcatgagaattgcttgaaccggtgaggcaaaggttgcagtgagctgagctgagatcatgctactgcactccagcctgggcgactgagtgagactctgtctcaaaaaaaaaaaaaaaaaaaagaaaagataatgttaaatgttggggtgccaaataaggactggaaaccaggtgggtggtgtctgaactaattctggaagtaggagtcttggtacaatggtttccacaacgtggattctaagacagttgattctatttgttgaactttgaaggaaggtttgataatgtcaggaactttgcagcactcagccaattgacttgttttcctctagaatgtaaagatttaatgtaaacgatgtaataattttcacctaaataggccatttttcattttgcgacattatttgtgattgggttctatactacaaccaaaactgtgttccagagtaacacacacctgggcccggtggcccacgcctgtaattccagcattttggtgccactgaggtggttggattgcttaagcgcagaggtcgaggctgcagtgagctgtgtttgcaccactgcacttcagcctgggtgagagtgagatgcagtctcaaaacaaacaaatcaaaaccacacacacacacacacacactcccacacacaaacaaaaattggatcacccataatcaattttatgattcaattaaaaagagggtttgtattgaaatatctgtttctctggaaactttctgggcattttacaaagtgaacatctcactattgcttaaaatattattaagatagttccatgtatatgaatgccaggcaaaatgaatccctataaatataagtttggatctttatgctatatatgcttcctatttaggtctaatttaggcctaaacatggtgtcatttcatatactgcaaagttggatgagcctagcaattctttattaaccactgaactaaaaagacagaaaactgggatatggcaagacatcaatcattaacaaacactaaaaatgatttttcagcgaatatgtaaaaggatgtgggtaccaaaatagataatttctctcaagaaatacatactttaattgctttctttgctgataaatgcagaacttaaacgtcaactcactctcgatttgttaccacagaggtgactttctcatggtcaaggtgccacgatgagtgcccctcaggcatgtatttccctacccaggacttgcttttgatttatccatgtcacactatgcacacatcaaaaacacatcgacctctctgctgtaaaacagaacgaaatcatgtcctttgcagcaacatggatggagctggaggacattatcctaagtgaacaaactcagaaacagaaaatcaaatattgcatgttctcataagcgggagctaaacaataggtatacatgtacataagaatgggaataacaagacactggggactccaaaaagggagagggtgggaagggggtgagggctgaaaaattagctattgggtacaatgttcaatgtttgggggacaggtacaccagaagcccaatccccaccattacacaatatacctatgtaacaagcaagcacatgtacccccgaatctaaaattaaaaaacaatcaaaaagcaccgacttccttaactggcatggaatagtttcgagaatggatgtaaacaccgaattccttaatgtagttgcagattctgccagttttgtctcaacctctggatcggttcctttttttaactacctttaattcttaaacagattgttgctattgctatgctatatacttattgtatcacttataaatgtataacctctgcaaattagtctctgaattgaaagtattcattggtaaaacgggtatttcttcaccataggaatagttggacatgtttaaatacttgagagctatttttattacaagcacacacagctttgtggtgttttttgttgagacagagtctcgctctgttgcccaggctggagtgcagtagtgcgatcttggcttactgcaaccttcgcctcctgggttcaagcaattctcctgcctcagcctcctaagtagccgggagtacacactaatttttgtatttttagtagagacgggtttttgccatgttggccaggctggtctcaaactcttgacctcaggtgatccacccgcctcagcttcccaaagtgctgggattagaggtgtgagccaccgcgcccggcctgtagtgtgtttttgaacgtatatgtgaagttgtagcttttttttttttttttttgagacggagtctccctctgtcgccaggctggagtgcagtggcgcgatctcggctcactgcaacctctgactccctggttcaagctattctgcctcagcctccagagtagctgagattacaggcgcccgccaccgcgcccggttaaacgttttgtatttttagtagagacggcgtttcaccatgttggccagaatggtctcgatcttctgacctcgtgatccgcccgccttggccttccaaagtgctgggattacaggcctgagacacagcgcccgacctaagctgtagttttatgattatgatttatggttgtgaggcattgatttaagacattttaaagcttaagtcgtcagatcctagaagaaaaaaaaattcaccaagacaagctaatgccattgtcataaatgggagtttggagaaaattttattaatatttgtttgggtggtttatgtacagcgttgaactgatttgaaccccgaccaaacactgtatggaactaatgtacggtaggggaaatcattaactgaagatgccttttttgttgctattgtttagaacgcagttagaaaatcttattttagaggttttaccccgttgacaaagcctcaacttttcttcaaaagaactaatttccattttacctcccctacattttgaacagaatatggaagaagccagcgccccttctccgcgggcgctgctgcaaccctgctcccgccggggcttccgcgcgaaaccgggaacactggagcagtaccgactccgctcgcctagaacccgccccagccgggcccacttccgccagagccctggccgcgcccgccccgccccacggacccgagattcgtcggaattttcccgcgacgccgcgggagcgcgcggggccgctagccaggccccagaatgcactgctgacacgtgtgcgcgcgcgcggctccactgccgggcgaccgcgggaaaattccaaaaaaactcaaaaagccaatacgaggcaaagccaaattttcaagccacagatcccgggcggtggcttcctttccgccactgcccaaactgctgaagcagctcccgcgaggaccacccggtaagcggcaggccgcagaacgcagcgagggcggaggcttccctcgggggtctggccgacacgtcagcggcgagagcgggaggaggaggcgaggggcaagagggaaggctcgcgagagcgggtgggccaggcgcgccttgcggtgggcgagaggggttcccgccggcgcagggctgtggctaaggctgaggcgggaggcgggaggcgggaggcggaaggtggcgggcggtgccagcccgcggggcggggccagggcggggaaagcgggggcgggagccggcgctggggtcgcgcggaagggagcccccggagaggcgggagccgggtgttggcgttttggttctttttgttcattgagcgcaggcagctatgtcttcttcaaaggagaggagcaaaggtgaatttctctgcctcggactcgtgggagccgtgaaaagctcgcccctttgagccggtcgccctctacagctggcctcgtcctccccgtccctcacacccctgcccccaaaccccattcgccggggcgccaggaggggcgaggtccaattagaggagcccggggcgcggctgttacccctcccgccctccgccttttattcccggagggaggcgggttcgcagaggccagtgtcttccctccattctttttgtggacgccaggccatatcttcaaagcccgtgagagatttttcaggtgctgtttgttggtttgctctttttaattttttaggtgggtgcgtttacaactacgaaccctctatgatcttatgtgtccagcgcaccgaatgggggaaaagacttggagttttataacatgggaaattgggtaccagaatcttaagggaagagaccaaggagttttctagcaaagtcctgtatgtgcctggacttttgttctaatctgaaacttggaaaactcccgggcatctgattttattctaacttgtgccccatttaatgcatctaaactgtgatgtgatttgacttagcatttatcaaatgagcagagcacttttgggccacccaacttcagctctttgtggctgtcactcactgtcagtgatatgccctcagacagatcgttttctccttactcccctgaaaggttgttacaaacagtagaattcataccatgtgttgagatcattcattacctaagcttagatggaaaacatgttcattgcgactttatacattaaacttgaattgatgtttcaatgttatgtgctgtaccagagtcacctggaaataagcactcatatacattattcatatacaagaaaggctgcatcgaaaaaga

SEQ ID NO: 3120 - DNA, 6000 bp, Homo sapiens
gtgattgggttgagaacatgcttctgctaaatacagcatgttgatatttgaaaacatggcagaagctggaaagtcactctcaccttccctcctctcctttctcctgatgcgggtcataaaaccttggaatgattttctgaacttcccctgaagcaggtcctaagaccctcatgtaagaagtgctgcctatatccacagtacctatctccacaggaaaggtactttcttacctctgaagactgacgggttacagagaaaaatctgaacaaataagccttgctaaattccccccaagtttattcccatctttgttcaactgtatctccccacaactgtccactcttcatgaaacctggcatagaaacacacaagtttaacagcttctctgggtcttcctttccttaggaaggctcctatgtcatgggaaacttacatgcaatgtctatgctttgctcctgttaatcttttattatggaggcctcagccatgaacctaggatgggtacagaaaagccatttttcattccctatagtaatctcgcaataggtatctattgattaatttatcaaataggctcagccaaagtgcgaatgcccagtgacacaatgaagagctgccacctccaggttcttagtcagggcttgctttgcagtgagggagagaaactcactgaagtcagcataggtaaagggatgactgttgcaaggatatggggcaatcctgtggacaactaagaacagaaaaaatatatagtcagttaaccttaaaattaggcttaaaaataaaaaataaggaatggaagctcccctctctctcacagaataaataacagcctttcaacgtcattttgcttttctctgccagccaactttctttgctacttacatatttttcttccccaagtaactccagttggcatgagggctttagctcctgttgtatagagatgttacagtctctcagtgttgcaattccaaattccccagcaatagtttgattggttcagctagggtcaggctaccatctctggttcaattagctgtggctagtaatggaggctctagtacaaacatgtcctcctaggtgcattctttcagcagagcctagggagtgagcatatcgggggcagggtagaagtggcagcttccatgcagcatttataatacatttccctttttccatgaatttccatctcctgcagccatccctttcttggccttttccccttcacggtggcagatcaaagcccttcactattatctgctccgtttcttaaagtgtttctggcacaaaaaatattctcattgttctcttctctagttcaacttacatttcctcagttggaatgttttaatgggaaagtaatgtggtgattagagtgcagaagcctctgggatcacctcaccctattttcaagtcaccagcctgggccaggagcaagaacattataagtaagaggccactgtaaatggagttgaagccaggttccaccctccactagaagagatggctctgtgcatgagtttctgtatctgtgaaagtggaatattaccactgtggattacataagatcactgtgagaatcaaagggaataacccaggccaaggagttagcccagtgcctggaacttcaacacgcattattcacaactgaggtacaagaggcaaatatcaaagccatggacaagatagtgttaagggcgtgatggcatgtgcctgtaatcccagctactcatgaggctgaagcatgagaattgcttgaaccggtgaggcaaaggttgcagtgagctgagctgagatcatgctactgcactccagcctgggcgactgagtgagactctgtctcaaaaaaaaaaaaaaaaaaaagaaaagataatgttaaatgttggggtgccaaataaggactggaaaccaggtgggtggtgtctgaactaattctggaagtaggagtcttggtacaatggtttccacaacgtggattctaagacagttgattctatttgttgaactttgaaggaaggtttgataatgtcaggaactttgcagcactcagccaattgacttgttttcctctagaatgtaaagatttaatgtaaacgatgtaataattttcacctaaataggccatttttcattttgcgacattatttgtgattgggttctatactacaaccaaaactgtgttccagagtaacacacacctgggcccggtggcccacgcctgtaattccagcattttggtgccactgaggtggttggattgcttaagcgcagaggtcgaggctgcagtgagctgtgtttgcaccactgcacttcagcctgggtgagagtgagatgcagtctcaaaacaaacaaatcaaaaccacacacacacacacacacactcccacacacaaacaaaaattggatcacccataatcaattttatgattcaattaaaaagagggtttgtattgaaatatctgtttctctggaaactttctgggcattttacaaagtgaacatctcactattgcttaaaatattattaagatagttccatgtatatgaatgccaggcaaaatgaatccctataaatataagtttggatctttatgctatatatgcttcctatttaggtctaatttaggcctaaacatggtgtcatttcatatactgcaaagttggatgagcctagcaattctttattaaccactgaactaaaaagacagaaaactgggatatggcaagacatcaatcattaacaaacactaaaaatgatttttcagcgaatatgtaaaaggatgtgggtaccaaaatagataatttctctcaagaaatacatactttaattgctttctttgctgataaatgcagaacttaaacgtcaactcactctcgatttgttaccacagaggtgactttctcatggtcaaggtgccacgatgagtgcccctcaggcatgtatttccctacccaggacttgcttttgatttatccatgtcacactatgcacacatcaaaaacacatcgacctctctgctgtaaaacagaacgaaatcatgtcctttgcagcaacatggatggagctggaggacattatcctaagtgaacaaactcagaaacagaaaatcaaatattgcatgttctcataagcgggagctaaacaataggtatacatgtacataagaatgggaataacaagacactggggactccaaaaagggagagggtgggaagggggtgagggctgaaaaattagctattgggtacaatgttcaatgtttgggggacaggtacaccagaagcccaatccccaccattacacaatatacctatgtaacaagcaagcacatgtacccccgaatctaaaattaaaaaacaatcaaaaagcaccgacttccttaactggcatggaatagtttcgagaatggatgtaaacaccgaattccttaatgtagttgcagattctgccagttttgtctcaacctctggatcggttcctttttttaactacctttaattcttaaacagattgttgctattgctatgctatatacttattgtatcacttataaatgtataacctctgcaaattagtctctgaattgaaagtattcattggtaaaacgggtatttcttcaccataggaatagttggacatgtttaaatacttgagagctatttttattacaagcacacacagctttgtggtgttttttgttgagacagagtctcgctctgttgcccaggctggagtgcagtagtgcgatcttggcttactgcaaccttcgcctcctgggttcaagcaattctcctgcctcagcctcctaagtagccgggagtacacactaatttttgtatttttagtagagacgggtttttgccatgttggccaggctggtctcaaactcttgacctcaggtgatccacccgcctcagcttcccaaagtgctgggattagaggtgtgagccaccgcgcccggcctgtagtgtgtttttgaacgtatatgtgaagttgtagcttttttttttttttttttgagacggagtctccctctgtcgccaggctggagtgcagtggcgcgatctcggctcactgcaacctctgactccctggttcaagctattctgcctcagcctccagagtagctgagattacaggcgcccgccaccgcgcccggttaaacgttttgtatttttagtagagacggcgtttcaccatgttggccagaatggtctcgatcttctgacctcgtgatccgcccgccttggccttccaaagtgctgggattacaggcctgagacacagcgcccgacctaagctgtagttttatgattatgatttatggttgtgaggcattgatttaagacattttaaagcttaagtcgtcagatcctagaagaaaaaaaaattcaccaagacaagctaatgccattgtcataaatgggagtttggagaaaattttattaatatttgtttgggtggtttatgtacagcgttgaactgatttgaaccccgaccaaacactgtatggaactaatgtacggtaggggaaatcattaactgaagatgccttttttgttgctattgtttagaacgcagttagaaaatcttattttagaggttttaccccgttgacaaagcctcaacttttcttcaaaagaactaatttccattttacctcccctacattttgaacagaatatggaagaagccagcgccccttctccgcgggcgctgctgcaaccctgctcccgccggggcttccgcgcgaaaccgggaacactggagcagtaccgactccgctcgcctagaacccgccccagccgggcccacttccgccagagccctggccgcgcccgccccgccccacggacccgagattcgtcggaattttcccgcgacgccgcgggagcgcgcggggccgctagccaggccccagaatgcactgctgacacgtgtgcgcgcgcgcggctccactgccgggcgaccgcgggaaaattccaaaaaaactcaaaaagccaatacgaggcaaagccaaattttcaagccacagatcccgggcggtggcttcctttccgccactgcccaaactgctgaagcagctcccgcgaggaccacccggtaagcggcaggccgcagaacgcagcgagggcggaggcttccctcgggggtctggccgacacgtcagcggcgagagcgggaggaggaggcgaggggcaagagggaaggctcgcgagagcgggtgggccaggcgcgccttgcggtgggcgagaggggttcccgccggcgcagggctgtggctaaggctgaggcgggaggcgggaggcgggaggcggaaggtggcgggcggtgccagcccgcggggcggggccagggcggggaaagcgggggcgggagccggcgctggggtcgcgcggaagggagcccccggagaggcgggagccgggtgttggcgttttggttctttttgttcattgagcgcaggcagctatgtcttcttcaaaggagaggagcaaaggtgaatttctctgcctcggactcgtgggagccgtgaaaagctcgcccctttgagccggtcgccctctacagctggcctcgtcctccccgtccctcacacccctgcccccaaaccccattcgccggggcgccaggaggggcgaggtccaattagaggagcccggggcgcggctgttacccctcccgccctccgccttttattcccggagggaggcgggttcgcagaggccagtgtcttccctccattctttttgtggacgccaggccatatcttcaaagcccgtgagagatttttcaggtgctgtttgttggtttgctctttttaattttttaggtgggtgcgtttacaactacgaaccctctatgatcttatgtgtccagcgcaccgaatgggggaaaagacttggagttttataacatgggaaattgggtaccagaatcttaagggaagagaccaaggagttttctagcaaagtcctgtatgtgcctggactttt

SEQ ID NO: 3121 - DNA, 6000 bp, Homo sapiens
cagttgatgggcagttgggtagtttccagcttttggttattgtgaatagtgctacgtgaacgtttgtgtgcaagtttttcttcacacacctgtttttagtcttgtgggaacatactcatgagtggaattactgactcatatggtaatcctatgtttcgtgttttgagggacaaactgtttttcgtggcagctgcactagtttacattcccaccaataatgtatgagggttccaattttttttacatctttgccaatacttcttttcttttctttcttttgttctttttttaaattctagccatcatcattaaagaccataaaggccactttgattaagtctctttgggaggtttgagggccatcttctagttttttaagtttctttcagacgttgggggctgactgggaaatgaagtgtaaatgggtaggtagattctgcccccattggtatcagggcttaaggtggtataattagttatggcctctgaaatgcgggagaagaaaagagcagggttttcattggggccttgagtgatttcttttatcttttcagagtttacagccttaagggcagctttatccatgccagctaggaggcatgatatcatatagcttcgtttctgtctgtctgaggaaactgcttcataatcccaattggggtcagttctggggacagctagggtccctataaggttatgggcagcatcttgttggtggagggtgtctgcatgggcctgggtggttgtctggatacattccctgtcatccgggatgagggaggagtagaggatgacataaacgtcatgccaggtaaggtcataagattcagtgacatacagaaattccttgtgggaggagctggggtcggtggaaaaggagctaagtctctttttaagctgggagaggttggctagggagaagggaacatgaacttggactatgccttcggccctaacacctttctcaagggaaggactttgtaagacctttggtagtgggagtgacctttggcagaagggggttgggtgcaagaccgggtgtgcagtggagaaggaaggttgggatggaggaccaggataagggggtgggggagcggagccgaaggagaaggaggaggggatggtggtgggagggggactgagagagggggtttgttggcagggttgaaattacaggaggaaggcttgcctggaggtgtgaagtggtatctcactgtgccttaatttgcatttccctaatgactaatgatgaatatattttcatgtgtttgttggccatcagtacatcctcttcggaaaaatgtcaatttaagtcccttgctcatttttaaattgggttgtctttctgttgttgagctgaaagtgtttgttataaattctggatactagacccttattggatatctgatttgcaaatattttctcccattctgtggggtttttaccccaattttcttcatagtgttctttgacgtagaaaagttttcaatttttttttgacctctgaactttttattggcctcctgctccccaaagtgtaccctgcttctgctggcttaatgtctcagaactttggtgtcgttggtcagacaccactttgccatccactatccggcgggtggtggtcttttggatggtttgcatggagttgctgctgtccagggcatcaccaagattgaagtccttgccatcctccagcaggcagcagtaggcagtgctctcagcctccagcttgaccttgatgttcagcagggccttgtactcttgagcctggcactgtccctctgcccgggtctgtgccagctctgactccaggtgcagcaggatcccgttgagctgctccctctgcaaggcatagcgggcctcgacctccctcaggctgttctccaagctggccttcagatttctcatggagtccaggttgatcttcaaggactggactatacatctcagctccgtgagcatcatcccagcagctccaacctcggtggactgcgtggtgaccactgaggtgctctcctcaatctgctgagaccagtatttgtccagctcctctcagttcttccgagccagctcatcatattggggccggatgtctgccatgatcttggcaaggtcccgagactgggggcatctacctccatggtcaacccagagctggcaatctaggcttgtaggccttttgtaatgcccaacctcatttttcctttttcacctaggcttgtttccacctgaacagactctcccttagctaagagaaccagacaaactccatcttggctctttcactggcagccccttcctcaaggacttaacttgtgcaagctgactcccagcacatccaagaatgcaattaactgataagatactgtggcaagctatatccacagtccccaagaattcatctgtttgataacgcccaaagccctgcatctataaccttgtaatagtcttaaagcccctgcatctggaactgtttactttcctgtaaccatttatccttttaactttttgactacttaacttctgtaaaattgttttaactagacgaccccccctttctaaaccaaggtataaaagttaatcaagccccttcctcggggccgagagaattttgagcgttagccgtctctcggtcgccggctaataaaggactcttaattcatctcaaagtgtggcgtttttttaactcgctcgggtacaacacttttacttcctcttcgtggttcttcttcatgaagagcagctcctccttgagagcttcgatctctgtctccagctgcagccgagtgacactggtgtcatcagtgacctccggagcccatggatgtggctctccacagactggcgcatggccagctctgtctcatacttgactctaaagtcatcagcagcaagaccagcattgtcaatctgcagaacaatgcaggcattgtccacagtatttgtgaagatctgagtcctcaggccctcaatggtcttgaagtaatggctcatctctgacctggggtcccttcttctacaggtgctcctggattttactctccagcttccagttcttggcctccaggctcctcattctgtccaggtaggaggccaggcagttgttcaggttttgcacggtctccttcttgttctggatgcctctcattcctgccagacccctggccatccccgcggccaggcccccggaacccatgctgctcaggtagctggtggagcgggacatggagatccgggaaccagagcccccgtgcctgtacagacgctggctatgctgctgaccagccggacaccgtagctgggtgcctggacagaacccagggaccggtagttggtggagaaggtggagcgagtggtgaagcttatgctgtccagggaggagagtgagaggacaggactcaggctttgccgacgactttaatttttttttgagacaagatgttattgtgttgcccaggctggagtgtagtggtgccatcacagctcactgcagccttgacctcctgagatgggttcttgttacattgcccaggttggtcttgaactcctggtctcaagcaatcctcctgtgttggcctcccaaagggctgggattacagacatgagccactgcaccttgccaattattattattttttaatagtgacagggtctcactgtgttgcctcagcttgtcttgaactcatgacctcaagtcatcctcctgccttggcctcccaaactgttgagattacaggtgtgaaccactgtgcccagcctagtttttaattttaatgaagtccagctttttttcttttgttgcttgtgcttttgatgttatggaatttgaaatagtttcacctgggcaagattgatgggtagggagaaagaaggatctgaggggaagggagatggggatggcttgagattctatctccaattcaacctaagatttcagcaggtaactgctttatacgaggttttgcagctttatgtatatatgaccgataaattagaacactgaattgtgtttctgaaaggttaaccattgaacattagtgggaaacatcagtgtgtgaggttgtctttctaaaagccagtcctaaatggtacatgtagtaattagaagttaatgttttctggtttcaattaagcattatttgtaacaaagggaaagcatacatttttgggaaagcctgctatgtttcttttgttacactagccacacttttgggaagtcaggatatttggcccagatccaaacccactgtctacctggcagtagctcatcctcactgaaggaatattccatgggaaagatagccaaccttatgcatatcagccttggagcaagtcctgcatttgcctgaggtcacacagcaagttaactgggagtttcaacccaggtcttctcattttaaatctaaggctgtgtctctaggccgtgtatccaacataaaatcaggactatcatctgttgggctctatgactggcactactactactcactgttaccattttttgaggtcttctacgtgccaggttattgtcctggcaatctaatcctcccaaagactcggtaaatggttccataattatcctcattttaccactgaagaaactgaactctggttaaataacttgcccaaggtcacacagactttaactgtcaagagctcagacttaacccaggcctgactccaaagcctatactctgaatcaccaagcgagacctattttaaaggtgaccaggtcgtgagatatgatctcagcacggacccttctcccggatgacaagagagcaggtagttaggcgggtactccgtgtccgcgcatacccagactccgcccagcgcccgggcaggccaccccgagccccttaactgcgcaggcgctctcactcagaaaggccgctgggtgcggggagcgcagaggcggtgcagggcggctggctcgcctcggcgtgcagtgcgcgtgcgtggagctgggagctaggtcctcggagtgggccagagatggcggcggccgacggggctttgccggaggcggcggctttagagcaacccgcggagctgcctgcctcggtgcgggcgagtatcgagcggaagcggcagcgggcactgatgctgcgccaggcccggctggctgcccggccctactcggcgacggcggctgcggctactggaggtttgggccgcgtccgcgctttccccttccctctccccgcctccccggtccccagactggctcgtgcaagccgagtcccggggcccgggggtcgcgtcaactccgctggcgtatgtgtgcagattctccccgagtcggagagggaatccgcccagccagccgccttgtcaaagcgtcctgtccacgaccacagagcgttcctctgtcgcacgcgggcctcctgacccccagccccgggccttcttcgctgcacctcggctgctggcagcttcgatttttcgtttagggatgcagccgccccggccgggaggtgtcagccactgccaggtgtcagggcctcagctgtcccggaaagaggagttagactagttcttgattctggcctctatacctagaactagttgatggaagaggcagatcttggtgtttgttagggagagctttcaacaattagagttgccaaaagtgcaatggattgcttctcatgagcttcccgttactagaagcgctcaaataggaactggaagaacgcttacttatgtggaggagaggagattcagcaatcagaatctcctactcagcaatcagaagaagggactggatagtaaacctttaagattctaatccatagattccatgagtctatttcttggacatgtgacctctgcgatttcttggcaaaaactagttgctcaaaacgtgtttattgattgaagtaaattaaggactgatctctcattgcagattattctcttatagaatttgccactggggtcaactaataatctttaacaggatacttaaaatatagtttggttgacaggcagttc

SEQ ID NO: 3122 - DNA, 6000 bp, Homo sapiens
ttagttcttaacaacgacaaaaagtttaaaaagtaaaaaaacaaaaaaagaaaaaaaatggccagaggcaatggctcgtgcttgtaatcctagcattttgggaggctaaagtgggaggatctcttgaggccaggagttcgagactgcagtgagctatgatgatgccactgccctccagcctacatgacagagcaaggtcctgtctcaaaaaaaaaaaaaaaaaaaaaaagcttatagaataaggatataaagaaaatattttttattttttatagctgtacaatgtttgtattataagctgttattaccagtcaaaaagttaaaaaaaaattagaagttcataaagttacagcaagctaatttattattgaaaaaagaaacactttagagtagcctaggtgtgcagtgtttataaagtctatagtagtgtacagtaacactctagactttcacattcacacaccagtcactcactgattcacccagagcattttccagtcctgaaatctccattcatgataagcgccctacacaggtgtgccatttttaatctttttataccacttttttaaccataccttttctatgtttagatacacaagtacttaccattgtgttacaattatctacagtactcagtacagtaacacgctgtgcaggtttgtagcccaggagcaatacattataccatatatccaaggtgtgtagtaggctataccacctaggctgtatatgtacattctccgatgtttgcacaacaaccgaattgcctaatgacacacttctcagaacaaatttcttcattaagtgacgcatgactgtatttgtggaaacatattctttttttttttttttttgagacagaggctcaccctgttgcccagtgcagtggcgctatctcagctcactgcaacctctgcctcccgggttcaagcgattcttgtgcctcagcctcccaagtagctgggactacaggcacgcgccaccacgcccagctaacttttgtatttttagtagcgatggggtttcaccatattgcccaggctggtctcgaactcctgagctcgtgattcacccatcttggcctcccaaagtgctgggattacaggtgtgagccaccacacccagctggagaaatatattcttttatatatctagaaagtttctaagaactcaaaacaatgcttacttctagggaggtgggaggaggacttttattttcaatcaatccctccctttctacattggctttttttttccttttgccacgagcaaaaaaaaacttttttttttttgcatgcactaatatatgtaaaggcatctctctccttttttttctgcagacagtaacagttgtagcaggaaacttttaatattacaactgtacagcatattttaaaatattttcacattttcttacaactgttgtaaattataactaaaatgaccttaccatgctttcaaacaacatgtatagagtatccacattgtgctagctccttcagataagaagatgcacaggactgactcagcccctgtctcatggagtttagaactgagttaggagtcagtcagcatacactattgagcacctactgtgttctaggcactgttgtaggtgaaaacagtcatgaatacgagagtcagtgtctctccctaaaaagtaagtggcttgcctagaaaaaaggcttaggtcaggcgaggacgctcatgcctataatcccagcactttgggaggccaaggcaggcagatcacaaggtcagtagttccagaccagcctggccaatatggtgaaaccccatctctactaaaaatacaaaattagccaggcatggtggcgggcacctgtaatcccagctactcgggaggctgaggctggagaatcgcttgaacctgggaggcagaggttgcagtgagccgagattgcgccactgcactccagcctgggcgacagcagagcgatactccatctcaaaaaaagaaaaagaaaaaaggcttaacacatgtttaatatatattattaaattggttggagaagtcctctctaaaaaagtaaaattggaattggaacctgaagatgaaaaggagttagttgttcaaagatctgggaagatagagtttcaagctgaaggaacctcaagtgcaaaggccctgaggctagaaccagcttaacctgtttgagggttgaaagggaaatggatgacagtgaatgagtgggtgagagaaggaaagagatgaggtcagagaaactggcaggagtcagatcatgtgggctctccaaggccacgtaaagagtttgacttttattctaaaatgtaatgagatactaagcatagatacaacatgctctgatttatgggtttaaaaggccactctggctgctggggaggctgttgggggtaaagggtggaagcggagagaccaggtgggacgcaggtgaaggataatgatggattagcttagggctgtagaagtagaaacggtgaaaaaaggctgacttggggatatactttggagaataaggttgacagggcttgataatgaattgcatgtggtggttgggagtgggtgagtgagggaagagagttatcagggatgaagaccagatttttggtctgagcacctgggtagactgtgaggccataaactaagatgggggaaaactgggagaggggcagtttgcaggggggaaggaggtccagagagaaatcaattgttctctttggccacattaagtttcagaggcttgttacatattcaggtgaagatattgcttaggcaattggctaactctatagctaaggggaaaggtccaggctggaggtatttcaaaacaagggccaagatgaaaccacctggtgactacgagtagatacaggaagacagagggcagaagattgcatatttaattactatgaagggagttatgtgttgtgaaaggggaaatatcaggttagtggagggagaagctggtcaaggaaagtttcttgaaaacattaaacccaagctccttgaagccactgaaaaccaagcagtgacattgtattagtgaggatgctgtcccagagaagtaatttgtaattggtcatagagctagtggcctgactagaactgtgttttatacttgaactaaatcaaatgtgccacaggcacagtataaaacagaggagaatagctgggagcgatggctcacatataatcccagcactttgggactccgaagcaggaggattacttgagcccaggagttcaagaccagccctggcaacatagggagaacatatctgtacaaaaaaataaaatatcagctgggaagcagtggtgtgtgtctgtggtcccagctactcaagaggctgaggtggaaggatctcttgagctcaggaggttgacgctgcagtgagccgtgtttgtgctacagcgctccagcgtggatgacagtcagacgctttaaaaaaataagaataatctttaaaacaaaaaacaggggaatagtggcacaccctgggacacagactctggagtcattctgtctgaggtcacattgtggatttgccatttactactggctgggttattccaggtgcattactcaacatctctgtacttcagttttctatctgtaaacggactttctactaatagctaactgcttacagactgtttatcatgattttacatacaatattcaacttccccctccaataatcaatgagtgacattattattctcattctactgctgaggatccagaagcacattcacccattccacaaatatttaccgtgcacctgcaatgtgccaggcatgttcatgggtgaacacagcaaaatctttgcctctgtgcagcttcagtctggggttcacaggaaaaggagaaagatgataaacaagagatacgtacattacagggtaattataaagggatacccgctatacaagaaaacagagcaggataacagagataggaagttgggattttaagtaaggcagccagaacagacctcaccaagaaggcaatatctgagcaaggatgttaagggagccgggggcaacctagaatccaccagtggggagagtaaggcgactcggagaaaggcgaggggctaatgcatccgttctaataactctgactttaactcggggctagatggggaaacactggacagttctaccccgaggtgtgacagaacttgaccttcattttaaatcggtccatctgtttaggctagtgagaaaaaacaatatttgaactcgggcagtccagctcaggagtctgtgctgtcgggattaaagaatcagtcgacacccccagggctgagccccgcagcaagcgccccgcgggtgctggcccccagactgtggttaccgccatcctttcacttaaactccgccccgattactcccccgctccagggctccgcatccactctgccgggtctccacgaagcgcttcccgggctacacattgcgtaacttcggcagccgggcggagcctgcacagaggcggagccgcggcagccggagagaacgccccagcaatagtcgctaggaggaagccccaggagcccttgccgcccacggaacgcgcctgcgtaatccgggtccaggccgccgacattccaggaccgccttccgccccgcccccaattctggggcggagtcctcggccgcgccggcgcaaagcgtcgccgcaccccacgcctgcgcgcttcgcccgcccggccccatccccccaggtttttcgcgtgggggagggggcacgtctcggcgagtcacgatgatggcggccaccatcctgtggtgagctagcggattccctgcttgtctcgccgaccccctcgcgccttctgcagactccgtggctggcgctcggcgcgtgaggaagcacggcggcccgagttcgcggggaaggccgcagtcgcggaggcagcggcgcggtccggggcacgggctgggggagaggccgctccgctgggcgaatgtgacaagcccccacccccaccgccttcctccccagagcgcgaggagcgcgggcgaccccggggccccgccaggccacagaccccgcccagcggccagcacccggcgcaggcccggcagccgagctgcgcggcggcaccatgcaggtcaccctgaagaccctccagcagcagaccttcaagatagacattgaccccgaggagacggtatgcgcgcgggccgggggcaggggcagccgcgtgcgggccgcggggagcgccaggagctcgtggggccgggcggcgcgctccagcgggggaagccccggagggcgcgatgagggccctgggtcctggtgccggccctggcggcgtacagcggagccgatcctcctgtcttggccgtgggctttgtggcaggagaatggggaagcagtggccggacgccgaaggcctggtggcagatggcgtggagcgcacgcccgcgggcctgggcctaggagctcgtgctagcggggccggagggggatgggaaggtccaggccgtctcagccgtagagcctggctttctggtatgggtgcacaggtgggggagggagacgtaggcgtcgccactacccctgtgtggacctggttagccgcttagttcccagagttggtaacccgagaagatgagccttaagaaaaaaaaaagtatcaggttccgtttgccgccgagaggtgagtggtggtgaaaatgaatttgcccctttcccctcagaattgtttacccttttatttgcaaatgaatcgttctgctgccttcctcccgccaccaaacccacacccttgcgtagattgcactttgaggcctctttggtgatggttttagctgttagagctcttcacagccatccaggctcaaactaaacttcagatttaacgggttttctgtgttagaaatcttggaattgtaggagttggaacgctgcagccaccctcccccgatgccccaaacagtagcagttcaagggggaaaaaagaaaaaaaaaacaaaaaaca

SEQ ID NO: 3123 - DNA, 6000 bp, Homo sapiens
tagatacacaagtacttaccattgtgttacaattatctacagtactcagtacagtaacacgctgtgcaggtttgtagcccaggagcaatacattataccatatatccaaggtgtgtagtaggctataccacctaggctgtatatgtacattctccgatgtttgcacaacaaccgaattgcctaatgacacacttctcagaacaaatttcttcattaagtgacgcatgactgtatttgtggaaacatattctttttttttttttttttgagacagaggctcaccctgttgcccagtgcagtggcgctatctcagctcactgcaacctctgcctcccgggttcaagcgattcttgtgcctcagcctcccaagtagctgggactacaggcacgcgccaccacgcccagctaacttttgtatttttagtagcgatggggtttcaccatattgcccaggctggtctcgaactcctgagctcgtgattcacccatcttggcctcccaaagtgctgggattacaggtgtgagccaccacacccagctggagaaatatattcttttatatatctagaaagtttctaagaactcaaaacaatgcttacttctagggaggtgggaggaggacttttattttcaatcaatccctccctttctacattggctttttttttccttttgccacgagcaaaaaaaaacttttttttttttgcatgcactaatatatgtaaaggcatctctctccttttttttctgcagacagtaacagttgtagcaggaaacttttaatattacaactgtacagcatattttaaaatattttcacattttcttacaactgttgtaaattataactaaaatgaccttaccatgctttcaaacaacatgtatagagtatccacattgtgctagctccttcagataagaagatgcacaggactgactcagcccctgtctcatggagtttagaactgagttaggagtcagtcagcatacactattgagcacctactgtgttctaggcactgttgtaggtgaaaacagtcatgaatacgagagtcagtgtctctccctaaaaagtaagtggcttgcctagaaaaaaggcttaggtcaggcgaggacgctcatgcctataatcccagcactttgggaggccaaggcaggcagatcacaaggtcagtagttccagaccagcctggccaatatggtgaaaccccatctctactaaaaatacaaaattagccaggcatggtggcgggcacctgtaatcccagctactcgggaggctgaggctggagaatcgcttgaacctgggaggcagaggttgcagtgagccgagattgcgccactgcactccagcctgggcgacagcagagcgatactccatctcaaaaaaagaaaaagaaaaaaggcttaacacatgtttaatatatattattaaattggttggagaagtcctctctaaaaaagtaaaattggaattggaacctgaagatgaaaaggagttagttgttcaaagatctgggaagatagagtttcaagctgaaggaacctcaagtgcaaaggccctgaggctagaaccagcttaacctgtttgagggttgaaagggaaatggatgacagtgaatgagtgggtgagagaaggaaagagatgaggtcagagaaactggcaggagtcagatcatgtgggctctccaaggccacgtaaagagtttgacttttattctaaaatgtaatgagatactaagcatagatacaacatgctctgatttatgggtttaaaaggccactctggctgctggggaggctgttgggggtaaagggtggaagcggagagaccaggtgggacgcaggtgaaggataatgatggattagcttagggctgtagaagtagaaacggtgaaaaaaggctgacttggggatatactttggagaataaggttgacagggcttgataatgaattgcatgtggtggttgggagtgggtgagtgagggaagagagttatcagggatgaagaccagatttttggtctgagcacctgggtagactgtgaggccataaactaagatgggggaaaactgggagaggggcagtttgcaggggggaaggaggtccagagagaaatcaattgttctctttggccacattaagtttcagaggcttgttacatattcaggtgaagatattgcttaggcaattggctaactctatagctaaggggaaaggtccaggctggaggtatttcaaaacaagggccaagatgaaaccacctggtgactacgagtagatacaggaagacagagggcagaagattgcatatttaattactatgaagggagttatgtgttgtgaaaggggaaatatcaggttagtggagggagaagctggtcaaggaaagtttcttgaaaacattaaacccaagctccttgaagccactgaaaaccaagcagtgacattgtattagtgaggatgctgtcccagagaagtaatttgtaattggtcatagagctagtggcctgactagaactgtgttttatacttgaactaaatcaaatgtgccacaggcacagtataaaacagaggagaatagctgggagcgatggctcacatataatcccagcactttgggactccgaagcaggaggattacttgagcccaggagttcaagaccagccctggcaacatagggagaacatatctgtacaaaaaaataaaatatcagctgggaagcagtggtgtgtgtctgtggtcccagctactcaagaggctgaggtggaaggatctcttgagctcaggaggttgacgctgcagtgagccgtgtttgtgctacagcgctccagcgtggatgacagtcagacgctttaaaaaaataagaataatctttaaaacaaaaaacaggggaatagtggcacaccctgggacacagactctggagtcattctgtctgaggtcacattgtggatttgccatttactactggctgggttattccaggtgcattactcaacatctctgtacttcagttttctatctgtaaacggactttctactaatagctaactgcttacagactgtttatcatgattttacatacaatattcaacttccccctccaataatcaatgagtgacattattattctcattctactgctgaggatccagaagcacattcacccattccacaaatatttaccgtgcacctgcaatgtgccaggcatgttcatgggtgaacacagcaaaatctttgcctctgtgcagcttcagtctggggttcacaggaaaaggagaaagatgataaacaagagatacgtacattacagggtaattataaagggatacccgctatacaagaaaacagagcaggataacagagataggaagttgggattttaagtaaggcagccagaacagacctcaccaagaaggcaatatctgagcaaggatgttaagggagccgggggcaacctagaatccaccagtggggagagtaaggcgactcggagaaaggcgaggggctaatgcatccgttctaataactctgactttaactcggggctagatggggaaacactggacagttctaccccgaggtgtgacagaacttgaccttcattttaaatcggtccatctgtttaggctagtgagaaaaaacaatatttgaactcgggcagtccagctcaggagtctgtgctgtcgggattaaagaatcagtcgacacccccagggctgagccccgcagcaagcgccccgcgggtgctggcccccagactgtggttaccgccatcctttcacttaaactccgccccgattactcccccgctccagggctccgcatccactctgccgggtctccacgaagcgcttcccgggctacacattgcgtaacttcggcagccgggcggagcctgcacagaggcggagccgcggcagccggagagaacgccccagcaatagtcgctaggaggaagccccaggagcccttgccgcccacggaacgcgcctgcgtaatccgggtccaggccgccgacattccaggaccgccttccgccccgcccccaattctggggcggagtcctcggccgcgccggcgcaaagcgtcgccgcaccccacgcctgcgcgcttcgcccgcccggccccatccccccaggtttttcgcgtgggggagggggcacgtctcggcgagtcacgatgatggcggccaccatcctgtggtgagctagcggattccctgcttgtctcgccgaccccctcgcgccttctgcagactccgtggctggcgctcggcgcgtgaggaagcacggcggcccgagttcgcggggaaggccgcagtcgcggaggcagcggcgcggtccggggcacgggctgggggagaggccgctccgctgggcgaatgtgacaagcccccacccccaccgccttcctccccagagcgcgaggagcgcgggcgaccccggggccccgccaggccacagaccccgcccagcggccagcacccggcgcaggcccggcagccgagctgcgcggcggcaccatgcaggtcaccctgaagaccctccagcagcagaccttcaagatagacattgaccccgaggagacggtatgcgcgcgggccgggggcaggggcagccgcgtgcgggccgcggggagcgccaggagctcgtggggccgggcggcgcgctccagcgggggaagccccggagggcgcgatgagggccctgggtcctggtgccggccctggcggcgtacagcggagccgatcctcctgtcttggccgtgggctttgtggcaggagaatggggaagcagtggccggacgccgaaggcctggtggcagatggcgtggagcgcacgcccgcgggcctgggcctaggagctcgtgctagcggggccggagggggatgggaaggtccaggccgtctcagccgtagagcctggctttctggtatgggtgcacaggtgggggagggagacgtaggcgtcgccactacccctgtgtggacctggttagccgcttagttcccagagttggtaacccgagaagatgagccttaagaaaaaaaaaagtatcaggttccgtttgccgccgagaggtgagtggtggtgaaaatgaatttgcccctttcccctcagaattgtttacccttttatttgcaaatgaatcgttctgctgccttcctcccgccaccaaacccacacccttgcgtagattgcactttgaggcctctttggtgatggttttagctgttagagctcttcacagccatccaggctcaaactaaacttcagatttaacgggttttctgtgttagaaatcttggaattgtaggagttggaacgctgcagccaccctcccccgatgccccaaacagtagcagttcaagggggaaaaaagaaaaaaaaaacaaaaaacaacaactttgaatcctttctgcagttaaagccttaaacatttcagaagtccacattatacatttttctgtatttgtgactgcataaagagacactgttgaggtcagtacaactttatgccaagaatctaaaaacgctgtgagtgtaaatttactgcttatgttcggaaatacaccgccaagattgtcataatactaagtttaaaccagcagctttctgcccaactctatttttaaaagtagttgattctattttgggtggagatcaggggctttggtgttaagtagacctgagttccatttgtggttttgtaacttatttgctatgaccttgggcaaattacggttagtttcattctctgtataatagggataatacctgccttgcagagatgtgaagattagatggtatgtatttacttggtggtcagtaaatggaatcgattatttaaacaatggattcctttgagtggagatacagtgttacgttttacttatctcatttaatcttaagttttgtacatctttaattttttaagaaacagcctttttgggattttggtacaaaattatttgatttcagaatatttata

SEQ ID NO: 3124 - DNA, 6000 bp, Homo sapiens
taagtgaggacagtggtgtgtatttaagtttttgaagaattagattgtggggggagagagtctaggaggagacgtgattgttaagtgtttgtttttaaaatgatgaagtattaggtctaagtgtgaatgaaagtgaactgagtgagagagaggctgaaaaagctgggggagataggaaatataatgaatttagtaagatactgaaaaatacttggaggcgaaccagaggacaggtggaaataattaggtttgaaagaaagggatacttttttcatttaataggtgagaaggagatgtaggtgggtctggatgcaacaaagttagacaaagatgaaaataagttcctctgtcttctgtttttaataaggtagaaagtggtcacctgcagacagtacgagaggatgctgtgaatcagatttagagtagaatgcagatttgagatattcttttggaggatggagaagagggctaactagggggaacagaagatttagtgtatccttttctccactagcatttagaaaacggtataaatgtagataggcagtctcttaggtaaaagttgagatttgttagctaagcaaggttaggacaatgagacaccacagagtggttggagtaaattttagaggttgagtactgacaaataaatggtgttggtccaaatacagaattttgtgtgttaggagcagcagaaagacaaggaagtttttgatattagaaagaaggtgataggagcaatgatagtgaagattgaaatgaaagtagagactctagggaccaagtcttaaggagattcaagagcaagtatagtgaacagttaactaagagctggtaggaacaggagattggtcacttataattttaaacatggagtggtttttagatgacaaaattcagcctgtagggttctgtaagtatagattggattgtaagtaaagatcactgttttgttcaaggtaaggaacaatgccagaattttagacaggtcagtgcacctggttccaaagtctggttcagttattttctttgaagtgatactgttgggtcaaatccccgtgccttcccccaccaccttaaaaatgttgaagcatcttggcatgttgccctcaaaaattttgatcatttgatactttaattcttattctgagaatgtatttcttcactttcaatgccaagaattattcaaaacaatctttccagtgtgatagtctattggattaataacatgaggcatcaaaatttatgtctttggttactaatgaggttgagcttttctgtgctgtgactgtgtaattgtgaattgcctgcccaatcatttgtccaatttttttattagtgcaaaaacagttttgtgccttgtctctctctctttttttttttctttttcttgagacagtctcattctgtcacccaggctagagtgcagtggcatgatcttgactcactgcagcctcagcctcccgagtagctgggattacaggcgtgcaccaccatgcccagttaatttttgtatttttagtagagatggagttttgccatgttgaccaggctggccttgagctcctggcctcaaatgatccgcccacttcggccttccagggtgttgggattacaggcgtgagccatggcacccagctgccttttctctttttttaattgcttttttttttttttttgagatgcagtattgctctgtcgccaggctggagtgcagtggcacaatttcggctcactgcaacctccagctccctggttcatttggttcccctgcctcagcctcccgagtagctgggactacaagtgtgcaccaccatgcccggctaatttttttatttcagtagagacggggtttcaccatgttggccaggatgatcgtgatctcttaaccttgtgatctgcccgccttggcctcccaaagtgctgggattacaggcatgagccactgcgcctggcctcttaatttcttttttttttaatttttatttgtcctttttttctgtttgagttgcatgtttagcctgttaatttttcttctttattgaataaacatttttagtgtttagtctacaattacttctttagccaaatcatataggtatcttgtgttgagctcccattgttatgttcttaatattctgtgtttgttttgttttgtttttgagacagaatcttgctcttgtcatccaggctggagtgcaatggtatgatcttggctcactgcaacctctgcctcctgggattcaagcagttctcctgcctcagcctccgaagtagctgggattacaggtgccagccaccatgcccggctaatttttgtatttttagtagagatggggtttcaccatgttggccaggctggtctcgaatccaaccttaggtgatccgtctgccttggcctcccaaagtatgggattacaggcgtgaaccactgtgcccagccttaatattttttaatcaattttgatttctttgaagcaaaagttatttagtagtaaattactaaagggccttttttttttttttggtccagcttttcttaatttatggggcttttttttcctttggtcctccctcatttttgatataaagctagagagtcccgttacttatttaagcgttttgaaatatgaaatatttaagtctgtcttatacttcattgtaacctgtcaagaatgagatattcctgcatgtttattttcttttatttgttgcttcatatgtgtctttttttcttcacatatgtctatgctctgttcatttattcatccagcacaggataatggagcacccactccatgccaagccactatgtattgttctgagaactgggtttatgcatagagatacacttggtctgtaatttatttgtagttttcctaaataatcacacttgcaaatattgtatccttttgtccctctacaaacaaagtttgagaagaaatttaccatacaccactgagtgctccacccatgctctgccatcagttggttgacttggcaagtctcttagcatgtaggatagcagtcttcaaatgacttggtttcaagacttgtttacatttaaataagttattgagggctccaaaataacttttgtcgatatgcttacgttttattttatttatttattttttaaggcagattctcactctgtcacccaggctggagtgcagtggtatgatcttggcccactgcaacctccacttttcaaatgattcttgtacctcgtcctcccaagtagctgggattacaggcatttaccgccatgcttggctaattttttttttttttttttttttttttttgcatttttagtagagacagggttttaccatgttagccaggctgacctcgaactcctggcctcaggtgatcctcccactgcagcctcccaaagtgctgggattacaggcatcagccactgcgcctgacccaatgtacttacatttattaatgtttaccacattagaaattaaaacaaactttattaatgttcatttaaaaataaatataaacttattataataaatattatacttactttttttgcaaaaaataactatctgccaaaacaacagtaacaccaaagcactgaaaagactgacactgttttacttttttttttgcaaatctgatgtttggctttaaaaaaattttacttgtgttttacctttgaaatggggaacagtggaaaatagtggattgagatttttgtgatggatttctactttggggaacatcagaatagcagtgatgctactgacccatttcaggaagatcagtgcagcaaggaaggtttatatggtatttgcaaaatactctgcttggagtcataaggggtggtaacctctttatttccgtctcctcatctataaaattgagtgggtgacatttccttttgtcccagagttttgaggattgtgtgaaattgtatgttaacatctgaagctaaataagctttttttatctttgaagtacacaccatcactttttaattgtacaaaagaaacctttatttgtatccctttctgtctaaaactcaagagaactgtcaacttagataattttcaagaagtattgaatttttctccttggtttttgtgcctttaaagtaatgaaagtagttctataaaggcaaatgggaaagccatctctgccttttttactcctgtacctccctacttaacaagttaagaagttcattagactcatttttgtaaatactgtataatgagcctaattgtcacacaattttaggaaatgaagagactataaaggtcatggattccagctcctcttacagatgaatgaagctgatgctgagagaagctaagctgcttgtttaagagcattgaagttgtctggaggttttcagcctgggctgaactttggaaacacctgtaaaactttttaaaaatactgatgtcaaggtcccactctcagagattatgttttaattggtgtttgtaaagtccccctggtgattgtaatgaaacataacacttaaaatgaatcatttgccttttaacattcacaatttaacctttaacattgaagtattcttattgttgatgagactgttttatttcttagattttttaggtgatcaagctttactttcttgctccgtgggaaataaacccatgaacagtatataaaccaaaactttgatgttgaaaactttattttaaattatcagttcaactagtaaatttttaaaaatctgtgtgtatcagatggtgttaaagtttatggctatcataactagtaatatgagttaatgttgaatcttttttgatataaattggaaaaacataatatttgaggttttggaaacattaataattatgtatataatttttgtcttccattatttattcagattctggattgtcattttttatttagactttttccaaaacaaatctttatttttcctataggtgaaagcactgaaagagaagattgaatctgaaaaggggaaagatgcctttccagtagcaggtcaaaaattaatttatgcaggtatgaattaaatattaaaattaacatgccatgtcttgatattcttttagttttagaaatgttatcttatatattgtagtatattcaaattgtcagaaaaatgattgtacaaataaaagcagtgaaagagcagtcatttgaatctaatattaatattcaatcttctctttattcacatttgccctgtgtatttttccatcaaatggtattagttttgttttatcttttgtaagcatcgtgtaactggcttttgtttttttaatcaaacggagcttttttttttaaattgaattgaaaccatttatactgattgtgttattattagtatgcttggaatcattcctgtaaaattattttaaccaaaactaactgaagagtacagaaaaaacacatcacacagacacctacaggaagaaaaaaaattaatattcagattatgtaaagaattcttagaaatcagtaaggaaaggatgaccaataaagcaacaaaggataagagtaggaattatacatttgactagcctcactaataaccaggaaaatgtatattaaaaatacatttgatatccaaatttttagagaaaatgctttcattgtagatgttagtaaggtgggtgtttgatcacccatggattcttctctttttctgaatagtgtttcctaaagtgagacagcctggaggaaatgctaacctggtgattcagtcccattatttttataggtcagaattcagaagcctaaagaagcggacataaaattcaaatttccagtttcttgttttggcctgttttctcattcctatccatattcctttctgacttaatgttagcagcttttgattcaatagctttttaaaggtggaaaactaaattcatgtagcaagaaacactagagagtcctagctacctaatagtgaccttcagcacgaccacagttttgtgtacttcgtgcatttctaagttctgtagcatc

SEQ ID NO: 3125 - DNA, 6000 bp, Homo sapiens
acgaggtttcactgtgttaaccaggatggtctctatcttctgacctcgtgatctgcccgcctcagcctcccaaagtgctgggattacaggaatgagccactgcgcccagctgaatttttatatttttagtagagatggggtttcgccatgttggtcagcctgctcttgaactcttgaactcaggtgatctgcctgccttggcctcctgaagtgttgggattacaggtgtgagccaccacacccagccaagcaatatttatttccgattgtcaggcatttgccaggctttggattctagtttttaagcccttaacagtatcattcagggcctatgttctcaggacctcttgagactgtgcctcggtttttaaaaaaagtatcattctacagtattatacaggcatttttaaagtacagtgcattggccgggtgcggtggctcacacctgtaatcccagcactgtgggaggctgaggcgggcggatcacctgaggtcgggagtttgagatcagcctggctaacatggggaaaccccatctctactaaagatacaaaatgagctgggcgtggtggtgggtgcctgtaatccctcaggaggctgaggcaggtgaatcgcttgaacccgggaggtggaggttgcaatgatccgggatcgtgccactgcactccagccggggtgacagagtgagactctgtctccaaaaaaaaaaaaaaaaaaaaaaatacagtgcatctctagaaaaaaatactagagtctgggcattgggcatggggctcacctaaaacaagaaaatggcaaagtggaaaactagggataaggctttagatcaggtgcagctgacctctgctgtgactcccaggaagcatagtcccaatctttgtggaaaaccaaatgagatctagtttgatcctcatgaaccctgtctctacaaaacaacaacaacaaaaaaacgtaggtgtggtggcatgtccctgtagtcccagctacttgggaggctgaggccagaggatcaccagaacccagaaagtcgaggctgcagtgagctgagattgtgccagtgcactccagcctggccaacagagtaaggccctgtcttcaaacaaacaaatcaaattaaacaaaaaacccaaaacccttgtaaagtaagctatgacctccatttacgggtgaagaaatgaactcagaattaaagggacttgatgaagcccctttgaattgtgaatcaatgtagatttaagctctagggaggtgtcataatgcagtcctttagaggatggactggactgactgaaagtttatggacccagaaatttaattccagcattgaggctgatcttttgtttggattgttattttgcttattgcccatccttccatgtaggttccatgaggacaagggtgggtttcttcccccaccactgtgtctcagcacctaaagcagtgcttcacatacagatgttcaataaatgcttcttaagtgaattgttatttattttttgagacatggtctctgtctcccagactggagggcagtggcgcaatctcagctcactgcatcctctgcctcccagactcaagcaattctcctgcctcagcctcccaagtagctgggattacaggcatatgccaccacgcccggctaatttctgtatttttagtagtgaggggtttcaccatgttggccaggctggtctcaaaactcgtgacctcaagtgatccacctgcctcggcctcccaaagtcctgggattacaagtgtgagccaccgcacccggccatgaattgttagtttaaaaaaatgtgtattaggggttctgatttgactgctcaattttaagctaaactagagaataaagcatgtgcgcggtggctcacacctgtaatgccagcactttgggaggctgaggtgggtggatcacgaagtcaggagatcgagaccatcctggctaacacggtgaaaccctgtctctactaaacatgcaaaaaaaattagccaggtatggtggcgggctcctgtagtcccagctactccagaggctgaggcaggagaatggcgtgaacccgggaggcggagcttgcagtgagctgagattgcaccactgcactccagcctgggcgactgagcgagactccgtctcaaaaaaaaaaaaaaagaatctggagaaaatgactaaagtatgaatgggaataaaaagaaagcacaatctccagaaggaataattaggatataatcaggataagataatgggtaaataggccaagtacaatggctcatgcctgtaataccaacactttgggaggccaagagggcggatcacctgaggtcgggagtttgagaccagcctggccaacatggtgaaaccccatctctacaaaaatacagaaattagccaggtgtgtggcatgtgcctgtaatcccagctacttgggaggcaggagaatcgcttcagcctgggtggtggaggttgcaatgagcagagatcgtgtcactgcactccagcctgggcaacagagcaagactgcctcaaaataaataagtaaataataaataatgggtaaataaagcagaacaagggcattcacagttgaagaatgacactacagatcagaactaagattgtcagccagataattttgtgagagaacaaagctaaaccaaatcacatctgaatttataaattccagttctaaatctacgcacaatttttcatgttttccattccgtaccttccaagtaactaattcctcttgaaaccagtatcaaaaataagtgtcatctttcaatgcgacagaaatatttctaaaatacttaatataatagctgaatgtacaacactcatcgtgcagctgttcctccgatatcagtagcaacttgtgaaaaatcagtggtctcagatcaacaggtttttgatactgaatggtacagtgggaaccatgggttttggagcaaggtcagtctgggatgaaattgtgactctgtcacacattggccaagtgaccttgggtaggtaagtcacatctctgtttccccatctgtattatggggaatagtattacatgcctcactgggctatagtgaggattacatgagataatgcagtttatggaaagtgtaaacagtgctcggtgtaaagtaggagctgtgataagtggatccctccttagaaatgggatctcgggccaggagcagtggctcacgcctgtaatcccaccactttgggaggccaaggtgggtggatcgcttgaggtcaggagttcgagaccagcctggccaacatggtgaaaccctgtctctactaaaaatacaaaaattaggcacgtgtgatggtgtatgcctgtaatcccagctactcgggaggctgaggcaggagaatcgcttgaatccgggaggtgaaggttgcagtgagctgaaatcctgttactgcatcgcagcctgggcgacaagagcaaaactccatctgaaaaaaaaaaaaaggaaagaaagaaggaaagagaaggaaagaaagaaggaaagagaaaggaaggaaagaaagaaagaggaaaaaaggaaaggaaaaggaaaaagaaaagaaagaaaaggaaggaaagggagaaatgggatgcctgtcaggtgcagcgctctggggaggcgtggagagcctataatagggaccaaggtgctttttagtcgcagaacatggattatttgttaggtgtggctttggcacatctaggtcattggttctgccgacttgctaaacccaaccatctgggcattttctcggctaatatagaggatgttttcatgtgaacacgtgtccacctgtgaaatgtttataatgttaaaggttcgttctggggcaaacatctgatagcgcctggcaaacccaacaaatgccttttctgtaatgagtaagcctcctaatgcccaaagaaacagttgaattcgttagcaacatgtcggatgttttccctatgtctgtatatttcttcgctagtttttttttttttttctttttgagacggagtttcgctcttgttgcccaggctagagtgcaatggtgccatctcgcctcaccgcaacctctacctcccgggttcaagcgagtctcctgcctcaacgtcctgagtagctgggattacaggcatgtgccaccacgcttggctaattttgtatttttagtagagacggggtttctccatgttggtcaggctggtctcgaactcccgacctcaggtgatccgcccgtctcggcctcccaaagtgctgggattaccggcgtgagccaccgcgcccggcccgctagttctaatatttatgctttttggagggtgaagggcttgaaaggcatcaaaaaccttggtttctaggagcgagccaaattttctcccttagagactgaaggaggttatccgactccgcttccaggaaaatccaatccgcaatttttccctcgctttggctcttccaggtctcactactcgcgccggggagacgcggtccggcctacgctaggccggcaagaatctaccaggtcccaggagggcggggccgagccccagaagtcggggcccgggccaggagtcttggtgcaggcggactcgggcgcgtgccatgggaccacaactcccggcacgcaccgcggactgcgccgaacacggttggctgggagatccaaccctactgctcccaccggccaatgggacggaggaaagaggcctgacccggattctcggaggccaatggcaatacagaggaggcgggtgcttccttaccactcaccttgcgctcagagaagccacatttaaaaggtcgtgccgggccgggctttcgcaggcagtgggaccagagccgggaggggcggcggtgtcccgggaaagcggctcttggggcatccgggtcccctcgaggcgggctccggacgtcgccgtgggcggggccgagggcggggcctggcctcgttgtggagcggctcgtaatccatcatggcggccgcggggtttggtgtctgtgcctgagcagcgctggagccggagccggttcccgggtcctgcggctgaggagcccctccgctgtccacggcccctaccggcggggggcggctgggtccctcggcggagctcgggagatgtgactgcctgagggcggtggtggtgtcagcgtccggggccgggggagggggtgtctcgggcagagacccccgggcttggggcagctgaggcggccgggcctcctctacacggggcccgccttccgctgtctgggccgcgagagtccttcgtcccttacagccccgccccggctttgggacactgcgggtggtctgtttcccccagcttgggacaccccgttttctgaggcgtggaagagcgtcgccccggagtaagctgcccgtgccgcgccccgacagcttccctcagccccaagccgccccttattccggatcccggccccaactttggccacggagcctcccattcaaatccctcccttgctgtcaaggggtctccccttcccccaaggtggctcccgcgagcctctaatgccctgacttcttccaatgtcacctacggcccccttagtctcagctcagccaaaaactttaatgcaaaggaaaagtctggattggttccacaggccttttaaaaagcggacttaaaagttgctggcaatgcattccttttcgtcagagtcgagggcaaactcgctgaaatctgggtgacccgtgtccttttccggagagcaaagcagagaagcgagagcggccactagttcggcaggaaatttgttggaagatgaagaagctaagatagggggttggtgacttccacaggaaaagttctggaggagtagccaaagaccatcagcgtttcctttatgtgtgagaattgaaatgactagcattattgacccttttcagcatcccctgtgaatatttctgtttaggtttttcttcttgaaaagaaattgttattcagcccgtttaaaacaaatcaagaaacttttgggtaacattgcaat

SEQ ID NO: 3126 - DNA, 6000 bp, Homo sapiens
ggccagaggatcaccagaacccagaaagtcgaggctgcagtgagctgagattgtgccagtgcactccagcctggccaacagagtaaggccctgtcttcaaacaaacaaatcaaattaaacaaaaaacccaaaacccttgtaaagtaagctatgacctccatttacgggtgaagaaatgaactcagaattaaagggacttgatgaagcccctttgaattgtgaatcaatgtagatttaagctctagggaggtgtcataatgcagtcctttagaggatggactggactgactgaaagtttatggacccagaaatttaattccagcattgaggctgatcttttgtttggattgttattttgcttattgcccatccttccatgtaggttccatgaggacaagggtgggtttcttcccccaccactgtgtctcagcacctaaagcagtgcttcacatacagatgttcaataaatgcttcttaagtgaattgttatttattttttgagacatggtctctgtctcccagactggagggcagtggcgcaatctcagctcactgcatcctctgcctcccagactcaagcaattctcctgcctcagcctcccaagtagctgggattacaggcatatgccaccacgcccggctaatttctgtatttttagtagtgaggggtttcaccatgttggccaggctggtctcaaaactcgtgacctcaagtgatccacctgcctcggcctcccaaagtcctgggattacaagtgtgagccaccgcacccggccatgaattgttagtttaaaaaaatgtgtattaggggttctgatttgactgctcaattttaagctaaactagagaataaagcatgtgcgcggtggctcacacctgtaatgccagcactttgggaggctgaggtgggtggatcacgaagtcaggagatcgagaccatcctggctaacacggtgaaaccctgtctctactaaacatgcaaaaaaaattagccaggtatggtggcgggctcctgtagtcccagctactccagaggctgaggcaggagaatggcgtgaacccgggaggcggagcttgcagtgagctgagattgcaccactgcactccagcctgggcgactgagcgagactccgtctcaaaaaaaaaaaaaaagaatctggagaaaatgactaaagtatgaatgggaataaaaagaaagcacaatctccagaaggaataattaggatataatcaggataagataatgggtaaataggccaagtacaatggctcatgcctgtaataccaacactttgggaggccaagagggcggatcacctgaggtcgggagtttgagaccagcctggccaacatggtgaaaccccatctctacaaaaatacagaaattagccaggtgtgtggcatgtgcctgtaatcccagctacttgggaggcaggagaatcgcttcagcctgggtggtggaggttgcaatgagcagagatcgtgtcactgcactccagcctgggcaacagagcaagactgcctcaaaataaataagtaaataataaataatgggtaaataaagcagaacaagggcattcacagttgaagaatgacactacagatcagaactaagattgtcagccagataattttgtgagagaacaaagctaaaccaaatcacatctgaatttataaattccagttctaaatctacgcacaatttttcatgttttccattccgtaccttccaagtaactaattcctcttgaaaccagtatcaaaaataagtgtcatctttcaatgcgacagaaatatttctaaaatacttaatataatagctgaatgtacaacactcatcgtgcagctgttcctccgatatcagtagcaacttgtgaaaaatcagtggtctcagatcaacaggtttttgatactgaatggtacagtgggaaccatgggttttggagcaaggtcagtctgggatgaaattgtgactctgtcacacattggccaagtgaccttgggtaggtaagtcacatctctgtttccccatctgtattatggggaatagtattacatgcctcactgggctatagtgaggattacatgagataatgcagtttatggaaagtgtaaacagtgctcggtgtaaagtaggagctgtgataagtggatccctccttagaaatgggatctcgggccaggagcagtggctcacgcctgtaatcccaccactttgggaggccaaggtgggtggatcgcttgaggtcaggagttcgagaccagcctggccaacatggtgaaaccctgtctctactaaaaatacaaaaattaggcacgtgtgatggtgtatgcctgtaatcccagctactcgggaggctgaggcaggagaatcgcttgaatccgggaggtgaaggttgcagtgagctgaaatcctgttactgcatcgcagcctgggcgacaagagcaaaactccatctgaaaaaaaaaaaaaggaaagaaagaaggaaagagaaggaaagaaagaaggaaagagaaaggaaggaaagaaagaaagaggaaaaaaggaaaggaaaaggaaaaagaaaagaaagaaaaggaaggaaagggagaaatgggatgcctgtcaggtgcagcgctctggggaggcgtggagagcctataatagggaccaaggtgctttttagtcgcagaacatggattatttgttaggtgtggctttggcacatctaggtcattggttctgccgacttgctaaacccaaccatctgggcattttctcggctaatatagaggatgttttcatgtgaacacgtgtccacctgtgaaatgtttataatgttaaaggttcgttctggggcaaacatctgatagcgcctggcaaacccaacaaatgccttttctgtaatgagtaagcctcctaatgcccaaagaaacagttgaattcgttagcaacatgtcggatgttttccctatgtctgtatatttcttcgctagtttttttttttttttctttttgagacggagtttcgctcttgttgcccaggctagagtgcaatggtgccatctcgcctcaccgcaacctctacctcccgggttcaagcgagtctcctgcctcaacgtcctgagtagctgggattacaggcatgtgccaccacgcttggctaattttgtatttttagtagagacggggtttctccatgttggtcaggctggtctcgaactcccgacctcaggtgatccgcccgtctcggcctcccaaagtgctgggattaccggcgtgagccaccgcgcccggcccgctagttctaatatttatgctttttggagggtgaagggcttgaaaggcatcaaaaaccttggtttctaggagcgagccaaattttctcccttagagactgaaggaggttatccgactccgcttccaggaaaatccaatccgcaatttttccctcgctttggctcttccaggtctcactactcgcgccggggagacgcggtccggcctacgctaggccggcaagaatctaccaggtcccaggagggcggggccgagccccagaagtcggggcccgggccaggagtcttggtgcaggcggactcgggcgcgtgccatgggaccacaactcccggcacgcaccgcggactgcgccgaacacggttggctgggagatccaaccctactgctcccaccggccaatgggacggaggaaagaggcctgacccggattctcggaggccaatggcaatacagaggaggcgggtgcttccttaccactcaccttgcgctcagagaagccacatttaaaaggtcgtgccgggccgggctttcgcaggcagtgggaccagagccgggaggggcggcggtgtcccgggaaagcggctcttggggcatccgggtcccctcgaggcgggctccggacgtcgccgtgggcggggccgagggcggggcctggcctcgttgtggagcggctcgtaatccatcatggcggccgcggggtttggtgtctgtgcctgagcagcgctggagccggagccggttcccgggtcctgcggctgaggagcccctccgctgtccacggcccctaccggcggggggcggctgggtccctcggcggagctcgggagatgtgactgcctgagggcggtggtggtgtcagcgtccggggccgggggagggggtgtctcgggcagagacccccgggcttggggcagctgaggcggccgggcctcctctacacggggcccgccttccgctgtctgggccgcgagagtccttcgtcccttacagccccgccccggctttgggacactgcgggtggtctgtttcccccagcttgggacaccccgttttctgaggcgtggaagagcgtcgccccggagtaagctgcccgtgccgcgccccgacagcttccctcagccccaagccgccccttattccggatcccggccccaactttggccacggagcctcccattcaaatccctcccttgctgtcaaggggtctccccttcccccaaggtggctcccgcgagcctctaatgccctgacttcttccaatgtcacctacggcccccttagtctcagctcagccaaaaactttaatgcaaaggaaaagtctggattggttccacaggccttttaaaaagcggacttaaaagttgctggcaatgcattccttttcgtcagagtcgagggcaaactcgctgaaatctgggtgacccgtgtccttttccggagagcaaagcagagaagcgagagcggccactagttcggcaggaaatttgttggaagatgaagaagctaagatagggggttggtgacttccacaggaaaagttctggaggagtagccaaagaccatcagcgtttcctttatgtgtgagaattgaaatgactagcattattgacccttttcagcatcccctgtgaatatttctgtttaggtttttcttcttgaaaagaaattgttattcagcccgtttaaaacaaatcaagaaacttttgggtaacattgcaattacatgaaattgataaccgcgaaaataattggaactcctgcttgcaagtgtcaacctaaaaaaagtgcttccttttgttatggaagatgtctttctgtgattgacttcaattgctgacttgtggagatgcagcgaatgtgaaatcccacgtatatgccatttccctctacgctcgctgaccgttctggaagatcttgaaccctcttctggaaaggggtacctattattactttatggggcagcagcctggaaaagtacttggggaccaaagaaggccaagcttgcctgccctgcattttatcaaaggagcagggaagaaggaatcatcgaggcatgggggtccacactgcaatgtttttgtggaacatggtgagtgcttttcaaaatttctgctcatggttttcctcatgcattcatcttaggccttcaaggaactttgaacaacagtacttgcgacagttccttccaattccacttaataaatttgttactgtagttatctcttagtggaactttctttgtataagaaaaagttacttcgtgacttcggctttattcaaaatctatttgagttgcttatttcttgcctgattcctctgctaattcactgttgaccttggacaagccactttactgttccagggctttagtttcctgaggggctggacttcagtggtttcttagggtccctggttctatgattctgctctaaccgaagtcgtgggctcttctgacaagcatggattctttactgctttgtctacagagagcttttatcatattctcaaagtggtttgtgttcctgagaaagttaagaatcatagatactggttgacgctaatatccttgaccttttccttcgtaagtaggacttgaaaatactcactttggagccatgtgggaaaaatcaagtggggaagcagcattccttgtgaattttagatagacagcttctgtcttaccttccataaggagtaatctcttcctcgttgatgaagc

SEQ ID NO: 3127 - DNA, 6000 bp, Homo sapiens
ctttgctttaggatgaaaggtggggctctctgttacatttgaaccttagttgctactcctacctcacagctagtgtttctttctcttcataaaataaattgatttcctggtcccttggaaaacctccagactgctttctggaatcattttcatatagcatgtttgttaatttgagctcttgactgagtcccagtgagatgtaggcaggaacacagacctgatacagaaatagtcctcttttggaaataacaatagctactgtttatcgagcaccttctgtgctttgggcactctccctacatgattcctaatcttcataataaccctgtgagataactactcttatgactacctcccatttttcagatgagaaaattgaggctctgagaggtgaagtcgttgcccatggccccacagtgagtggcagatctgagactcagcgctagcctttgtgacacataactcgtgaccagcaggtagtgctacccgattgaaaaaatgtgagacttaaagggatgcatgtgtccctatacagtggcaaaaactggtatgacagaagtgatgttttaagctatgttatcctttagttggacatacactggacccacagagctagagtacctggcaggctcttgctggacaatgtttgctgaatcagagaaagtgggctttgttggcatttgcatgtgaaatactgtgcacatacctcaagatctttgctgttccccccctaaagctactagctatgctggaaacagtgaaggggtcagccagacctggggtcaccttgtcctggggtcccaagccaggcctcctgtcaggttcatctgtctctgttccacctgcactcacacccagtcttgctgctgagagatggagcatccacatcctgaatcctgcctccttcccttgacacacttctatggtgggtgcctgcccaactttttcttaataggactaaattccaaattaaaaaaaaaattcagtctctctcctctaatcatccaagaagagtcctcttttggtaacttgttctagaactatgcctatcttaaattcagaaattgctttcaaatgaattaaattttagaaatatccattcctgttcgtcctattcccagtgaaaataagcaactcttccctcttccaaaacagtggatttcttttctttttttctttttttgaaatgtagtcttgctctgctgcccaggctggagtgcagtggtgcaatcttggcacactgcaacctccacctcccaggttcaagcgattctcctgcctcagcctctcgagtagctgggattacaggtgtgtaccaccatgcctggctaatttttgtatttttagtagagacaggatttccccatgttggccaggctggtctttaactcctgacctcaggtgatcgcccaccttagcctcccaaagtgctgggattacaggcgtgagctactgtgtctggcccccaaacagtggatttccatcttacatatgcatacagatcatctgggagcttcagatccagcccattacacatattctgattctagactagaaaccaagactccgcattttaagcaagccccacattattcaaaatagattgtccatggattatgcttttagaaacattgttcagatcccatgctttaatgttggggagtttatcctttccttctaaatattttttttttttttgagatggagtctcgctctgttgcccaggctggagtgtggtggtgcgatcactgctcactgcatcctccacctcccaggttcaagcaattctctgcctcagcctcccgagtagctgggattacagatgcccgctaccacgcccagctaatttttttgtacttttagtagagatggggtttcaccatctcaaaaaaaaaaaaaatcttaaatagctctagttccctgaattattttctcctaagacatgttttcccaacagttaatgttacttatttcatcttctgatcttactcatattatccacctttcacttaaattggaaattttctgccattttacaaagttcaagactttcctaccttcctacctcctggctgtgtgaacttggacagaatacttccccctctccctccagtcagttttcttacttgtgaaatggaattaaactatacaaaatcattaggttactgtgaggcttaagagtgcctggcacatattacatgcacattaaaaatgtatttcttcccaaactaatgcaacatagcaaacaagttagttcacagtctttaatttctttccttttccctttctttttagctaatagcttttgggtcttaggctgattagaaggaatccttcttggggtgttcttctggtaagaagattgaagctctcctttatttgcttgtaacagaatgctcttcgtatctttcaaaagcgtcaaaagctggatatggaaagtataggccaggtttgatacagaagtgtagtttggcagttttttcagtatccattgccactaattcagtattttgttagatctgttgatgtatggttttataactaaaattaaaaagatttgggtacagtttataagcattattcattttaagaggatttaagaggataagatcattttagactcaagagcagaatattagtaataataattagcttaaaaaaataaacatataccaatataaagaacagcacaaggcaagcaaatatctgggcctatattaacagacggtattcaaggatatggctagaatttccaaaatgcctaataatgtgtaattcttggcattaagccgccaatttgaatatggccctttaatatgaaatgctatataatgacagactttattatagtctgatccaaggcccctgaactttccaaaagggcaacaaaacagacagatactgtattttttcactagttggtactggtggcacccttttgagtgttatttttggcattacgtgtagaggttgacagattcaagacaacactaaacatgttagcagtcaccacacgcaggctgtccagcagaatgacagcgcttcccagatcctagaaagcatccagagtcactgcacccatcccctgggggccctgtagtcctgcatctccagatgatgggagctgcaaacttccctgatggtgccctcttggatgctcatgaggcctgatctggtaccacgactctagcagtaggtccattcaatggcagtaaaaatacatgttgtatgttgatcagaatttggcaggacacatgtggaaagttaatgacatcctggccgagaacccctgtgatatacactggttacatcctgtccaactggagtttttatgtgctgtttttggcagagccaagtgaagatcttgttacttagccattcctgaggtactgaagatacccgggtttttgtcattacaggataggctagaaagtagccagggtctcataaccaaggctttctctgaaacatataatgacaatgctagttatttgaccaaagatatccaatgctttaatccacttggaatttattcttgatgtgaagggtcagcatcatccactggtcgggagcctgatccttggagccaggcagacctgggttgagtccatctccgcctgtttccagctgtgggcaaggtgtctgacttctctgagcatctgtggggtttgtttgtttttaaacctgaagaattgggataatctgtttcctcacagaatcattacgcagatgcaatacagttaatgaaggtaacatggcacataggaagagcacaatacacgtcagctcttactcttcatggctagaagatgtggactaaacttccccctttacagttttgtgattaacaccatttatgaaagaaataaatgaaataaattccttttcctgtcatgaggggaacttacctgattttattgaattatttggtgccattgagttccttattgtttccctctgacctagatttctgggtgtgcgccagtaacacgactgtgattgttgctgctttataacattgtctgtggtcagtccaaacaagagtttaaaataattgaatgaaatggattttaaacaatggtccccccaccctcaccccgtggcactcggccaaaggaagaggaaaagttctctgttaaagaaaatgaatcagagaagaggcccagaccgtgcctccgaaaattctcattgtagggactaagtcctctcactctgaactcacacccgtctgttcgcagcctgacctcatatcctggtctggatgtgcggcctcaccggggtgtcgtgcgcacgtgtggttgtcctgtgggtgccagctctgacttcctccccagacacccactgcctcagccttaatcacaggacgcgcgttgagtagaaatgagaccagttagtattggtaactgcagaggaatatgcattttcaccagcgttctcgggtcagagggtttgcctggcaccgcgtactgggaaactcgccaaaagcggtgcaggttggagacgccccaggccgcggtggagttgcgcgcggcttctaaagtggagtggagcaggcctgcaccctccccgccggggctgggacggcgcttccaggcggagaaagacctccgcgggccgcgcgcggccttccccctgcgaggatcgccattggcccgggttggctttggaaagcggcggtggctttgggccgggctcggcctcgggaacgccaggggcccctgggtgcggacgggcgcggccaggagggggttaaggcgcaggcggcggcggggcgggggcgggcctggcgggcgccctctccgggccctttgttaacaggcgcgtcccggccaggcggagacgcggccgcggccatgggcgggcgcgggcgcgcggggcggcggtgagggcggctggcggggccgggggcgccgggggggcgcgcgggccgagccgggcctgagccgggcccgcggaccgagctgggagaggggttccggcccccgacgtgctggcgcgggaaaatgttggagatctgcctgaagctggtgggctgcaaatccaagaaggggctgtcctcgtcctccagctgttatctggaaggtaagcccgggccgcacgggttgggctgagtagccgcgcgccctcccgctgctgctgggcccttcctaggcctcgccgcccgcgcgctcccgcctgcgccctccccgggtcttgtcttttttttctttcttccctcttctcttctcttctcttcagttctcttatattctgtctctctttctttctctctgtgtctgtctcttttctcttctcttgtctctctctttttctctctctctgtctctttctctttctcgcgatggcccctaggcgccgccggcggagcgtggcccccagccccggcaccagccccggtagagccacgccggatggtgacggcggcgtccggggccccacagtgcgggctcccccgaaaaagtttgagaaagccaactcgccaggccttaacatccctgggatcccacgttgtggaatttccaccgttaattgggactgtgtgttaaaaagatcgacccgtgtttgtgaaaacatgcgatttccattaagcatcatgtacacaaggagcaccactctaccatttatggatacagaatttcaagtgatctttccatctcccccacccccatcttatctacagaccacgaagaggtcttaggaattcgctctcttttcaggggaggggagcccatttaagaaggcgtttccaaggagtcccccagagtactggggtgtcatgttcgtttccttaagtgaagctcagggccaggagggcttcacttttgcgttctttctacctactctccttctctaattacatctgttttattttatttttctttcctgttgtagtctttagttttataaatggaaaaaaagtaaattaagggttatgggtcttcactttcgtagcttctaggtgggtatgaaattgatctgatttgagactggtgctcccag

SEQ ID NO: 3128 - DNA, 6000 bp, Homo sapiens
cgagtatattctcaaacttaaatattttttccaaaaatattttgagtggcttttaaaatatatcctattttatgcatgcagcataaactaacttatcctgtgttgatagatattttgtacttgcccttttctgtgctgttgtttaaaattagtgtatagaaataattgtgttgatcacttaggataaattcctagaggtaaatcagatattaaattctttatagacttctggttcatattccagttgccctcaatttatacacctactactagcattgtatgagagtgcccgtttctctgaaatcttacccacactggctgtcagcgtcaaaaagatgtatctgcagatttggcaaggaatttgcatttcagtgattattatcaagcgttcacacactttccatgtttaatggtaattttttttgtttttttttgagacgatgtctcactctgttgcccaggcagagtgcagtgccgcgaccttggctcactgcaacctctgcctcccaggttcaggtgattctcctgcctcaactccttagcagcttggattacaggcatgcgccaccatgcccggctaatttgtgtatttttagtagagacggggtttcaccatattggccaggttagtctcaaactcctgacctcaagtgattgcccgccttggcctcccgaagtggtgggattacaggtgtgagccaccgcacctggcctttaatgataatgtaaattttttgtgaattgtttattcgtggctttgccccattttttccatagtggagggatttttctttttcttgttggtatgtaaagtccttgtgtgtcaagaatgctctgcctcacagtttttctaatataatgacagtggaagctcgtaactggcttccacttgactgacttgctaaattgaccggcactcttcacttccttataaaacatgcctccatagtccctgtgccccatggcacatgggatggggtagccacactaccactgtctgctgctgcatatgttcctgtccacaagagccagtcatgtttgtttccaagcctggttctttcagatatagctgttgttgtaattacttggttgatatgaaaccaatgaaatgcaagtgtgaaaagagaattgtttctaggaaaattaagatgaatgctttagaaagactcagtaaaggaagataaatttaacaaattactacagaattaggtgtaagacaacagtaaatgattggaatgaattacagaaatctagaaagctttgacagtgggaatgcgtagtgaatggctctaagttctccctccatctgtaggaaattgaagctggaagtgagatgatatattcattatagggaggacttacagaagaaaacatcaagctctaatcacatgtccacatttcgttttgtttacttattttttgaaatggagtctcactctgttgcccaggctggagtgcagtggcatgatctcagcttactacaacctctgcctcctgtgttcaagcgattctcgtgcctcagcatcctgagtagttggggctacaggtgtgcaccaccacgcccaactaatttttatatttttagtagagacggggtttcgctatgttggccagcatggtcttaaactcctgacctcaggtgatctgcctgcctcggcctcccaaagtgctgggataacaggcatgagccaccgcacccagccccacatacctacatttcaaaggacagtctttggccctacagtcaagactaccaaaccaatgtacactaaatgggggtggggatcacgttgttgttttttgtttgtttttgtttgtttgtttgtttgtttgtttttttgagagagtctcgctctgtcacccaggctggagtatagtggcgtgatctcggctccctgcaagctccgcctcccgggttcacgccattctcctgcctcagcctcccgagtagctgggactacaggtgcccgccaccacgcccagctaatttttttgtatttttagtagagacggggcttcaccgtgttagtcaggatggtctcgatctcctgacctcggggatcacatattttaataaaattgataatccctaatagtgatggcgctaggtgtacttttagagccaatgtaaatagtcgagaaagggggccaaacatatgactaagcttcttctacactctaggagatgtcagtattgcaagatcctgttccttgaaattatctttgccccccgccattcagaaaaattaccaaatattgtaataatgtaatttaggacttaccctttcagagaaacagttcctgaaggttgacttcagttagtagtacagaagcgagacttgaagctcttcatggtttatgttctgttggtttatcccaaagagatgttttagagcacattcatttctgaaagttctcggtcatgtttccggaagtttgatcaggtgggttctttttctttttttaaaagataattttttttttaaagataattcagaatcagtcccacccctgagatggtattattacccaggaaagaatgcgtgaggatcctctaaatccatagagaaggaaaactaaaacaattttgttaccatttgtttggctcaagcatctggtagatccttcagttcttttcaaattagaattttcctctctttttcttttttttttttttttttgagatggagtcttactccatttcccaggctggagtacagtggcacaatctcggctcactgcagcctcacctcccgggttcaggcaattctccggcctcagtctcctgagtagctgggattacaggtacccgccactaattttcatatttttgcctggctaatttttgtgtttttagtagagatggggttttgccatgttggccaggctggtctcgaactcctgacctcaggtgatctgcccacctcagcctcccaaaatgctgggattacaggggtgagcctccacgccgggcctctctttttaagataataaaaattactaaacatcataatgacatgatttgggattactctttcagagaaacagttcctaaaggtttacttcagttagtgatttttatttttattatttatttattttttgagatggagtctcactctgtctgccaggctagagtgcagagacgagatctcagctcactgcaacctccgcctcccagactcaagcgattctcctacctcagcctcctgagtagctgggactagtagctggaactacaggcgcccgccaccatgcccggctagttttttctattttagtagtgacggggtttcaccgtgttgcccaggttggttttgaactcctgagctcaggctcaggcaatctgcctgcctcagcctcccaatgttctagggttacaggcatgagctactgtgcctggcccagttagtgatttttaaattgtagttccttaaatgagtattttggatttcactccacaatgttcttcaactgtaagatctacttgaggttatttgatttgctggtttgcaagaactcgtctacacgttgtctttatcacaaagaaattctggagcgtttgagccctgttcaaaaaaaaaaggcaagaagaaacttcaggaacaaataacctatttgaccctgtaatgaataatattcacacattttctaatttaagagctgttgattgatttccaacttttagaatctgtttcagacaaaacatggaagtttagtaacagttttttctattctgtaataataattgccacaaggttaaaaaaaaaaatttacagaagaacatatttgagggtggtcgtgggggcaagaaagctggaaggacgggtggggtgtgttaatagccttgtcttgtgaagtaagtcctcagagacgctgtcctagttggaagaacaggcagtgaaggtgtgcgtctgttacggagaataggactccagtgatctagctggtacttagagaggtgggggtgatcaccaaaaaaacagctctgcctctgggagcggagaggactgggatagaaagtatttgtctttcattttaagcccttctgtacgatttgacttttctttttttttttttttttttttttgagatggagtctcactctgtcacccaggctggagtacagtggcacgatcttggctcactgcaacctccgcctcccaggttcaagcaattctcctgcctcagcctcccaagtagctgggactacaggcacctgccaccatgcccggctgatttttgtatttgtagtaaagacaggatttcactgtgttggtcaggttggtcttgaactcctgacctcatgatccacccccggcttttttttttgacacggagtttctcgttacccaggctggagtgcagtggcgcaatctctgctcactgagacctccacctcctgggttcaagcgattctcctgcctcagcctcctgagtagctgggactacaggtgtgcgtcaccatgcccggctaatttttgtatgtctaatggagacagggtttcaccatgttggtcaagttggtctcaaactcctgaactcaggtgatccacccaccttggcctcccaaagtgctgggattacgggcgtgagccaccatgcccggctaaagcaagaaattttcattgcatattttaagcaaaggcaaatgcatatgtggatagactgttttaatttgactaaagtcatattgaatccatgaattttagaagctcaaactattggggaacaataattaccaccttggagtgaaaatacttaatttccacaagatttagtaaaggaagagttttttaaaaaccaccttaatgataatagtatgtacagatgttaagaaatgaaataggaatgtgtaatgttggaaacacaaatatttttgcttctgagaataaaactaattttttctcccaattttctcttcctttttcttttttctgttcccccctttctcttccagaagcccttcagcggccagtagcatctgactttgagcctcagggtctgagtgaagccgctcgttggaactccaaggaaaaccttctcgctggacccagtgaaaatgaccccaaccttttcgttgcactgtatgattttgtggccagtggagataacactctaagcataactaaaggtaaaagggttgtgggcagctagtggtggttgcaggagatagaaatctgggaattgcggtttgacctaccaccctttgctcgttaaaggagcagctttgaaatctggactgcagggatatccaaaacaacaactgcatgtttctaagggagtcgactctccttagaggagttcttgtacaatagccctgggcaaaaacagaacttgccctattttttatactgaaaaggacagctggacaaaatactgaacgcaatttttcccctaagaaaaagcattatttccctaaaatgtcttatattaggaacagagcacttgaataaacataattgatttataaaaactgaggctatacacttacctatctgttcagtacaaacaggaagcttcaaatgtaaacgtgaattctcatacacttataaatgcatatctttatgtggacttgttaaaatgaaattggtatttaggaatttggagatttttagtagttacacaagaatcaatgaaaaagaacgaagctggtttccaaagctgatatgtctgatttggttcctttcttctcaggtgaaaagctccgggtcttaggctataatcacaatggggaatggtgtgaagcccaaaccaaaaatggccaaggctgggtcccaagcaactacatcacgccagtcaacagtctggagaaacactcctggtaccatgggcctgtgtcccgcaatgccgctgagtatctgctgagcagcgggatcaatggcagcttcttggtgcgtgagagtgagagcagtcctggccagaggtccatctcgctgagatacgaagggagggtgtaccattacaggatcaacactgcttctgatggcaaggtagggg

SEQ ID NO: 3129 - DNA, 6000 bp, Homo sapiens
gtccccagtactaggctttgtcagtctgtttagtcctcatgttagtctcattttcatgagaatttctttacttcagactttgataaccgtgaagaaagaacaagatagaaggtgagctgtttggcttagtaattttctacacctactagagcgggactgggaaaaatatatttgtaaatgcagttcttgctgtcactgtctctctggggttttacaatccatattcctgccagcatctaacgtcttttcaaattcttaatgtctataacaggacatgatgacattcatcgttttgacttgttgcagcaaaagatggttagcaggattggaatgttgctttcattctagacttttccttgagaactgctagccccgtattgctagccagatctcatggatgatctgacttgggtttcatctgtccaggttggcagtggaatccctctgaccggccctcctttgctgaaatccaccaagcctttgaaacaatgttccaggaatccagtatctcagacggtaaagtacccatcccggggtacctgcagtggggtgaaagggcagccatgtgggactgcagcctgggtcattcggttcacttcctggtgaaagttcacagaccagcctgtcctgagaccagaaagctgggcagaggtgtggagtattgtgctttcttgtctgctgcagccctgcagagttctaagaaatgctaagggctgtttctccggtatccacgtgccttttctttagttgtatgcagatgagcactgttaccttacaaagaaagagaaccaccacaccaagccaacaccagtactgatggctgctggatttttgtttctgtccctgtatgattcttagaagtggaaaaggagctggggaaacaaggcgtccgtggggctgtgagtaccttgctgcaggccccagagctgcccaccaagacgaggacctccaggagagctgcagagcacagagacaccactgacgtgcctgagatgcctcactccaagggccagggagagagcggtaagtcccccgcttcccccaaccccactgctcttcccttccctgccagaggctacattcaggccatcataggccaacgggaagctgtgaatggagcccgcacagaagggcagccatggcctttgtcaatggttcagcttcggaaggaggaaggttctcctctccccacctgcctcctatcccctccctctgagagtccccgaggagcataggctccagcagtgagttcagtcctgtaggcagaggtgcttctgaagcccgccaaggagctagcccatctcccacctattacccgcggcatctgtggttgctgtctcagagcagattcaacaatagtaagcaccaggctgcgtgacaagcagctcacggtgaaggcactgatgtgagaagctcgctgcagccaggtggaaccaggacacgcacatggacagaacccgtgtcctggtggtctctgggaagagcatctttctggtgccattgcctaggcgagcaagggagttgggatcagctcaggagggggtctcaagacactagcaaaaataataatggccaacatttatgtagtgtgcctactacaggccaggctctgttctatgttcatggttgacccccagaaccagcagtccaggttctgctgcagaccagctgaacaaaagcattgaggggtgtattagtctgttttcatgctgctaataaaggtatacccaagactgggtaatttataaaggaaagaggtttcactgactcacagttccacatggctggggaggcctcacaatcatggctgaaggtgaatgaggagcaaggtcacatcttacttggcggcaggcaagagagcttgtgcaggggaagtccgctttataaaaccatcagatctcgtgagacttattcactaccacgagaatgtgggagaaacctccccatgattcattgatctccacctgaccccaccgttgacacgtggggcttattacaattcaaggtgagatttgggtggggactcagccaacccatattggaggtggggggtaggccaagcatctgggttcacagaggatcctggggatggcaatggtggactccattctaatggactgcagactgggtacatgtgaagggactggacaaagccctacttcttgaagatttatggtgggatgtttactgacagcagaatctataaacctgagttttatcacgtactctcattagtaaaaaaaaaacaaaaaaaaacagaacatgcagcccatatatatggtatataaagtacgtatgtccactactgtaggagtagagtgcgtatgttatgtaccaaaacgcacatttaaaaggcttgcatgctaaataagtccaaatttgcaatacttcccgccccgctgggccatctcactcacctacttggaggttatggcgtatagactctccagaatcttccacccttcctcctcttatcggttttcctgatttcaggtggctgagcagtagggaggagaggcctctgggaacgctgtgcttattaagaacccagtgatcagcagtcatgttcatttacgcccgtcagtttcatctgaggggtattttgatagtgatctcttggtgagccgagggtgtcaattaactgctcagtgctgaaactgagtggtgcataattcattgcaatttcactctcctggcctccttccactagattaaagttttgggagggctttggtgttccctgattcagatgtcccgcgtgctgccttgggttctgataaatgcatactggtacctctgttgagttacaggtgccaacagaaaacctcttcttgcaagctgacctctgagggagaattctgttactcactagcaggagcttggcaacaccaaaaagatttccttttttttttgagatggagtctcactctgttgccaggctggagtgcaatggcatgataccagctcactgcaacctccacctcctgggttcaagcgattctcctgcctcatcctcctgagtagctgggactacaggcgtgtgccaccacacccagctaatttttgcattttttagtagagacggggtttcatcatgttggccaggatggtctctatctcttgacctcatgatccgcccacctcagcctcccaaagtgctgggatgacaggcttgagccaccgcgcctggctaccagaaagatttcttatgagctatgattcatatttaaagagtgcccattaaaaaactgttggccgggcgtggtggctcacacctgtaatcccagcactttaggaggccgaggtcagcgaatcacaaggtcaggctcccgtggcacaagctgggggctgcccccaccccatgctccccagaggagcacccaagcgtctgggctcagacaggcctggatctgataaccggctctgatgccaccatccctgaggccaggcaagtcccagccgggctacagcactgttgtgagaatgcagatgaggttgtaaaggtgaagcacgtgtcacgcttctctcaataaagccatcattgctgttaggattgtcattaggaaaggctttgggccgggtgcagtggctcatgcctgtaatcccagcactttgggaggccaaggcgggtggatcacctgaggtcaggagtttgagaccagcctaaccaacatggtgaaaccccgtctctactaaaaatacaaaattagccaggcgtggtagcgggtgcctatagtcctagctacttgggaggctgaggcaagagaaccatttgaacctgggaggcggaggttgcagtgagctgagatcgtgccactgcactccagcgtaggcaacaagcgagactccaactcaaaaaaaaaaaaaaaccacacacacgctttggtctctttccctgaagatgggaacaaaaagctggacggccctggcctcttcatccctgcactggtttacttgaaggcagcagccccccacccacccacatcactctctagtgagtataaaaacgatgacaaggccaagcaaagggtcaaaacctgtggctctcctgccagccagctagccgagaggcctatgaggagctctgggaataaggggctgtgtcccacagtggggaagggacaatgggccattatgcacaggagataagaagggatgacctttgacaatttttttgtttgtttgtttgtttgttttgagatggagtctcactctgtctcctgggctggagtgcagcagtggcactctgcctcccgggttcaagcgattctcctctgtcagcctctagagttgtctggagttgtcagctcttccccttgcgtttcagatcctctggaccatgagcctgccgtgtctccattgctccctcgaaaagagcgaggtcccccggagggcggcctgaatgaagatgagcgccttctccccaaagacaaaaagaccaacttgttcagcgccttgatcaagaagaagaagaagacagccccaacccctcccaaacgcagcagctccttccgggagatggacggccagccggagcgcagaggggccggcgaggaagagggccgagacatcagcaacggggcactggctttcacccccttggacacagctgacccagccaagtccccaaagcccagcaatggggctggggtccccaatggagccctccgggagtccgggggctcaggcttccggtctccccacctgtggaagaagtccagcacgctgaccagcagccgcctagccaccggcgaggaggagggcggtggcagctccagcaagcgcttcctgcgctcttgctccgcctcctgcgttccccatggggccaaggacacggagtggaggtcagtcacgctgcctcgggacttgcagtccacgggaagacagtttgactcgtccacatttggagggcacaaaagtgagaagccggctctgcctcggaagagggcaggggagaacaggtctgaccaggtgacccgaggcacagtaacgcctccccccaggctggtgaaaaagaatgaggaagctgctgatgaggtcttcaaagacatcatggagtccagcccgggctccagcccgcccaacctgactccaaaacccctccggcggcaggtcaccgtggcccctgcctcgggcctcccccacaaggaagaagctggaaagggcagtgccttagggacccctgctgcagctgagccagtgacccccaccagcaaagcaggctcaggtgcaccagggggcaccagcaagggccccgccgaggagtccagagtgaggaggcacaagcactcctctgagtcgccagggagggacaaggggaaattgtccaggctcaaacctgccccgccgcccccaccagcagcctctgcagggaaggctggaggaaagccctcgcagagcccgagccaggaggcggccggggaggcagtcctgggcgcaaagacaaaagccacgagtctggttgatgctgtgaacagtgacgctgccaagcccagccagccgggagagggcctcaaaaagcccgtgctcccggccactccaaagccacagtccgccaagccgtcggggacccccatcagcccagcccccgttccctccacgttgccatcagcatcctcggccctggcaggggaccagccgtcttccaccgccttcatccctctcatatcaacccgagtgtctcttcggaaaacccgccagcctccagagcggatcgccagcggcgccatcaccaagggcgtggtcctggacagcaccgaggcgctgtgcctcgccatctctaggaactccgagcagatggccagccacagcgcagtgctggaggccggcaaaaacctctacacgttctgcgtgagctatgtggattccatccagcaaatgaggaacaagtttgccttccgagaggccatcaacaaactggagaataatctccgggagcttcagatctgcccggcgacagcaggcagtggtccagcggccactcaggacttcagcaagctc

SEQ ID NO: 3130 - DNA, 6000 bp, Homo sapiens
gagaaataaaatcatgtcaataaaaatgtattttataatacacaaaattatatacggaattttttttttttttgagatggagtcttgctctgtcgcccaggctggagtgcagtggtgtgatctgtgctcactgcaagctccacctcctgggttcacgccattctgcctcagcctcccgagtagctgggactacaggtgcccaccaccacgcccagctaattttttttttttttgtatttttagcagagacagggtttcaccgtgttcgccaggatggtcttgatctcctgacctcataatccacccgcctcggcctcccaaagttctgggattacaggcgtgagccaccgcgcccaacccagaatagtcttctaactttgttttcttaagtgtatagaaaaaagactgtaggccgggcgtggtggctcacgcctgtaatcccagcactttgggaggccgaggcaggcgatcacctgaggtcaggagttcgagactagcctgaccaacatggagaaaccgcatctctattaaaaatacaaaattagctgggcatggtggcacatgcctgtaatcccagctactcaggaggctgaggtaggacaattgcttgaacccgggaggcagaggttgtgtggagccaagatcacgccattgcactccagcctgggcaacaagagcgaaactccgtctcgaaaaaaaagaaaaaagactgtaaacaatgtatccactgttatgacacctatctctgaatggtaagtttatgggggtttcttcagatatttttggtatgacccaaattaatttaaatgaattcatatacttgtaaagccagacaacaaacctaattacaaaacacacaaacctctcaatggctctccatattaactaaagtacaaacacatgactctggtgcccaaggctctctacactatattcccactgtatttagccatgtgtgcttaccctccttaaggttatcaaagtagacttcctattactttggaacatgccccataccttttgacctcagtgcctcagttcagactattcaatctgcctggatcaccttctctacctggctgagttctaccatcttccaaagttcatgagaaacaccacctttttaatgaatttttttctaactctgtgctaaactagtcaccccagccagatgttatttctctctttgacttttacagaaaatatttcagcaccattacccttaatacaatttgccttaattttaatagctatctctgttttaatgcctctactaggttgtagtagtttcagaaggggctctacccttcctccgctctttctctaatactgatacactgcttcccagaattaggcatataaagagtactcaaggaacttaataaattattgtcacaagagattagtctctttccttgggcatgagaaagaggaagaaagaatgggaaacgtttcttatttgagattcagcatggaatttctcagaaacaataaggaaaaaaataccataattaggggctaatacttcattctttttgccagctaaaaatctatacataatggtaacttagtttctatggacacaaaaatgtgcttgggattcctaagaacctaactccaaaagcatttctggaatacagtttgtgcttgaagtgacacacttgcagaaaataaatattttcctttaggaaaaacatcaactttgcttaagtctgccttcagcctcttctgaaacaaaatattgttaatgacaatagaaagggtgaaagaaaaagaaggaaagtggatgttctaaacacctgagttaatttctaaaagcaaattctaaggggaaaacacaggcaaattaaacaaacaaaacaccccttttattatcactttccaattctacctttatttgttgtcatattccaggaaacaactgaaaccttaaggtaagaaggtcttcaaaggcttctattttctttttccatgcaaatctttaaaattggaccaatcttcttatgtatatatttaagtattgctatattcattcagtaagtatatattgagaactgtgctgggcatacaaaggtgagtaagacacacaaggcctctactctcaatgtctataggctgctacggaacccatgtacactctactggaggaaatgaaaaacacacaaaccaatgaacaagataattacagattacgataagggctgtaaagcagagaaaataaacaagacggagacatttaataatcagtgaaggcctctcggatacatttaaacactgaagagaaaaaaggaccaagccatgcgcaatacctgggtaaaatcttcccaggcaaagagaagtggaaaagtccgaaattgaaacagccccattctgtttgaggaacacaaggcagtgtggctagtcgtggtttttcaactgggggtcacattttaaattgtgatgttaagtttgtgggtaatttcattttttaaaaggaagtcaaatagaaaaaaatacatcgagagtcacatgttttcagaagtattctttaatgaaattttgcttcagttatgtgagtgtgcacgtttgtcctgggttgcaacatataacacgtatcttactttgaacggtggtcaaatctgcactaagcaagcagagtagtaacagatgaggatggcgggtgggggctggcaagagccagatcacacatggccttgaattacaggccaccataaagaattgggattttattctaaacgcagttggaaaggcactgaagggtttcaagctggagagtgacatgatctaacttgacatcatggtattgccaaaagattactgtagtgaaaatcagaagacatgagcactagtcctggcctagccaataacatcagggattttgagcaaatctcttaatctctctagacctcactttcttcattttaaaaatgaggaggttgccccaagatgacctttaagatcttgtttattgcctaatttctgcctgtattctgcttcctcccttgggcataaataaatgactattggggtgttactagctcattaggtcgaattctgagttacttcttaaaatattataaaccatgtattaacagctataatagttacatttctgtagaaagcaattgaagaaggatctctttattggaaccagctatattattagaaatgggaactctgggtgaaaagtgaatcaagtgcttttgcaactctctggaacaaagtttggggtgtgaagaaaattggcaaggaggtatgaaaagatttactgacaagtatttgaaaccgatttccatatttgttctatgtcatcaactgatgtataatctaggatggtttaaagttgcagggaacctctgctgagtactagtcaagatgtagaagcttaactcctttcacagtaaccaaaatgacaactgaggcaaaatattcactgagaatccactatattttaagacatgctagatggtttatgtttttttaaaaaatttaatcctactaactttattatttgcacttcacagatatgaaaacgggctcagaatagacaagtaagctatgtagtggcagggttaggattacaatcaatcttaaggtaggcaacatataaatccttatttaattccatatttacaataagttattccgtatgttttacaaaattactgtacaagcattaaatattcagttaagtacctgacaactcaagtatctgtgacatctggacacagaatgttcaaccaataaatcaattctggactcataggtactttgcaagatacagtttgggataagaacttgttccagcattggagggcctattttgtgggtagcatgctgggttgtatgaaagccaaatcaaacaaaatatccaaggaatttgtatacccaattaagtacacatcaatagtattatggcagtttccaggtacattttcgctagtgttgctggtgaaaggccagcagtggaaccgtggactggacaatgtcacccgtgttgtgggcctaacaagtatcctgcaagttccataaacacgagggcatgctaaaaacttaaccgatttccaacttacattaaccctttaaagggagcatgggacacaccacttgaccatttgaagcagtgcacacggcttgtcatggagaggaaaacctttgagacgtgcccagcatcattcctgtgagggtcgaaagggtccctaacacctcccacaaatacactcacaaacactccagcaaagttggggatgctcactgcacacctttcttaatacctggaacagagtacccacctgtcacatactcagcttcgaacctcctccgggtctcagagatgagcttggctttattctgggcgtgattctggatgggagacacgatgggaccttagatactacttgcatcaacccgcttaccctcaacccagcccacctgcacacgggcgctcggtccccgggcctcagaggcggcttccgggtccggggggccagcggcggtgcaataggctcctcacctctgccatgatcaccgtcgtggatgtgattgcggttgtcgccgtcgcccgttctaccgtcgccgaccgagtatctcatcacccggcagtcccgcccagaggtagacagagaagggtgggagggggaggcggtcgcgtgacaccggaaggcggacagaagcgccgccgcaccgcccaatccaatgcggacgcctgggtctggaggcgggaccaggccctcagcctaggtcccattcgattctcgtctggcctcgccccgcgacatcccccgcactgcggtcccgcccccgccagccgcgagatcgccggcgcttcccccgcggagctccgccctagagagctcgcgggctctctgctttcacaacactccccagggccccgcctcctcagcctcccttggccacctctcctggctggcttctaggctccgcctcctctgcgttcgacgcagcctccgcccggcctcccaggatgcagcgcgctggcgggaggtttggagcagatggataccgtatcgacgtggggcctccggtatgttgccgctgcgttgaggtaggatggggctggcgagtcttcccttcccaggacttcgcagagggggcgatggggctggatttcctccccttgtccccgcattgcgggagagagggaaggaagcgggcatcccgagacctgggtctgtcattccttgcaatgataattggattttaagtgctacattcgcttgaagtttttttcatcccttcagtatccttccaacttggagtgtgagatgcttaatgagcaaaatatctctgaaatctttaatctcaaataattatataaagttaaaaaaagcgtgtttcggcttattaaggtagttgtgttcagccgggggggtgggggggtgtgtgtggggggggcggttttaccacccaggggacctttggcaacctctggagacatttttagtcaccactgctaggggccgggggcaaaagagatgctcactggctactagtggatagagaccagggaagctgccaaacatcctccagtgtacatgaaaattcacaacagttatccagcccaaaatgtcaatagtgtcaaggttgagaaagatttagatttaaagggactggaacaaattttattcgtcagttaaaaacaattgaaagaaaatagttgcgcatacaatattgccttttttaaagttgaaagatactgaaaactacaaacaagttgtaagaatagtcccccatatttccatcaaccgtagtcatccatgacagaatggcatgttagcatcttttgtcctagacttttaaatatatttacattttttatgggaaaaaatgaacacattgtttaaacgttgtttgactacatccttaaaagatatttcagatataactaaagtctccttctacctctactcacctatcctggacacttccttgtccagaatcaacagcattcagaatttggcatgaaatgtttacagtttt

SEQ ID NO: 3131 - DNA, 6000 bp, Homo sapiens
gatctcactaatagctggaatctaaaattttttttaaaagagttgctatcatagaagcagagagtagaatactggttatcagagactggggaaaggagagaggatgggaggatggggaggggttgctcaaagggtacaaagctacaattagataagaggaatatgttctagtgtcctattgcacagtagggtaaagatagttaacactaaagtgtaatttattacttattacaaaataactagatgtttttgaatgttcttaccaggaagaaaggatacattcatgagggaaggatacactaaatactctgacttgaccattatacaatatatgtatgtatcaaaacatcaaattgcactctctagatatatacaattacaatgtgtcaataaaaacaggtaaataagaaaaaaagaagtcattggcttactggtttgttgttaggcaattaacagaaagatctgggacaataggcatcacaaagtagtttcagcttcatcagtaaagaagatagggtaggtaaatcaaaggtctggcttgtacttatgaaactatggtttagagaaaataaacatattagttatattccatcaaaatgtatgaataataatgtatttaccaaaggtcccatgtcaggtttcctagatttctagaaaggaaaagcatgaaaattacacattctgaggtaaagctctaagaattcatcatcttttactacctattcaaagtttttcagatttcttaatatcaaaaacaaaaatcacctctgtatgaattttattattttaatgttaaatatcacaactaatgtttaatcagtacaatgctctggttcacttaccaataacttaagtgtgataggagtaaggaaaacctgattataaaatggtcagaatttatgaaagttaggctccttacattctgttctttaaatgtcatcatcaagttccctaagttagaaacatctatcttccaactctctgttccagttgccactactatagttcaggctgtgatctctcaggctgaggtaaaagcttcttaattagtcttccttaatctaatctatcttccctccaatatatcaactcatttatgctatttaatacatcagttaattgttctaaaacacacacttgatcctgtcactgtccaccccctaatccaaaagcttacatgccccttgcctttctcaatagacctgtgattcttgaattactacctggaaaaatagatgctaaacactgtgaattgaacatatgaatggtgtagagaaaaaaagcttgcaaatcattgctatgaagcttagcatggcattcaaaactctgttgtataatcctaattcgacctgctttcaatacgatctccaggcagaaagcaaacttattctcatgaacttaaactgatctaaaaacataaatgactatttatgactattgagtgaaaagtttttgcaagacttattgaatttacatatatgtgcatatccactatattttatactgatgcaacatgttttcaatctcatttgtttttaatgtttgctatttattatatctaagtaatactcaatcattaaaatttaattcattgctaaaatgaattttaacttttttcccagctttattgaggtgtaactgctaagacagtagatattaagtattgctgctgcaacatctatttttaaagttcttgggatatgttcataaaacctgcaggccatgaaataactggcatttaaaaaaaatagaaacatatctggaaacaaatcaaactaaggttcaatttacaggttcttagtccaattataagcaacccctcactattttaaactctgcttatcagggccccaggtttactattctagcctatgggctatttgactttttacttattaacattataacagtggctgcagaagatacagaagtaactaggggtggcggtgcggggcagggtggcggtgcggggcggggcgtggagaccagaaagtagattatttataaaatactacataattaatttgagcttttcctgttctatattaccatacatcaaagttgactatctattttatacataaaattaaaacagatgtgtgtgtatactagaaaaatgataatatatacaagcatatgctaacataaaaatagtaggctggcaataaaattatcatcctcatctactctttactgccccccctcttaataaatatgttgttcattctttttaaatgctcataaatcattttggccctataaatgtgacaattctttaaataaactatcagtgtggttccagattatcctagaagagcagatgacatccaaaaagtctaagaaaccatattaactgtgaccaagagaaagtatccttgggaaaaaagtaaaattaagacactcaactaaaatggcacctaataatactgaacataattttatgaagataataatgatagatgttgtttttccaagacatatgacattgttaaccaaagtaaattaactttcctacaaaatagggccactgttaaaagtttttttctccctacataagttatttattgggtcctatacagaattgatctcacctttttcaacattatctaatatgcctgaaatgtgagtaaatgcgggagaatcgtgatcaactaaattagaggatttgggaagattacgctaaagaagatttttatgtcatattaaggacttataaatttctcatataagtaatgataacccactgaaagacttcaaaaacagaaatcacaggactgtacttttgagttatgaagatcctggtgacagtgttaaaggtgtgagtgagatcagactggaaaaagagctaacaattagaagaaaattatgagtacttaaataaaagggagagatgactctgaaggtaatttggcagtcaactgaaatgcatatacccagtagtttcatttgtagatataaacccagagacataatcccacatatgaatgaatacattgctctagaagctcactgtgctgatatttgcaatataaaaaaagtaaaaacctcaatgaacaccaataggggaatgagtatagatggactatcaaacaagagttaaaaggaatgaattagatctatctatctatatatgtgtgtgtgtgtgtgtgtatatatatatataatcatggttaaatttcaaaaataaaatgaattaaaaattaagttgcagacaaatgtacactgcagcatattatttatgtaaaacaaataaaacagcattatatatgttctatttacctacaatgactacagtccctgagtgctttctcaagaaatagtgccatgtactattttttttttttttcctgaagaaacagtgccaggtactgctctaagcactttggattaactcgtttcttcctcacaacatccttatgacataggcactgttactatcccattttatagatggagaaactgaggcaaggagtttcaggatcttctcaaaggcttgcagataagaagtgacagagccaggattcaaacccaggcagtatgatccaaaataaaaaaatgtaaaactgtaaacatttcatgccaaattctgaatgctgttgattctggacaaggaagtgtccaggataggtgagtagaggtagaaggagactttagttatatctgaaatatcttttaaggatgtagtcaaacaacgtttaaacaatgtgttcattttttcccataaaaaatgtaaatatatttaaaagtctaggacaaaagatgctaacatgccattctgtcatggatgactacggttgatggaaatatgggggactattcttacaacttgtttgtagttttcagtatctttcaactttaaaaaaggcaatattgtatgcgcaactattttctttcaattgtttttaactgacgaataaaatttgttccagtccctttaaatctaaatctttctcaaccttgacactattgacattttgggctggataactgttgtgaattttcatgtacactggaggatgtttggcagcttccctggtctctatccactagtagccagtgagcatctcttttgcccccggcccctagcagtggtgactaaaaatgtctccagaggttgccaaaggtcccctgggtggtaaaaccgccccccccacacacacccccccacccccccggctgaacacaactaccttaataagccgaaacacgctttttttaactttatataattatttgagattaaagatttcagagatattttgctcattaagcatctcacactccaagttggaaggatactgaagggatgaaaaaaacttcaagcgaatgtagcacttaaaatccaattatcattgcaaggaatgacagacccaggtctcgggatgcccgcttccttccctctctcccgcaatgcggggacaaggggaggaaatccagccccatcgccccctctgcgaagtcctgggaagggaagactcgccagccccatcctacctcaacgcagcggcaacataccggaggccccacgtcgatacggtatccatctgctccaaacctcccgccagcgcgctgcatcctgggaggccgggcggaggctgcgtcgaacgcagaggaggcggagcctagaagccagccaggagaggtggccaagggaggctgaggaggcggggccctggggagtgttgtgaaagcagagagcccgcgagctctctagggcggagctccgcgggggaagcgccggcgatctcgcggctggcgggggcgggaccgcagtgcgggggatgtcgcggggcgaggccagacgagaatcgaatgggacctaggctgagggcctggtcccgcctccagacccaggcgtccgcattggattgggcggtgcggcggcgcttctgtccgccttccggtgtcacgcgaccgcctccccctcccacccttctctgtctacctctgggcgggactgccgggtgatgagatactcggtcggcgacggtagaacgggcgacggcgacaaccgcaatcacatccacgacggtgatcatggcagaggtgaggagcctattgcaccgccgctggccccccggacccggaagccgcctctgaggcccggggaccgagcgcccgtgtgcaggtgggctgggttgagggtaagcgggttgatgcaagtagtatctaaggtcccatcgtgtctcccatccagaatcacgcccagaataaagccaagctcatctctgagacccggaggaggttcgaagctgagtatgtgacaggtgggtactctgttccaggtattaagaaaggtgtgcagtgagcatccccaactttgctggagtgtttgtgagtgtatttgtgggaggtgttagggaccctttcgaccctcacaggaatgatgctgggcacgtctcaaaggttttcctctccatgacaagccgtgtgcactgcttcaaatggtcaagtggtgtgtcccatgctccctttaaagggttaatgtaagttggaaatcggttaagtttttagcatgccctcgtgtttatggaacttgcaggatacttgttaggcccacaacacgggtgacattgtccagtccacggttccactgctggcctttcaccagcaacactagcgaaaatgtacctggaaactgccataatactattgatgtgtacttaattgggtatacaaattccttggatattttgtttgatttggctttcatacaacccagcatgctacccacaaaataggccctccaatgctggaacaagttcttatcccaaactgtatcttgcaaagtacctatgagtccagaattgatttattggttgaacattctgtgtccagatgtcacagatacttgagttgtcaggtacttaactgaatatttaatgcttgtacagtaattttgtaaaacatacggaataacttattgtaaatatggaattaaataaggatttatatgttgcctaccttaagattgattgtaatcctaaccctgccactaca

SEQ ID NO: 3132 - DNA, 6000 bp, Homo sapiens
cctagcaatcttttgtttcttaaactatcaatattttctcttttattataattcatttatcacatttcaaaatcatacaaaaaggaatacagtttagtgaggcgtaagtgtcccttccatctctgtctctcagcctggttaagtttctcaacatagccttgcagagatagtttaggtatatgcagtaattttgagacagggtctcactgttgctcaggctggagtgcaatggtgtgatctcggctcactgtaacctgctcctcctggattcaagtgattcttgtgcttcagcctcccaagtagctgggattataggcatgcacaaccacgcccagctaatttttgtattttcagtagagacagggtttcaccacgttggccaggctggtctttaactcctgaccttgtgtgatctgctcacctcagcctcctaaagtgctgggattacaggtgtaagccactgcacccggactccaaatattctttaggcctcttttagctccatgttgcctgtctcaagaaccaggtcacatggcccagagctgactggagaagggtcagccgtctcccctagtctcttcccctgcactgacctatccctcttcccaagctcttcccaggcctgtaggggtgggtgccttctctccctctctttcctttcctgccctaggggcctacttgaatcaggggaagggctatcatgggcactgttacacattcctctccaggtgtaagagtgaggtggccctgatcctgagcaacagtccctactacccactcacccccatgactcggttccgcacattgaagaatcggttttgtcgctctttttctcgatttcttctagcctcgatggctgctgcttccttggtatctgttgactgttttatgttatacatctggagcaaaagggaggtggaatggcccatcagtgccgaccaccgtctttgactacacgccacccccattcctttctccctataatatttcagcagttattgattcctactgattttacttcctgatatatttcgtatctgtgccctccatctctgctgtcaccagcttaattcaggcctcacaatctggtgtcaggcagtatctcaggagccccactgggttctcttgctccaacgttaccctctctgcactggatttctctgcactggctaccagagtgatctttgggaagcaaatctgaccatggcactcctcagcgtaaagcctttgaaagcacctttaaagcaatggctccccagtgcttataaggcccaaccccctttgccagatttataaggttcttcatgatctgacccctgctcacctttctaagcctcaaacacatctacaacactcctttttcattatactctattcagttttccttatttcagtaagtggcaccaccattcaccaagttgctccggtcaaaaacctaggagacatcctttaatccttcctttccctcactccttcttctttcaaaataacccttatccaagccaccattgccagcttcctgaataaccacaactgtctccatgttggtattccagcttcctctattgactcctatagcccaatcacagaaaccagaagcagctttcttttctgaaatatatgtccccccaccctttttttttttttttttttttttttacttttattacttattttctggtcaaatgaaaggctagaaagctaaatttgcctgtgttccttcatattttgggaagctcacttttggcatgtaacccagccaaagctgcagccaaaaaaactttagcaaacataaatctgatcatgtctctcacctgcttaaatcctccactagcttcccactatacttagaatcagatccaaactccttactgtgggctttcaagatctagttcctgcacacctctccaatttgtctcaaaccactgtctcccttgcttacagtgctccaggcaagctgatcaagtcctccaacacagtaattgttcccaccccggggcctttgtatgtgctgttcctttgtttggagcgtgattctttaattcctcctatagctatttggatctttttggtgttttgttttgttttccattttgtaactgtgaagtagttgaacatatatgcccggctgatttttgtatttttagtagagatggggtttcacagtgttagccaggatagtctcaatctcctgaccttatgatccgccctccttggcctcccaaagtgctgggattacaggcatgagccaccacacctggccccatttaattttttttaatatagatggggtctcactatattgcccaagctagtcttgaactcaagcaattctcctgcctcggcctcccaaagtgctggtattacaggcatgagccattgtgcccggcgtcacttaggtttttaatccacttggagttgcattttgtgtatggtgtgagataaggatccaatttaattttccccccaagtgccatctcatcttttttaaatttaaaattttattttatttttggccgggcgcggtggctcacgcctgtaatcccagcactttgggaggccgaggcaggtggatcaggaggtcaggagttcaagaccagcctggccaacatagtgaaaccctgtctttactaaaaatacaaaaaaattagccaggcgtggcagtgggcacctgtaatcctagctacttggaaggctgaggcagagaataaaatttattttatttttaatttgttttagatggggtctctctctgttgcccaggatggagtgtagtggtgcaatcatggctcactgcagcctcaaactcctgggctcaaaggatcttcctgccccagcctcctgagtagctgggactacaggtgtgtgccaccatgcctgcctaatttttaaaatttttttgtagagattgggttttgctatgttacccaggctcaccatctcatcttttaaaagggaacagtatttccccatggattacatgagattgctgtcttttagccattttatcccctcagcctgattgtttctcccagctgaacttcatttatggctcccctactagattccatctaccaagcttcctccctttatttatttttgagacagggtattgctctgtcacctaggctggagtgaagtggtgcggacaccactcactacagcctcaacctcccaggctcaagtgatcctcctgcttcggcatcctgggtagaccagaggtgagagctgccacacccagctaattttttaatttttagtagagatagggtctcactatgttgcccaggctggtcttgaactgctggtctcaagtgatcctcctgccttggcctgcctccctcacgatgggattacagttgtcagccaccatgcccagccacttcctcactttcctggacttgtcctaagtctttaggactctttctagccttcggacataatttaataaatagttaaaggaataattatggcaaccaccagatcctttccatgtttaagtctgagaatggcaccaacttacctactggtttcacctgccattacagtataaggtcactgaaggggaagattcagctgacattttaagcttcttggattgctaaggcccctgccttattaatgatagagagcagagagggaagagaggtaaggtggcattgtggtatagagctgtgggaatgggatgggggagaggcatggaggcagaggtaggtggaggtggagagcgctggcttagggaccctgactcctgggggttcacacaaaatacctttctcagtaaggaatcccgattttgaagctcttaggttggctctgcatgcaactttgttcttgggttacggcggcagtttctgaactctgcttggtacaacaggagggaggcaggggataggggtagtatctcaggccgtagccttccccagcctgtatccctgttgcctgggagtagccccagtcccattcacaacccgtccgccttcgcaacccgtcccgccaccaatcccaccccaccattagcaaagtctgagctcacctaacactgaatcctcccgttggcccctccttcccgtccagctctccgctccccccgggtccttccaattcccgaccctgtccttgtcctagccttgaaagctggccaggctaaagccacagccgagctcccaccttcctcttgccctgaggggcataatcctgctgtgacttctgtctcagcaagcgtgagctcaggtctcccccgcctccttgaacctcaagaactgctctgactccgcccagcaacaactcctccggggatctggtccgcaggagcaagtgtttgttgttgccatgcaacaagaaaggggggcggaggcaccacgccagtcgtcagctcgctcctcgtatacgcaacatcagtccccgcccctggtcccactcctgccggaaggcgaaaatcccgttaggcctggacgtattctcgcgacatttgccggtcgcccggcttgcactgcggcgtttcccgcgcgggctacctcagttctcgggcgtacggcgcggcctgtcctactgccgccggcgccgcggccgtcatggggttcctgaaactgattgagattgagaactttaagtcgtacaagggtcgacagattatcggaccatttcagaggttcaccgccatcattggacccaatggctctggtgagataaacctggccgcggccctgcgcacgtcccggcctggaccccttatccggtgccggagtagtacaacccagcccatgtaacctgaaacgtcgcggaccttacgggttccttgcccgtccagagggggttctgctcgaacccactctccccgcgcgggtgctctaactcgaaccccttccaggtgtcacttgccgcttcctgcgcggcccccgccccggcccagtggtacaggccgagctgccagttaccccgcctacttccccctcccgccaaaggagtcgcgtctggaaccagcttcccgccagctcagtcctccgccgcgcggctccccgccggaccggccggagccggcttcccagccttacttgaccccctccggagaatgtggggacgctggtagctctcccgtggccttcggtcccaaacggtgcacttctgtttcagcccagcgtcctctctcgcctcgcattggtacactccaactcctttctactcttctctggaggcggcacttttgaatttcagacccagcgctccagtctttagaatgcttgaggtgtcgatccccaccccccaccgctatgtcagaggtagttgcctcgaactcgcccttttcctaccaccgaaaccgtcaaaagccgaaattaactaatttaccaaatttgttgaatgcttattgtttatcaggagttattcagttgcaagttgtggaaacagcggagaatagaataaaccaactccatgctcacagggaacttatattccagaggggaaagaagataaggagaaaataagatggttttaggctgtcataagtgctatacaggaaatgagacaggtggatgtgataaagtgacttaggtggtgtctttagaaagggtggtcaggtaaagcctctattttgtgtcttcccaactctaaacgatacaccgtggattcctctcacctcagatgtccatttggaatcctgctgtattcttccaccccagagatgttctagctgaatgatatcctagcctaagaggctgcccttgctgaagtagcacatactgagtacctttcctggagactgagtgtctcaacagtggcactattgacatttccagcgagataatcctttgctgtgggatgtgctctgtgcattgtaggatgtttaacagcatctctggcatctacctgctagataacagtagcacccctgctccccaggcatgacaatcaaaactgtctctagacattgctagatgtcacagagggtgtgtgtgattcccccaaccccccaacttgtttgagaaccactggcctggaggg

SEQ ID NO: 3133 - DNA, 6000 bp, Homo sapiens
cttcactttcctgacccctcaggcaggttctactcctgtagaatctagaacccactgtctacattatattgatgttcgcctctctgtattctctcctccaccagactgtgaaccctttcagggcagaaactgggccttagtcattttcgtatccccactgcccaacacagtgcttggcacagagcaggccccgaggaaatgcttgtcagcttgtcagctggatctcaatcagaacactaataccctagccaacttcttacggcaggcactatgcactggttttcaaagctgccactctgtgttaacactcacctgacttccttcagcctcattttacagaagaggagcctggggctcagagaagacaggtgatttatccaaagccacacacataacagtcagcagacctggccttaaatacttacggggtcttttccagaataccatgctgcatcccccctctatccactcacctagcaatcttttgtttcttaaactatcaatattttctcttttattataattcatttatcacatttcaaaatcatacaaaaaggaatacagtttagtgaggcgtaagtgtcccttccatctctgtctctcagcctggttaagtttctcaacatagccttgcagagatagtttaggtatatgcagtaattttgagacagggtctcactgttgctcaggctggagtgcaatggtgtgatctcggctcactgtaacctgctcctcctggattcaagtgattcttgtgcttcagcctcccaagtagctgggattataggcatgcacaaccacgcccagctaatttttgtattttcagtagagacagggtttcaccacgttggccaggctggtctttaactcctgaccttgtgtgatctgctcacctcagcctcctaaagtgctgggattacaggtgtaagccactgcacccggactccaaatattctttaggcctcttttagctccatgttgcctgtctcaagaaccaggtcacatggcccagagctgactggagaagggtcagccgtctcccctagtctcttcccctgcactgacctatccctcttcccaagctcttcccaggcctgtaggggtgggtgccttctctccctctctttcctttcctgccctaggggcctacttgaatcaggggaagggctatcatgggcactgttacacattcctctccaggtgtaagagtgaggtggccctgatcctgagcaacagtccctactacccactcacccccatgactcggttccgcacattgaagaatcggttttgtcgctctttttctcgatttcttctagcctcgatggctgctgcttccttggtatctgttgactgttttatgttatacatctggagcaaaagggaggtggaatggcccatcagtgccgaccaccgtctttgactacacgccacccccattcctttctccctataatatttcagcagttattgattcctactgattttacttcctgatatatttcgtatctgtgccctccatctctgctgtcaccagcttaattcaggcctcacaatctggtgtcaggcagtatctcaggagccccactgggttctcttgctccaacgttaccctctctgcactggatttctctgcactggctaccagagtgatctttgggaagcaaatctgaccatggcactcctcagcgtaaagcctttgaaagcacctttaaagcaatggctccccagtgcttataaggcccaaccccctttgccagatttataaggttcttcatgatctgacccctgctcacctttctaagcctcaaacacatctacaacactcctttttcattatactctattcagttttccttatttcagtaagtggcaccaccattcaccaagttgctccggtcaaaaacctaggagacatcctttaatccttcctttccctcactccttcttctttcaaaataacccttatccaagccaccattgccagcttcctgaataaccacaactgtctccatgttggtattccagcttcctctattgactcctatagcccaatcacagaaaccagaagcagctttcttttctgaaatatatgtccccccaccctttttttttttttttttttttttttacttttattacttattttctggtcaaatgaaaggctagaaagctaaatttgcctgtgttccttcatattttgggaagctcacttttggcatgtaacccagccaaagctgcagccaaaaaaactttagcaaacataaatctgatcatgtctctcacctgcttaaatcctccactagcttcccactatacttagaatcagatccaaactccttactgtgggctttcaagatctagttcctgcacacctctccaatttgtctcaaaccactgtctcccttgcttacagtgctccaggcaagctgatcaagtcctccaacacagtaattgttcccaccccggggcctttgtatgtgctgttcctttgtttggagcgtgattctttaattcctcctatagctatttggatctttttggtgttttgttttgttttccattttgtaactgtgaagtagttgaacatatatgcccggctgatttttgtatttttagtagagatggggtttcacagtgttagccaggatagtctcaatctcctgaccttatgatccgccctccttggcctcccaaagtgctgggattacaggcatgagccaccacacctggccccatttaattttttttaatatagatggggtctcactatattgcccaagctagtcttgaactcaagcaattctcctgcctcggcctcccaaagtgctggtattacaggcatgagccattgtgcccggcgtcacttaggtttttaatccacttggagttgcattttgtgtatggtgtgagataaggatccaatttaattttccccccaagtgccatctcatcttttttaaatttaaaattttattttatttttggccgggcgcggtggctcacgcctgtaatcccagcactttgggaggccgaggcaggtggatcaggaggtcaggagttcaagaccagcctggccaacatagtgaaaccctgtctttactaaaaatacaaaaaaattagccaggcgtggcagtgggcacctgtaatcctagctacttggaaggctgaggcagagaataaaatttattttatttttaatttgttttagatggggtctctctctgttgcccaggatggagtgtagtggtgcaatcatggctcactgcagcctcaaactcctgggctcaaaggatcttcctgccccagcctcctgagtagctgggactacaggtgtgtgccaccatgcctgcctaatttttaaaatttttttgtagagattgggttttgctatgttacccaggctcaccatctcatcttttaaaagggaacagtatttccccatggattacatgagattgctgtcttttagccattttatcccctcagcctgattgtttctcccagctgaacttcatttatggctcccctactagattccatctaccaagcttcctccctttatttatttttgagacagggtattgctctgtcacctaggctggagtgaagtggtgcggacaccactcactacagcctcaacctcccaggctcaagtgatcctcctgcttcggcatcctgggtagaccagaggtgagagctgccacacccagctaattttttaatttttagtagagatagggtctcactatgttgcccaggctggtcttgaactgctggtctcaagtgatcctcctgccttggcctgcctccctcacgatgggattacagttgtcagccaccatgcccagccacttcctcactttcctggacttgtcctaagtctttaggactctttctagccttcggacataatttaataaatagttaaaggaataattatggcaaccaccagatcctttccatgtttaagtctgagaatggcaccaacttacctactggtttcacctgccattacagtataaggtcactgaaggggaagattcagctgacattttaagcttcttggattgctaaggcccctgccttattaatgatagagagcagagagggaagagaggtaaggtggcattgtggtatagagctgtgggaatgggatgggggagaggcatggaggcagaggtaggtggaggtggagagcgctggcttagggaccctgactcctgggggttcacacaaaatacctttctcagtaaggaatcccgattttgaagctcttaggttggctctgcatgcaactttgttcttgggttacggcggcagtttctgaactctgcttggtacaacaggagggaggcaggggataggggtagtatctcaggccgtagccttccccagcctgtatccctgttgcctgggagtagccccagtcccattcacaacccgtccgccttcgcaacccgtcccgccaccaatcccaccccaccattagcaaagtctgagctcacctaacactgaatcctcccgttggcccctccttcccgtccagctctccgctccccccgggtccttccaattcccgaccctgtccttgtcctagccttgaaagctggccaggctaaagccacagccgagctcccaccttcctcttgccctgaggggcataatcctgctgtgacttctgtctcagcaagcgtgagctcaggtctcccccgcctccttgaacctcaagaactgctctgactccgcccagcaacaactcctccggggatctggtccgcaggagcaagtgtttgttgttgccatgcaacaagaaaggggggcggaggcaccacgccagtcgtcagctcgctcctcgtatacgcaacatcagtccccgcccctggtcccactcctgccggaaggcgaaaatcccgttaggcctggacgtattctcgcgacatttgccggtcgcccggcttgcactgcggcgtttcccgcgcgggctacctcagttctcgggcgtacggcgcggcctgtcctactgccgccggcgccgcggccgtcatggggttcctgaaactgattgagattgagaactttaagtcgtacaagggtcgacagattatcggaccatttcagaggttcaccgccatcattggacccaatggctctggtgagataaacctggccgcggccctgcgcacgtcccggcctggaccccttatccggtgccggagtagtacaacccagcccatgtaacctgaaacgtcgcggaccttacgggttccttgcccgtccagagggggttctgctcgaacccactctccccgcgcgggtgctctaactcgaaccccttccaggtgtcacttgccgcttcctgcgcggcccccgccccggcccagtggtacaggccgagctgccagttaccccgcctacttccccctcccgccaaaggagtcgcgtctggaaccagcttcccgccagctcagtcctccgccgcgcggctccccgccggaccggccggagccggcttcccagccttacttgaccccctccggagaatgtggggacgctggtagctctcccgtggccttcggtcccaaacggtgcacttctgtttcagcccagcgtcctctctcgcctcgcattggtacactccaactcctttctactcttctctggaggcggcacttttgaatttcagacccagcgctccagtctttagaatgcttgaggtgtcgatccccaccccccaccgctatgtcagaggtagttgcctcgaactcgcccttttcctaccaccgaaaccgtcaaaagccgaaattaactaatttaccaaatttgttgaatgcttattgtttatcaggagttattcagttgcaagttgtggaaacagcggagaatagaataaaccaactccatgctcacagggaacttatattccagaggggaaagaagataaggagaaaataagatggttttaggctgtcataagtgctatacaggaaatgagacagg

SEQ ID NO: 3134 - DNA, 6000 bp, Homo sapiens
agcagtgattgcctctgaaaaggaaactaagcagctagggtcaagggagtcttctttttactactgtatatccttaaggatttttaaaattgtataccatgtacatgtaccagctattcaaataaataaggttttcaacattaacagtggctatcttttcagtagtggagttacagcttttactttgttcattttagaatccgaaaacaaaaaaggtttcatttacttattttatttattttttgagatggagtctcgctctatcgcccacgctagattgcacctaccaagttcaagtgattctcctgcctcagtctcctgaatagctgggacgacaagcgtgtgccaccacacctagttaatttttgtatttttagtagagttggggtttcatcatgtgagccaggctggtctcgaattcctgacctcaagtgatccacacacctcggtctcctaaagtgctgggattacaggcataagctaccactcccagaccttattcatttacatactgagacagagtctgactctgtaacccaggctggagtgcagtagcagtatcacagctctctgcagcgctgacctccttggctcaagtgatcctcgtgtctcagcctcacaagtagcgggaagcatgggcataagccaccatgcccagctagtttttggatttttgcagaagcagggtctccctatgttgcctaggctggtctcaaactcctgagctccagagatcctccaccttggactcccaaagtgctggggttacaggcatgagccaccgttcctggccaaaaaatagatattgttttaaaagtttaggccgggtgcagtggctcatgactgtaatcccagcactttgaaaggccgaggcaggcggatcacctgaggtcaggagtttgagaccagcctggccaacatggtgaaaccccgtccctactaaaaatacaaaaattagccaggcacggttgtgtgcctataatcccagctactcgggaggctgaggcacgagaatcgcttaaacccaggaggtggaggttacagtgagctgagatcgcgccactgcactccaacctgggcgacagagagagactctgtctcaaaaaaaaaaaaaaaaaaaaaaaagtttagtcgggctggtggataaggaggaacagtttagtctctataatttctatctcaagactgtccctaaagaacttatatatgactttgaactgaagatctgatttccaacacctttctactcagccataaaaacagcagcccaagtccttccatagagacggtataagactatgattaggttggacacggcatctcacgcctgtaatcccagcactctgggaagcagacgtgggtggatcacttgacctcgggagtttgagaccagcctggacaacatggcaaaatcccatctctacaaaaaatacaaaaattggctcggcatggtggcacactccagttgtcctgactactgggaaggctgagatgggagggttgcttgagcccgagaagttgaggctgcagtgagccatgattgtgccactgtatgccagccttggtgacagagcaagaccctgactccaaaaaaaaaaaaaataggccaggcgcggtggctcacacctgtaatcgcagcactttgggaggcccaggtgggcagatcacggggtcaggagtttgagaccagcctgaacaacgtggtgaaaccccgtctctactaaaaatacaaaaactggccgggcatagtggtgcacgcctgtaatcccagctcctcaggaggctgaggcaggagaatagcttgaacccgggaggcagaggttgcagtgagctgagatcacgccactgcactccagcctgggcgacagagaaagacttcatctcaaaaaaaaaaaaaagaaaaaaaagaaaagaatcacttgaacccagcaggcagaagttgcagtgagccgaggtcatgccactgcactccagtgtgggcgtcagagtgagactccatctaaaaaagcttgcaaacttgggcttagaaccaacagaccaggttctaatcttactttcactaccacttagctgaccttccattccctcacctggaaaaagatgaaaaaaaccacaactcacgggtctaaaaatatgtgcggcacatacttctctattggagtggcaggagcacaggcatgggttctgagaaccacggacaagttatcacacctctgtgccttagtctcctcatgtataaaacgaagctattggcattttcctcctagggtcattttgagaatttaattgtaaagggtcccttggctgggtgcagtggctcatgcctgtaatcccagcactttgggaggctgaggcaggcagatcacttgagcccaggagtttgagaccagcctggccaactgggagaaacaccaactctactaaaaatacaagaactagccagatggggtggcgcacgcctgtagtcccagctacttgggaggctgaggcacgagaatcacttgaacccaagaggcagaggttgcagtgagccaacatcatgccactgcactccagcctggacaacagagcaagactgtctcaaaaaaaaaaaaaaagaaaagaaaaagaaaaagaaaaaacagggtcccaataaataaagtacttgacacacagagtaggtactcaattaattagtcctatcctaagtctggactcagctgtctccctcatcacagcaggactagcacatcatgcagaccaggagtcagccttttaggaaccaatatccaacctttgggcttctcccatcatttccagggaggacaacatcatctcacaaccccaagcctctctaatcacaatcaatatggtaaacatttttgtaatatatattatggactgaacaccagtaaaacgtttcaaggaatgtctgctttagggtactcacaggccaatgaagatacaaaaacatgcaccatcaatataggacttaataaacattaacgtgtaccaagtgtctacggtatgccacagaggaagactcactcaccaaagggactaaaggaatggcttgtagaggtgggccttgaagaacgggggcaagtgggggagtgccatagcccttttcagaacagctgggaatacaaatctactaatgctgaggggactgaatgccaagaggtacatcctagctcttccaacaggggccactacactaaaacccgaggaaactgggtggacaccaagcattagccctccaggccagtggttctcaaacaagttggggggttgggggaatcacacacaccctctgtgacatctagcaatgtctagagacagttttgattgtcatgcctggggagcaggggtgctactgttatctagcaggtagatgccagagatgctgttaaacatcctacaatgcacagagcacatcccacagcaaaggattatctcgctggaaatgtcaatagtgccactgttgagacactcagtctccaggaaaggtactcagtatgtgctacttcagcaagggcagcctcttaggctaggatatcattcagctagaacatctctggggtggaagaatacagcaggattccaaatggacatctgaggtgagaggaatccacggtgtatcgtttagagttgggaagacacaaaatagaggctttacctgaccaccctttctaaagacaccacctaagtcactttatcacatccacctgtctcatttcctgtatagcacttatgacagcctaaaaccatcttattttctccttatcttctttcccctctggaatataagttccctgtgagcatggagttggtttattctattctccgctgtttccacaacttgcaactgaataactcctgataaacaataagcattcaacaaatttggtaaattagttaatttcggcttttgacggtttcggtggtaggaaaagggcgagttcgaggcaactacctctgacatagcggtggggggtggggatcgacacctcaagcattctaaagactggagcgctgggtctgaaattcaaaagtgccgcctccagagaagagtagaaaggagttggagtgtaccaatgcgaggcgagagaggacgctgggctgaaacagaagtgcaccgtttgggaccgaaggccacgggagagctaccagcgtccccacattctccggagggggtcaagtaaggctgggaagccggctccggccggtccggcggggagccgcgcggcggaggactgagctggcgggaagctggttccagacgcgactcctttggcgggagggggaagtaggcggggtaactggcagctcggcctgtaccactgggccggggcgggggccgcgcaggaagcggcaagtgacacctggaaggggttcgagttagagcacccgcgcggggagagtgggttcgagcagaaccccctctggacgggcaaggaacccgtaaggtccgcgacgtttcaggttacatgggctgggttgtactactccggcaccggataaggggtccaggccgggacgtgcgcagggccgcggccaggtttatctcaccagagccattgggtccaatgatggcggtgaacctctgaaatggtccgataatctgtcgacccttgtacgacttaaagttctcaatctcaatcagtttcaggaaccccatgacggccgcggcgccggcggcagtaggacaggccgcgccgtacgcccgagaactgaggtagcccgcgcgggaaacgccgcagtgcaagccgggcgaccggcaaatgtcgcgagaatacgtccaggcctaacgggattttcgccttccggcaggagtgggaccaggggcggggactgatgttgcgtatacgaggagcgagctgacgactggcgtggtgcctccgcccccctttcttgttgcatggcaacaacaaacacttgctcctgcggaccagatccccggaggagttgttgctgggcggagtcagagcagttcttgaggttcaaggaggcgggggagacctgagctcacgcttgctgagacagaagtcacagcaggattatgcccctcagggcaagaggaaggtgggagctcggctgtggctttagcctggccagctttcaaggctaggacaaggacagggtcgggaattggaaggacccggggggagcggagagctggacgggaaggaggggccaacgggaggattcagtgttaggtgagctcagactttgctaatggtggggtgggattggtggcgggacgggttgcgaaggcggacgggttgtgaatgggactggggctactcccaggcaacagggatacaggctggggaaggctacggcctgagatactacccctatcccctgcctccctcctgttgtaccaagcagagttcagaaactgccgccgtaacccaagaacaaagttgcatgcagagccaacctaagagcttcaaaatcgggattccttactgagaaaggtattttgtgtgaacccccaggagtcagggtccctaagccagcgctctccacctccacctacctctgcctccatgcctctcccccatcccattcccacagctctataccacaatgccaccttacctctcttccctctctgctctctatcattaataaggcaggggccttagcaatccaagaagcttaaaatgtcagctgaatcttccccttcagtgaccttatactgtaatggcaggtgaaaccagtaggtaagttggtgccattctcagacttaaacatggaaaggatctggtggttgccataattattcctttaactatttattaaattatgtccgaaggctagaaagagtcctaaagacttaggacaagtccaggaaagtgaggaagtggctgggcatggtggctgacaactgtaatcccatcgtgagggaggcaggccaaggcaggaggatcacttgagaccagcagttcaagaccagcctgggcaacatagtgagaccctatctctactaaaaattaaaaaattagctgggtg

SEQ ID NO: 3135 - DNA, 6000 bp, Homo sapiens
agggtcagattccctccagttgttgtgtataaatcataccaaatttttaatacattccagagcccacctatctaaatgaatcaactgagatagcagatcatgatggttaagagcaataggctctggagcaatatttcttgagtggaatcctacctctgccccttgttggctatgaggcaatgagcagaagactaaacttttcagtgcttcagttttcttatctggaacatgggaatgataggagtacctaccctccttaggactgttgaagattcaatgtgttaaaaaatgtaaagcaatctgtgaaatgttaaaaatatattatctaacactgttactccctttgggaggtaaatgatcagacacctccttgactaatctgaaacttctaatataatgctgaccatacagaaaactctcagttaaggaaacttacaatattatgggaaagggttaacatttataatacacaaagagctcctgcaaatcaattagaaggatgaatttggttttactcttttgattttgtgtaaagacttgcaagatcatttcatctcaccctctcaggtaagaaaactgaggtctagaaatattttcctaaggtcatgtagtaaatcagtggccaagtcaggaatagaacactagggacctaatttctcccaggccagggcttttctttaattaatcaaacaagcctgatctaagaatgtggtcttacaggttagctcagaacctctagagtctcagaactagactttgtaagagatacaactcttttaattctaataaatttcctaactggtataaatctgttaatattaataatcttaattataaccctttccctgtatgttttccattgcccacaaagcaacaacatattccttatcttatttgatccttgcaaacatccttgttagccttacagggaaactgaggtctggggaggggaagtggcatgttcaaggtaatctagctggtcacatgaacatctcttttatgtttacaattttgtcctcatggccctgccaacaggcagaaggataattttagcagcaggaaatctgagataagaagctggcaggcttttgacaaagtcttaaagggtaaacctggggtccaggcttgaaagcctaacttaaaattgcctggaattagctatgagattcctcactactgttaccaattctgatcccagaagcaggagaccaaaacaagctttatggaaagacctcagcttggcactcaagacttttcaatcaagcttcagcctatctgtccagccatatctctccttagatcatccttaaactgcactggctgactcactgggccccaaaatacatggtgtattttcctgttttttggcctttgctcagcctgaaatgccattttcctccttctattcccaacaaaatctgatccacttttcaaggtctggtttgatgttcacttcctctgggaagtgacccctgtatccttgggacaggccttgtatttggttcttatattgcccacatgctcctatctgagcaagtatccaccagtattttcctggtctgcttccccactagactgtgaactccttgagtatggagactagatctcagtgatctgtaatttgtgtttccagtgtccaactcaggccctggcacagaggacagagaagacacttgcttattgtgtttgtgcagtctacatctctctgccctagatgagatgaacttgtggacaactaatcctagttcaacaaggtaaatattataacagagagctgtgcagggaattggatgggagaactaatttgtctgaggtaggaggtggcatccagaaaggtttctctaccttgaatgggacagaaacagataaaagaatgaagtcctctctgaaaagggccaatgaactcgtggcagagaaagggttcagtcagtaccagattctcattcaagatcaagctctgacctgcagctcttggtctaaaattctaaaatggggctatctctagggaagaaaagattacaatgtgatttcccaaggcccccagatcctgaccccatacccctcccaaagtatagggcatgtgtatcgggggagaataccatgtaaagcagcatatgacagtgctgatggataataaagtcacgaatggggtctccctattggtagctctcagactgtttgggtatgaatgcatttgtggagagtgaaggtgtgaggggagatcgaccacacacttacaagctaggtgcatgtatatgagtgtcaggccttctgtgacagcagcctaggatccccttccttctcacccactgtcctggcccaccatctctccactattttcggcctcatgcctgggccccaaacctcactgaatcctagtcatggaagtggctctccacagactatagtcgcacagcagctggagggttttgggtgggattgcttgtggagcctatagaaaaagcaagatgactactcttagagcgaggaagtcctgaaatgtctccaaagagctttggtttctgcctttccactcttcttgatcgtgacagccctctgaggaacgttggctagagactttgatttccattttactgaggaagctactgatgcccagagaagcaagagagcttgttcaaagcgccacagcaaatcaaccctactttacacatcagtggggaggtaagagctataatctcaatcactcagttcattcaaaaccagacttgaccaagttagagagactttcacaggtgctagtgaattgccctgggggccagtgtcccataaaggccagaatggacttttaaaaatatacagacagataaataggttacatatagatataatcttttcccccactttcccatgccctttaatgcacacgacaaccaaccatctatgcaaagaaaactttccagagggcctgaagaatggatgtggatttgtgcaactcctgcctactttcccttctttctcacctaccttttattctagaggttttttcttccatcgctaattatccaacactcggttctcttgcatttacagacccccaaggcaggtccagtgggtggcatcaaagaggaagcctggaggtgttcgttggttccctgagaaggctgaggacgtacccttgttaagtgggggatgtatgtgctctgttgaaatatcagctgttgtagttgccaaagacgttcctgagccaccagaagccttttctcttcagtccaaccatgtgttcaccttgccccaaaggtcagaactaatattaacaagccactgcagaatggggaaattaaaaccagccatggagacaggcaagttctggatttcgctggtgctgagtttcagatcgatcttcagtgtaaatgggcataatcccttactggaaagcaatctggcaatatgaagcaagagcaataaaaatgttcatttcctttgtcctagttatcgcactcatgggagtcaatcctgagtcaataactcccaaagcatgaagaagctcaggacatgcaaatttttattttaatcacagagctattttctgatagcaacaactggtaaccttttaagtcctccaggaggaaaagcagtttactgcgtctttgctgtaaccattgaggatgatggctctaagacttaaattctggggaacaaataattatgctgcaattctgggtgaggaacctaaagatgcatcgttatgcttttccctggacattgggcatatccattacttctaatttttgtgctctcaaaaacaagccatgaacctgtcgatgctcttgctattatcctttgttcattcattcacctgacaaatatctattgcttcccaacatatgctgtgtccagtattaggggatggggctaacaagatgaaccagacatggtcattgctctcaagttgctggcattctaatggcagcagaaatagaagtcaatgatagctgtgtattataagtactgtgacagaatggaccatagggtgccgtggggccccagaggaaaagacttaactggggaggtgtgtggtcagtaaaaacactcagaaaagtaattattgagctaattaagacagggtgtgaatcctggctctactacttcagtgtaagagagagtgaactgtgagaatgaaatgaattcattcgacgtctctaacttagcctccatgtcccgaactgggttgtcttgagaatgaaatgagataacatatacagaagagccatggatgcatccggagacaatgctgctcacgagcttacatttcctgggcttcgatttcacttatctgagaaacagaaccaagagtaaggatgtgtccggctacatccttcagaatgttaagagccaagacaaaagctacagggcaggcttgagacagcctcctcctcctcccctctgccccaataaagccaaaggccctcctcctaagtcttatctcagtggagcgactcttactgctccctcctccaaccatgaacttccctttgcccagtccaacgcgagcacttagcgccagctattcctggggcgcaagcgctgcagccatctgtgaacttaggtgggcggtccgccgcactgagggcggggctttggcagctgagcagttccgctcagggttccgtcgcttaaaaagtggcaaaatgccgtttgtaagtaaccggacgcaccacttggacttctgagtagaggaaaaacgcattgagactcagctgtccgagcggaaggagcgggagcccaactggaaactcctctcgccattcattgcccctaggcttccgctttgcttccttcagcgtccacccagttcctcctcccgccaatgagagctgaggaagttgaagcccccgcccgacgtgcgtcaggcgctttagtggtacgcacgagaacgcctgcgcaaacgcgcgcgggaggcgggcctggccaacttctgaacaggaagcagttcgctcgcgcctaggttggcgcgggctgggaggtgttccagccctttaagatgttgcgcgtggtgagctggaacatcaatgggattcggagacccctgcaaggggtggcaaatcaggaacccagcaactgtgccgccgtggccgtggggcgcattttggacgagctggatgcggatatcgtctgtctccaggaaaccaaagtgaccagtgagcgctctggattccaggatccctacatactttttctttcccgctaacttttgtcccctgtcccatgtaattttactttcccagtttcctattcttagagtcctgtccttagacccaggtcccttccctcttaaacttccatttcccaccctagctagatcccctaattgcactccatctcctgtcttcagcaaactttagctccttctcgaaaccccatatctagtcagattcccactcattctccggccccaaactcagtcccctgaatttcctccttccatacgctgtccatctccccgccgccaagtcaaacccccgaattcttcatccctgccccaagctcagatcctctaattcccaccccatctttgaccccagctcagtctaatttcctctttttcacatttccacctcagaaccccagtaccccttatctattcccatctctcctcccagcggaaagtccctaattcccacctcatttcccaccccaagcttagatgtcctcttatttcttcaccctcttatctcccctcagaatcccctaattccttttccctccacccccagttcagatcccctaattccctctctcttacctctcacccttagctcagattcccaccatcctctcgtatgtccatccccatccccagcttcctcctatcgttcagacccccaggcttagctctgattctttccccttcccacctaattctccacctccacttcatagtctctaaccgccccccaccaagccttctaattctgatatcaatttcctctctgacatttcccatctttctaggtcctcctctaatcatggatatttcat

SEQ ID NO: 3136 - DNA, 6000 bp, Homo sapiens
tttcaccatgttagccaggatggtctcaatctcctgacctcatgatctgcccgcctcagcctcccaaagtgctgggatttcaggcgtgagccacggcgcccggccgtcttttttttttttttttttaactttagttttctcattcccttatgccctcagcttccactaccaacgttaggttgacaactcacacattgtctatgtcgacaatccagacctctattttgacatttagacctacatttcaatgggcttatagccaattacatgttatctccacccggacattctgcatacacttaaactcaacatgaccaaaactgcactgattgactttcaccaaatcttgctcttctgcctctatttactatcctggttagtggcacaaccagacttccaggcacccaaatcagaaacctgggaatcattctagtcttcttccattccttaccccctacatttaactggttattaagttcccttgatcctaccttctaaatatctgaatctggtttccttttctttacccctaaaaccactgccgtagttcagtacttcctggtctcttacctgaattatcatcattgtatcctaattggtgtccctatctcctagcatatctcctccaatctattctacactctgttcccagggttatatccatgtcctcttccctggaacctatcagtgttaatttatatggcagaaaagaaggactttgcagatatgattaagttaaagatcttgagatagagagattatccaggtgggccctaaatgcaatgacaaatgtcctgataacagagagagaaatttgacacacagagacgaggagagggccatgtgatgatggaggcagagactggagtgaaagggccacaagccaaggaatgccggcagccaccagaagccagaagagacaagaaacagattctcccctagagcctctagaaggaatatgcccctaccaacaccttgatttcatctcagtgataatgatttcagacttctgtcctccagaactgtgagaaaatatatttctcttgttttaagccaccaaatttgtggtaatttgttacaacagcctcaggaaacgaacacagtgattttctaaaattcaatcctatcacagatggaaaaaatgattttctctgtctctgtgtctctgtctctatatatctatcattccatctatatatttatgtatctatatatgtatgtatgtatgtatgtatctatctatctatctatctatgtgtgtgtatacctggaagaaaaaaataccaaaatattaaaaattatttctggacagtgggattatgatgatttttattcttctgtgcattttccaatttttccctcaaagagcatatattacttttataatcagaaaaagcaatataaattattttttaaaacccttcaatggctccccatcactgacagattaaagtacaaacttctaagcatagcacagggccttaattttttggtctttgcctatgtctctagcctaacttcctatcactcagcacccccacttctcttcagccatgaaaaactacccaaaacatgtatcattctgcctctgacactttgcacattgacctttttgacttcatcctcttggtcaagaaccaattcagatcaggcaaggtggttcatgcctgtaatcccagcactttgggaggctgaggcaggaggatggcttgagctcaggagtttaagaccagcctgggcaacatggcaaaaccacgtttctacaaacaaacaaacaaattagccgagtgtggtcgtgagtgtctgtagtcccagccacttggaggctgaggtaggaggattgcttgagcccaggaggtcaaggctgcagtgaattgtgttcatgccactgctctccagcctgggtgacagccagatcttgtgtcaaaataaataaataaatatataaaccaattcaagggtgttctttcctgcgaagccattcctgatctactcaagcagatccatgttaccctttactgctactgtacctccaatatgctactattattttatttgtgtaaggtattgcaattattggtttacatgaacatctttacacttatttgattaacaacgtataaattcattaaaattttattgaatccatagtggttttttgtaattatggattttctcactcagcagatactaaaaactatcatgtggcaatctgtaaaatgtttgatattaaaaagtagtcctggccaggcacagtggctcacgcttgtaatcctagcactttaggaggccgaggtgggcggatcacttgaggtaggagcttgcgaccagcctggccaacatggtgaaaccctgtctgtactaaaaatacaaaagttagccgggcgtggtggcaggtgcctgtagacccagctactcgggaggctgaggcaggagaatggcgtgaacccgggaggcggagcttgcagtgagctgagatcgcgccactgcactccagcctgggcgacagagcaagactctgtctcaaaaaaaaaaaattggctgggcataggcacggtggcaggcacctgtaatcccagctactcgggaactgaggcaggagaatcgcttgaacctgggaggcagaggctgcagcgagccgagatcacaccactgcactccagtctgggcgacagagcgagactccgtcccgccgccaaaaaaaaagtggtcctccactgggtgccctggctcatgcctgtaatcccagcactttgccaagtggaggcgggattccttacacccaggagtttaagaccagtttgggcaatatggtgaaaccctgtctctacaaaacatacaaacccaccgtgggcgtagttgtgcactcctgtagtcccagctactgaggaagctgaggtgggagaatcgctagaacctgaaaggcagaggttgcagtgagctgtgtttgtgccactgcactccagcctgggtgacagagcaagactgtctctaagtaaataaatataaacagtacatacatagaaaatagaaacgcaagaaagtggtcataattgctatctctagagaatgaatgggggggagactttttttttgagacggagtctcactcattgcccaggctggagtgcagtggcgcaatcttggctcactgctagctccgcctcctgggttcacaccgttctcctgcctcagcctcccgagtagctgggactacaggcacccgccaccacgccggctaattttttttttgtatttttagtagagacggggtttcaccatgttagctaggatggtctcgatctcctaacctcgtgatcctcccgcctcggcctcccaaagtgctaggattacaggcgtgagccaccacacccggccaagacttttctctttatactgttgggtattgtttgatttttctttttttttctatgagtaagtattagttttcttcttcttctttttaattgagacggggtctcactctgtcacgcaggctggagtgcagtggcgcgatctccactcattgcagcctctgcttcccgagctcaagctatcctcccaccttaaccttaacctcctgagtaggtgggactacagggacactccaccacgacaggctaatttttgctttttttcggagatggagtttcgccatgttacccaggctggtctcgaactcctaggcttaagcgatcctcccgtctcggcctctcaaagtactgggattataggcatgagcactgcacctagccggaattaaaaattcaggttctcagttgcattagtcatatttcaatggccacttatagttagtagctgccatattgaacacagcagacataggacctttccatcattgcacacagttctattgaacagcccaagtctagatcattgtgtccccacataaggtggtgcccattgggataccctgcaaccctgagtgtgaattaattaatgggaattaacaacacatacttatcaattgatccttgtagtccttggttaaccacgggggcggggcgagttaggcattactgaaacaatgaaggttagttactgataggcctcctatggaatatacagtctgatctagaggcctacaatatatccatggcaatgatgacacctgttgaatctctcagtaaatcataggaacaatagtgatgtttggactgctaggttttctggttaccatggaaatgagggtgctggttacaattctgtgtaatcacgcagagcctaaggtatgatgcaccccctcctcccccaccccgtctgtaaccatgaccaaagagttgactatttcagttgcgtttcccgagtagccccagcaacaggagaagcatctagaaatatgattaagtatggggtgtcaggatgcaagccctaacaaggaagtgtgaaaaaagaaacatggcggggcatttttttcagtaggaaaaggccaaatctattccattgaatacaatgacattgttactcttgcttcttgcacaggcgcagtgcaggactgctccgagcacgcctacgcgcgcattttctccccttcctctccctctttccactttcctctccctttttctcctctcctttccccctcccaccacttggtctttcagtctttcagtcagttcgtttaggtctctccttccgacccccacccccagctcctctccctttccttttccccctccccctttcctttcccgtctcacgcgccaggccgcttgcacatgcgcattaggtacaaagcctcgctctttgtccccatctgtcgttcacacgaactcaagcctttggcattcggcagccaatagaatctaagaaatggcggaaaaatgattccgcctcgggagctaaaccttgattggcagtttagctaaccaatcgagaacgccattttgtaccccttggcaggcaccgagctccgtcgtctcgtttccggcggtcgcgcgctcttttctcgggacgggagaggccgtgtagcgtcgccgttactccgaggagataccagtcggtagagggtgagttttgggacgtcttggttcttgtttgggagggtagtgggatttcttggaacaatcagcgaaggaagaggctagggcgaagctaggtttggagggtggatggcgcttccgaggccccttgaggccttgtctctgccgccacactgccttctcagcccacccgcggggggccacctttctcaactcgcttcgcttcgggctttccccattttcgttcctgccctgtttctttgtgcaactcatctccgaatcttacccgtgtcagtaagttgccggcctctgagccgccctgggcccgacggtgtggggtctattatgagagatcgctgaagtcgtggttggttagaggaggaggcgctttgtcgggcgctcctcctctcggccccgcgaggccattaattcagaatgggcaagtggggcccctcaagcgatatttctttgtcaaaactcttagctggaaagttcctctgcatatccagagcccgccgctttcgtagtcagatttctgtatgccctttttctaaagtcctaaccgcctagctccttgacgcatttatatagcatcactttttaaaatgaaacttaaatttatggatttcgcatcgagtattttattttccagtttgagaaactcttaccataacctgacacgtttctttgtgtttttaacagagaagtcgaggttagagggaactgggaggcactttgctgtctgcaatcgaagttgaggtaggtgtaaggaagggatagggttgccagacaaaacaccgggcacccagttgaattagaatttcacctacacaaccaattatttttaagtatatgttgcatagttttcaattaaatttcaaatttaattgtgggttgtgtattttatttgctaaatctggcaactctagtgggggggccctggttatatttatactgtgtccttgtccaccttccttgttattaaatgaaaagtcct

SEQ ID NO: 3137 - DNA, 6000 bp, Homo sapiens
tatgattaagttaaagatcttgagatagagagattatccaggtgggccctaaatgcaatgacaaatgtcctgataacagagagagaaatttgacacacagagacgaggagagggccatgtgatgatggaggcagagactggagtgaaagggccacaagccaaggaatgccggcagccaccagaagccagaagagacaagaaacagattctcccctagagcctctagaaggaatatgcccctaccaacaccttgatttcatctcagtgataatgatttcagacttctgtcctccagaactgtgagaaaatatatttctcttgttttaagccaccaaatttgtggtaatttgttacaacagcctcaggaaacgaacacagtgattttctaaaattcaatcctatcacagatggaaaaaatgattttctctgtctctgtgtctctgtctctatatatctatcattccatctatatatttatgtatctatatatgtatgtatgtatgtatgtatctatctatctatctatctatgtgtgtgtatacctggaagaaaaaaataccaaaatattaaaaattatttctggacagtgggattatgatgatttttattcttctgtgcattttccaatttttccctcaaagagcatatattacttttataatcagaaaaagcaatataaattattttttaaaacccttcaatggctccccatcactgacagattaaagtacaaacttctaagcatagcacagggccttaattttttggtctttgcctatgtctctagcctaacttcctatcactcagcacccccacttctcttcagccatgaaaaactacccaaaacatgtatcattctgcctctgacactttgcacattgacctttttgacttcatcctcttggtcaagaaccaattcagatcaggcaaggtggttcatgcctgtaatcccagcactttgggaggctgaggcaggaggatggcttgagctcaggagtttaagaccagcctgggcaacatggcaaaaccacgtttctacaaacaaacaaacaaattagccgagtgtggtcgtgagtgtctgtagtcccagccacttggaggctgaggtaggaggattgcttgagcccaggaggtcaaggctgcagtgaattgtgttcatgccactgctctccagcctgggtgacagccagatcttgtgtcaaaataaataaataaatatataaaccaattcaagggtgttctttcctgcgaagccattcctgatctactcaagcagatccatgttaccctttactgctactgtacctccaatatgctactattattttatttgtgtaaggtattgcaattattggtttacatgaacatctttacacttatttgattaacaacgtataaattcattaaaattttattgaatccatagtggttttttgtaattatggattttctcactcagcagatactaaaaactatcatgtggcaatctgtaaaatgtttgatattaaaaagtagtcctggccaggcacagtggctcacgcttgtaatcctagcactttaggaggccgaggtgggcggatcacttgaggtaggagcttgcgaccagcctggccaacatggtgaaaccctgtctgtactaaaaatacaaaagttagccgggcgtggtggcaggtgcctgtagacccagctactcgggaggctgaggcaggagaatggcgtgaacccgggaggcggagcttgcagtgagctgagatcgcgccactgcactccagcctgggcgacagagcaagactctgtctcaaaaaaaaaaaattggctgggcataggcacggtggcaggcacctgtaatcccagctactcgggaactgaggcaggagaatcgcttgaacctgggaggcagaggctgcagcgagccgagatcacaccactgcactccagtctgggcgacagagcgagactccgtcccgccgccaaaaaaaaagtggtcctccactgggtgccctggctcatgcctgtaatcccagcactttgccaagtggaggcgggattccttacacccaggagtttaagaccagtttgggcaatatggtgaaaccctgtctctacaaaacatacaaacccaccgtgggcgtagttgtgcactcctgtagtcccagctactgaggaagctgaggtgggagaatcgctagaacctgaaaggcagaggttgcagtgagctgtgtttgtgccactgcactccagcctgggtgacagagcaagactgtctctaagtaaataaatataaacagtacatacatagaaaatagaaacgcaagaaagtggtcataattgctatctctagagaatgaatgggggggagactttttttttgagacggagtctcactcattgcccaggctggagtgcagtggcgcaatcttggctcactgctagctccgcctcctgggttcacaccgttctcctgcctcagcctcccgagtagctgggactacaggcacccgccaccacgccggctaattttttttttgtatttttagtagagacggggtttcaccatgttagctaggatggtctcgatctcctaacctcgtgatcctcccgcctcggcctcccaaagtgctaggattacaggcgtgagccaccacacccggccaagacttttctctttatactgttgggtattgtttgatttttctttttttttctatgagtaagtattagttttcttcttcttctttttaattgagacggggtctcactctgtcacgcaggctggagtgcagtggcgcgatctccactcattgcagcctctgcttcccgagctcaagctatcctcccaccttaaccttaacctcctgagtaggtgggactacagggacactccaccacgacaggctaatttttgctttttttcggagatggagtttcgccatgttacccaggctggtctcgaactcctaggcttaagcgatcctcccgtctcggcctctcaaagtactgggattataggcatgagcactgcacctagccggaattaaaaattcaggttctcagttgcattagtcatatttcaatggccacttatagttagtagctgccatattgaacacagcagacataggacctttccatcattgcacacagttctattgaacagcccaagtctagatcattgtgtccccacataaggtggtgcccattgggataccctgcaaccctgagtgtgaattaattaatgggaattaacaacacatacttatcaattgatccttgtagtccttggttaaccacgggggcggggcgagttaggcattactgaaacaatgaaggttagttactgataggcctcctatggaatatacagtctgatctagaggcctacaatatatccatggcaatgatgacacctgttgaatctctcagtaaatcataggaacaatagtgatgtttggactgctaggttttctggttaccatggaaatgagggtgctggttacaattctgtgtaatcacgcagagcctaaggtatgatgcaccccctcctcccccaccccgtctgtaaccatgaccaaagagttgactatttcagttgcgtttcccgagtagccccagcaacaggagaagcatctagaaatatgattaagtatggggtgtcaggatgcaagccctaacaaggaagtgtgaaaaaagaaacatggcggggcatttttttcagtaggaaaaggccaaatctattccattgaatacaatgacattgttactcttgcttcttgcacaggcgcagtgcaggactgctccgagcacgcctacgcgcgcattttctccccttcctctccctctttccactttcctctccctttttctcctctcctttccccctcccaccacttggtctttcagtctttcagtcagttcgtttaggtctctccttccgacccccacccccagctcctctccctttccttttccccctccccctttcctttcccgtctcacgcgccaggccgcttgcacatgcgcattaggtacaaagcctcgctctttgtccccatctgtcgttcacacgaactcaagcctttggcattcggcagccaatagaatctaagaaatggcggaaaaatgattccgcctcgggagctaaaccttgattggcagtttagctaaccaatcgagaacgccattttgtaccccttggcaggcaccgagctccgtcgtctcgtttccggcggtcgcgcgctcttttctcgggacgggagaggccgtgtagcgtcgccgttactccgaggagataccagtcggtagagggtgagttttgggacgtcttggttcttgtttgggagggtagtgggatttcttggaacaatcagcgaaggaagaggctagggcgaagctaggtttggagggtggatggcgcttccgaggccccttgaggccttgtctctgccgccacactgccttctcagcccacccgcggggggccacctttctcaactcgcttcgcttcgggctttccccattttcgttcctgccctgtttctttgtgcaactcatctccgaatcttacccgtgtcagtaagttgccggcctctgagccgccctgggcccgacggtgtggggtctattatgagagatcgctgaagtcgtggttggttagaggaggaggcgctttgtcgggcgctcctcctctcggccccgcgaggccattaattcagaatgggcaagtggggcccctcaagcgatatttctttgtcaaaactcttagctggaaagttcctctgcatatccagagcccgccgctttcgtagtcagatttctgtatgccctttttctaaagtcctaaccgcctagctccttgacgcatttatatagcatcactttttaaaatgaaacttaaatttatggatttcgcatcgagtattttattttccagtttgagaaactcttaccataacctgacacgtttctttgtgtttttaacagagaagtcgaggttagagggaactgggaggcactttgctgtctgcaatcgaagttgaggtaggtgtaaggaagggatagggttgccagacaaaacaccgggcacccagttgaattagaatttcacctacacaaccaattatttttaagtatatgttgcatagttttcaattaaatttcaaatttaattgtgggttgtgtattttatttgctaaatctggcaactctagtgggggggccctggttatatttatactgtgtccttgtccaccttccttgttattaaatgaaaagtcctaagaaactcttagagaaggaccttagttcattttacagctttcaggctggccatccaggcagccatctcagtcttgtaaatttataccagatttagatttcagatatgtgtgatgtagtgtttggtcctctacctaaacatttgtttaactgtagcatgcccagtggttagagtctttctcaaccagcaatacgtgttttctctcaaaattcttcatcaggattattagtctcagggacacaagtagacagtaatctttgctgctgatcttcgtgctgtgttctcttttcagaggcccagtatttaggcgacagtgaatttattactctgaagagggttctgcacatatttccaaattatattggtggtcatcagaagtaggtgataggaagaaatacttctcaaggtacttgctacttggtgggcactgttataggtgctttattatgatagtcttcactagtgcattccatcctgggcctctccggggccaggggaagagagatgtttaacacctggaacccaagtaggaaaagatttgattctgatgcccaccttgccccatccccaactatttccagggtggactttagattttgtatgttttaacttcctgcttttatatcttattttttaaaacactattttctttttttgttgtttttttttaaaggtatctcatttgccatgaaactgctacacctgctcatggcgtttaaaatcct

SEQ ID NO: 3138 - DNA, 6000 bp, Homo sapiens
ctgaatatacaagggtgcattatcagttactgaaatgataatgtatgtctaaataagcaagaatggaaaattgtgggaggaatatttaatcatggatatgtccaaagatttagctatgagcattgattataatggtgaaaaattagaaacgacccaggtgtccaacacaatagggacttggttgacaactgaatgctgtgtccgttaacgtaaaagatttaatgacatgaaagctgtttatgatacatcataaagtggaaaaaacaggttacaaaatagtatttatcatatctcatttcaaatacataaattaatgactagaaggatataccaacatgttaacagtgactatttttagtggcaggtctatggatttttatatttgtatttttatttattttggtttttctaaattttctataatacattttgtaataagtatctgattgtaatttctgtttaaaaatttttaaataaaattttaagttgtaatttctgataccttataacattaatgagaaacaaaattgattaaatgatataaatgtgaaaatttaaatcttggctgaaatgtcagatgttgtgaggtttaccatctgcctccttctccctatccactttgccttcctcccccatttttatttattttcccatagcacttacctcttaagtactatataatttacttatatatattgtctctcactagaagcaagttctgtaggcaagaatctgctttgttcactaatccactgtaaccatctagaatagtgcctagcaaatggtaggcattcactgaatattttttgaatgaaatcgtgaattgaaaaattatcagtaacctaaaagcaatgcagttgttttcatttttgcctaccttctgttcccttgtctatattcacatctttaaaattagaaaaaacctttccccgttagaatatcagacatactcgtgtttatgtggtcttcataatttttaaggctgtgaacattctgttgtatagatgtaccgtactttcatgaaaaccattcccctaattttggaaatttaagtcatttttattgttttcttaccataaaggccattacaatgaacactttcacgggtgtagtttttaattttaaaattattaggataaatttccaggagtagaatttccaaattaaagactatgaattaacatcttgatagctcttgttactttttttcttactaaacttttggatacagaatttggtaattgcattaatgttttcagttttggtgggatgtgacattaaacagattaggaatgtttttatacacttgaaagtattcccgtatactcatcatcaaaatcaatagttaccaagcctttgtcgcatttctttcatctgagaaatataattttctgtgtttataattattttttgagacagactctcactttgttgcccaggctggagtgcagcggcactgtcttggcctactgcaacctccgcctctcaggttcaagtgatgctcctgcctcagcctcctgagtagctgggattacagatgcccaccaccatgcccagctaatttttgtgttttcggtagagacgggttttcaccatgttggtcaggctggtcttgaactcctgacctcaagcaatccaccctcctcggcctcccaaagtgctgggattaccagtgtgagccaccacgcctggcctattcatttatttttgagaccaagtctcactctgccgcctaggctggagtgcaatggcagcatctctgctcactgcaatctcgtcctccttggttcaagcaattctcctgcctcagcctcccaagtagctgggactacaggtgcaagctaccacacccggctaatttttttgtatttttagtagagacagggtttcaccatgttggccaggctggtctcgaactcctgacctcaggtgatctggcctgccttagtcccccaaagtgctgggattacaggcatgaaccactgcacccagcctatttttttctctattttttttgagacagggtctcattctgttgcctaggctggagtgcagtgttatgatttgcctcactgtaacctcctcttcgtgggttcaagtgattctccagcctcagcctcccaagtagctgggactacaggcatgagccactgcacctggcctcccctcccccctacccttttttttttttttttttttaaataaagaccgagtcttgctatgttgcccaggctggtctcaaactcctggggtcaagccatcttcctgcctcagcctcccaaagtgctgagattacaggcctgagccaccatgctggcttcatttttttttttttttttttatttcaacgtttgggagcacagagcacttgttttctttttaatcttatgttgatttttaaatgatagaatttaacattttattatttttatctttttttttttttttttttttcttgagacagggtctcattctccctgcccaggctggaatacaatggcgtgatcacagctcactgcagcctcagcctctcaagtagctgggactacatgagtgtgctatcatgcctgtctaatttttttaatacatattttttgtagaggtggggctcactatgttgcccaggctggtctctaactactgggcccaagcagtcctcctgcctagacctcccagattgctgggattacagatgtgagccactgtgcccagcctatttatcttttcttttttttttgagatggagtttcactcttgtgcaatggcacaatctcggctcacggcaacctccgcctcccaggttcaagtgattctcctggctcagcctcctgagtaactgggattacaggcatgtgccaccacaccccgctaatttttgtatttttagtagagatggggtttcaccatgttggtcaggctgttcttgcactcctgacctcagctaatccactggcctcagcctcctgaagtgctgggattacaggcatgagccatctcgcctggcctatctttttatgtttgcttttattgctttagtagtcatttgtctttccactgtaattaataaatatttagagtgtgtactgtatgccagtagtgagccagcattttcacatgtttattctcatagccactttgagagacaggtatttttatcatcccctttagaacagctgaagaaacaggtacagagtaatttactagtaagtagtacacaattgaggaacacaattcaaacctaaggatgcctaacctcacagcccatactagtaccactgttatttccacggtatgtactgtgggctaggattggtaggtaccagagaagataagactttactagtctttgtccttgtgataaccagaatctatttcgatcattttgtttttaaaatatgcttaaatgtgtgatggggcgagtttttaagagtagattttttggaaaagtagttttctattaatgtgtagtattgaactgggaagttccttaagcgattctagtgcaaacagttctcatccagtactcatttagtttttatgtgcagtataactgctgatgcctcgttgtttttaattttattattttttaaattttttaaaattttttattttattttattttcgagacagagtctagctctgttgcccaggctagagtgcagtggcgcaatctcggctcactgccagctccgcctcctgagttcacgccattctcttgcctcagcctcccgaatagccaggactacaggcgcctgccaccacgcccggctaattttttgtatttttagtagagacggggtttcaccatgttaggcaggatggtcttgatctcctgacctcgtgatctgcctgcctcagcctcccaaagtgctgggattacaggtgtgagccactgtgcctggccagatttttatttttattttttatttttttgagatagagtctttcttggttgcccaggctggagtgcagtggcacagtcatggcttattacagcctctaactcgtgggctcaagtgaacctccagctccagcctcctgagtagctgggactacggcaccactatgcctgggtagtgtttttttgttttgttttgttttttggagacggagtctcactctgtcaccaggctggagtacagtggcacgatctcagctcactgcaacctccacctcccaggttcaagccattcccctgtctcagcctcccaagtagctgggattacaggcgcccgctaccattcctgggtagttgtatttttagtatagatgtggtttcaccatgttggccaggcttgtctcgaacccctgacctggtgatccacccaccttggcctcccaaagtgctaggattacagtcttgagccacacgcccaacctgcctgggtcatttttaaatgttgttgtagagatgggggtctcacggtgttgtctaggctggtcttgaactcctgggctcaagtgatcctcccacctcagcctcccgagtacctagaaccacaggcgtgcgccaccacacccagctaatttttgtatttttttggtagaggtgaggtttcaccatgttgcccaggctggtctcaaactcctggactccagcagtcctcccacctccgcctcccaaagtgttgggattacaggcgtgagccactgcacccagcctttttatttattttttctttatttttttccttttttgtttgatttttactatattttgtaacctccagaacgcaagattttttttaacatagtttccatatgcagcactgatagatttttgaattgttcttctttgtcatggttgttcaaagtaacaaattgtttgcctctgacaaaagccagagcacttaaggtgatgaattacatataagtcatcaggaaggtggctgattgtgttattagtactgaatttatttattagtctactttttctttgtagggtgcaaaaatgcagagtaataaaacttttaacttggagaagcaaaaccatactccaagaaagcatcatcaacatcaccaccagcagcagcaccaccagcagcaacagcagcagccgccaccaccgccaatacctgcaaatgggcaacaggccagcagccaaagtgtgtatatgctaggtgatggagtagaaatggattccctctgggaatggtttcttggtttttagattagtttctcgggcttataagggaataggcctttatggcacacctttgttcttttttctctttacctcttaatacttacgatggaaaaggctgattctccggaaccaaggagcaaacatgtatgacagcagttgagtacaggttgctctgctgtgttgacacattctactgttaaacagatgtctgcatgttttacctcagcttggttcttagaggtagtcatcagatgactggtagttaaaaataatatagaaaagtctttaaggcttaaatggagaagtctggtactgaatactgtacttttagccttgagcctgtaccagctcattgtaaaaagtctttaagtatatgttcctgtttgagtaccaattgtgtgcctctaagactagaaccaatcccaactttgtttatttccagagattactataaagagttgctctttcctaactcatttcattctgttgcccccagcctgaaagaatgggaactgttaaggttatgaaaattggtgagagattaggaaaatggaacagttactttgttttttgtttttttttttgtttgtttattctcatctgaaggtacgttttgaatgttaaaatctgatgccttgtaacatagggctgcttccttgaattgcttaatttttctctttggccggtaacgcctatatttttctttctcttgcttagtccagcttggcttctggcccgtcgtagagctgttcagatgtcctctgcatactgctttcacattctaaggcacaatttactcataagtggttaggttgccttgggaaatggtgtttacattctctacaacaattaat

SEQ ID NO: 3139 - DNA, 6000 bp, Homo sapiens
tcccgtatactcatcatcaaaatcaatagttaccaagcctttgtcgcatttctttcatctgagaaatataattttctgtgtttataattattttttgagacagactctcactttgttgcccaggctggagtgcagcggcactgtcttggcctactgcaacctccgcctctcaggttcaagtgatgctcctgcctcagcctcctgagtagctgggattacagatgcccaccaccatgcccagctaatttttgtgttttcggtagagacgggttttcaccatgttggtcaggctggtcttgaactcctgacctcaagcaatccaccctcctcggcctcccaaagtgctgggattaccagtgtgagccaccacgcctggcctattcatttatttttgagaccaagtctcactctgccgcctaggctggagtgcaatggcagcatctctgctcactgcaatctcgtcctccttggttcaagcaattctcctgcctcagcctcccaagtagctgggactacaggtgcaagctaccacacccggctaatttttttgtatttttagtagagacagggtttcaccatgttggccaggctggtctcgaactcctgacctcaggtgatctggcctgccttagtcccccaaagtgctgggattacaggcatgaaccactgcacccagcctatttttttctctattttttttgagacagggtctcattctgttgcctaggctggagtgcagtgttatgatttgcctcactgtaacctcctcttcgtgggttcaagtgattctccagcctcagcctcccaagtagctgggactacaggcatgagccactgcacctggcctcccctcccccctacccttttttttttttttttttttaaataaagaccgagtcttgctatgttgcccaggctggtctcaaactcctggggtcaagccatcttcctgcctcagcctcccaaagtgctgagattacaggcctgagccaccatgctggcttcatttttttttttttttttttatttcaacgtttgggagcacagagcacttgttttctttttaatcttatgttgatttttaaatgatagaatttaacattttattatttttatctttttttttttttttttttttcttgagacagggtctcattctccctgcccaggctggaatacaatggcgtgatcacagctcactgcagcctcagcctctcaagtagctgggactacatgagtgtgctatcatgcctgtctaatttttttaatacatattttttgtagaggtggggctcactatgttgcccaggctggtctctaactactgggcccaagcagtcctcctgcctagacctcccagattgctgggattacagatgtgagccactgtgcccagcctatttatcttttcttttttttttgagatggagtttcactcttgtgcaatggcacaatctcggctcacggcaacctccgcctcccaggttcaagtgattctcctggctcagcctcctgagtaactgggattacaggcatgtgccaccacaccccgctaatttttgtatttttagtagagatggggtttcaccatgttggtcaggctgttcttgcactcctgacctcagctaatccactggcctcagcctcctgaagtgctgggattacaggcatgagccatctcgcctggcctatctttttatgtttgcttttattgctttagtagtcatttgtctttccactgtaattaataaatatttagagtgtgtactgtatgccagtagtgagccagcattttcacatgtttattctcatagccactttgagagacaggtatttttatcatcccctttagaacagctgaagaaacaggtacagagtaatttactagtaagtagtacacaattgaggaacacaattcaaacctaaggatgcctaacctcacagcccatactagtaccactgttatttccacggtatgtactgtgggctaggattggtaggtaccagagaagataagactttactagtctttgtccttgtgataaccagaatctatttcgatcattttgtttttaaaatatgcttaaatgtgtgatggggcgagtttttaagagtagattttttggaaaagtagttttctattaatgtgtagtattgaactgggaagttccttaagcgattctagtgcaaacagttctcatccagtactcatttagtttttatgtgcagtataactgctgatgcctcgttgtttttaattttattattttttaaattttttaaaattttttattttattttattttcgagacagagtctagctctgttgcccaggctagagtgcagtggcgcaatctcggctcactgccagctccgcctcctgagttcacgccattctcttgcctcagcctcccgaatagccaggactacaggcgcctgccaccacgcccggctaattttttgtatttttagtagagacggggtttcaccatgttaggcaggatggtcttgatctcctgacctcgtgatctgcctgcctcagcctcccaaagtgctgggattacaggtgtgagccactgtgcctggccagatttttatttttattttttatttttttgagatagagtctttcttggttgcccaggctggagtgcagtggcacagtcatggcttattacagcctctaactcgtgggctcaagtgaacctccagctccagcctcctgagtagctgggactacggcaccactatgcctgggtagtgtttttttgttttgttttgttttttggagacggagtctcactctgtcaccaggctggagtacagtggcacgatctcagctcactgcaacctccacctcccaggttcaagccattcccctgtctcagcctcccaagtagctgggattacaggcgcccgctaccattcctgggtagttgtatttttagtatagatgtggtttcaccatgttggccaggcttgtctcgaacccctgacctggtgatccacccaccttggcctcccaaagtgctaggattacagtcttgagccacacgcccaacctgcctgggtcatttttaaatgttgttgtagagatgggggtctcacggtgttgtctaggctggtcttgaactcctgggctcaagtgatcctcccacctcagcctcccgagtacctagaaccacaggcgtgcgccaccacacccagctaatttttgtatttttttggtagaggtgaggtttcaccatgttgcccaggctggtctcaaactcctggactccagcagtcctcccacctccgcctcccaaagtgttgggattacaggcgtgagccactgcacccagcctttttatttattttttctttatttttttccttttttgtttgatttttactatattttgtaacctccagaacgcaagattttttttaacatagtttccatatgcagcactgatagatttttgaattgttcttctttgtcatggttgttcaaagtaacaaattgtttgcctctgacaaaagccagagcacttaaggtgatgaattacatataagtcatcaggaaggtggctgattgtgttattagtactgaatttatttattagtctactttttctttgtagggtgcaaaaatgcagagtaataaaacttttaacttggagaagcaaaaccatactccaagaaagcatcatcaacatcaccaccagcagcagcaccaccagcagcaacagcagcagccgccaccaccgccaatacctgcaaatgggcaacaggccagcagccaaagtgtgtatatgctaggtgatggagtagaaatggattccctctgggaatggtttcttggtttttagattagtttctcgggcttataagggaataggcctttatggcacacctttgttcttttttctctttacctcttaatacttacgatggaaaaggctgattctccggaaccaaggagcaaacatgtatgacagcagttgagtacaggttgctctgctgtgttgacacattctactgttaaacagatgtctgcatgttttacctcagcttggttcttagaggtagtcatcagatgactggtagttaaaaataatatagaaaagtctttaaggcttaaatggagaagtctggtactgaatactgtacttttagccttgagcctgtaccagctcattgtaaaaagtctttaagtatatgttcctgtttgagtaccaattgtgtgcctctaagactagaaccaatcccaactttgtttatttccagagattactataaagagttgctctttcctaactcatttcattctgttgcccccagcctgaaagaatgggaactgttaaggttatgaaaattggtgagagattaggaaaatggaacagttactttgttttttgtttttttttttgtttgtttattctcatctgaaggtacgttttgaatgttaaaatctgatgccttgtaacatagggctgcttccttgaattgcttaatttttctctttggccggtaacgcctatatttttctttctcttgcttagtccagcttggcttctggcccgtcgtagagctgttcagatgtcctctgcatactgctttcacattctaaggcacaatttactcataagtggttaggttgccttgggaaatggtgtttacattctctacaacaattaatgtttcctcatttatcagtggttataggtctttgaggatacgactataattctatttccccagtcttttaagtgactgtgtgtcttctctcagatgaaggcttgactattgacctgaagaattttagaaaaccaggagagaagaccttcacccaacgaagccgtctttttgtgggaaatcttcctcccgacatcactgaggaagaaatgaggaaactatttgagaaatatggaaaggcaggcgaagtcttcattcataaggataaaggatttggctttatccgcttggtgagcaactgttggcttttgaggcatgtgctctaaaggtggggaagctggagaataatagatgtgcaaaaataggcagtggaaataattctcagatgatgtgttccttgaaagcttgatgaaacagaaccacaaaaatggcacattttaatttttcctcataagttttgtttcaaggataacaagttttttgcctaggatactggagctaaagtatgccctttggaactttttttttttttgagacggagtatcactcttgtggcccaggctggcgtgcagtggcatggtctcggctcactgcaacctccacctcccgggttcaagtgattctcctgcctcagcctcctgagtagctgggattacaggtgtctgtcaccacacccggctaatttttgtatttttggtagagacggggtttcactgttttggccaggctggtctcgagctcctgacctcaggagatccacccaccttggcctcccaaagtattggggttacagatgtgagccactgcacctggctggaacttttttgttttaattaggaaatttcaaacatatagaagtagacagaataataatgaacctgcacatatgcattgcatagcttcagtaattatcaagttgtggttaattttgttttatctgtaccctttccctattttgtccccccatgatcaagagatgggtatctcaccatgttgccttggctagacttgaattcctgagcttaagcaattctctgtcctcagcctcctgagtagctgggacaaaggcaacgcaccacggtgcctggtttatttgtatctttaaaaaactattttaaattgaattaaccaggcatggtatacgtctgtagtctaactactcaactaggctaagctgatagggctgattgagcctaggagtttgaggttacagtgagctatgctcatagcactgcacttcagcctgggtgatagagtgagacccagtctcttaaaaaaaaactaatgatggtaaaacatacataacataaaatttactat

SEQ ID NO: 3140 - DNA, 6000 bp, Homo sapiens
ggggtttcaccatgttaggcaggatggtcttgatctcctgacctcgtgatctgcctgcctcagcctcccaaagtgctgggattacaggtgtgagccactgtgcctggccagatttttatttttattttttatttttttgagatagagtctttcttggttgcccaggctggagtgcagtggcacagtcatggcttattacagcctctaactcgtgggctcaagtgaacctccagctccagcctcctgagtagctgggactacggcaccactatgcctgggtagtgtttttttgttttgttttgttttttggagacggagtctcactctgtcaccaggctggagtacagtggcacgatctcagctcactgcaacctccacctcccaggttcaagccattcccctgtctcagcctcccaagtagctgggattacaggcgcccgctaccattcctgggtagttgtatttttagtatagatgtggtttcaccatgttggccaggcttgtctcgaacccctgacctggtgatccacccaccttggcctcccaaagtgctaggattacagtcttgagccacacgcccaacctgcctgggtcatttttaaatgttgttgtagagatgggggtctcacggtgttgtctaggctggtcttgaactcctgggctcaagtgatcctcccacctcagcctcccgagtacctagaaccacaggcgtgcgccaccacacccagctaatttttgtatttttttggtagaggtgaggtttcaccatgttgcccaggctggtctcaaactcctggactccagcagtcctcccacctccgcctcccaaagtgttgggattacaggcgtgagccactgcacccagcctttttatttattttttctttatttttttccttttttgtttgatttttactatattttgtaacctccagaacgcaagattttttttaacatagtttccatatgcagcactgatagatttttgaattgttcttctttgtcatggttgttcaaagtaacaaattgtttgcctctgacaaaagccagagcacttaaggtgatgaattacatataagtcatcaggaaggtggctgattgtgttattagtactgaatttatttattagtctactttttctttgtagggtgcaaaaatgcagagtaataaaacttttaacttggagaagcaaaaccatactccaagaaagcatcatcaacatcaccaccagcagcagcaccaccagcagcaacagcagcagccgccaccaccgccaatacctgcaaatgggcaacaggccagcagccaaagtgtgtatatgctaggtgatggagtagaaatggattccctctgggaatggtttcttggtttttagattagtttctcgggcttataagggaataggcctttatggcacacctttgttcttttttctctttacctcttaatacttacgatggaaaaggctgattctccggaaccaaggagcaaacatgtatgacagcagttgagtacaggttgctctgctgtgttgacacattctactgttaaacagatgtctgcatgttttacctcagcttggttcttagaggtagtcatcagatgactggtagttaaaaataatatagaaaagtctttaaggcttaaatggagaagtctggtactgaatactgtacttttagccttgagcctgtaccagctcattgtaaaaagtctttaagtatatgttcctgtttgagtaccaattgtgtgcctctaagactagaaccaatcccaactttgtttatttccagagattactataaagagttgctctttcctaactcatttcattctgttgcccccagcctgaaagaatgggaactgttaaggttatgaaaattggtgagagattaggaaaatggaacagttactttgttttttgtttttttttttgtttgtttattctcatctgaaggtacgttttgaatgttaaaatctgatgccttgtaacatagggctgcttccttgaattgcttaatttttctctttggccggtaacgcctatatttttctttctcttgcttagtccagcttggcttctggcccgtcgtagagctgttcagatgtcctctgcatactgctttcacattctaaggcacaatttactcataagtggttaggttgccttgggaaatggtgtttacattctctacaacaattaatgtttcctcatttatcagtggttataggtctttgaggatacgactataattctatttccccagtcttttaagtgactgtgtgtcttctctcagatgaaggcttgactattgacctgaagaattttagaaaaccaggagagaagaccttcacccaacgaagccgtctttttgtgggaaatcttcctcccgacatcactgaggaagaaatgaggaaactatttgagaaatatggaaaggcaggcgaagtcttcattcataaggataaaggatttggctttatccgcttggtgagcaactgttggcttttgaggcatgtgctctaaaggtggggaagctggagaataatagatgtgcaaaaataggcagtggaaataattctcagatgatgtgttccttgaaagcttgatgaaacagaaccacaaaaatggcacattttaatttttcctcataagttttgtttcaaggataacaagttttttgcctaggatactggagctaaagtatgccctttggaactttttttttttttgagacggagtatcactcttgtggcccaggctggcgtgcagtggcatggtctcggctcactgcaacctccacctcccgggttcaagtgattctcctgcctcagcctcctgagtagctgggattacaggtgtctgtcaccacacccggctaatttttgtatttttggtagagacggggtttcactgttttggccaggctggtctcgagctcctgacctcaggagatccacccaccttggcctcccaaagtattggggttacagatgtgagccactgcacctggctggaacttttttgttttaattaggaaatttcaaacatatagaagtagacagaataataatgaacctgcacatatgcattgcatagcttcagtaattatcaagttgtggttaattttgttttatctgtaccctttccctattttgtccccccatgatcaagagatgggtatctcaccatgttgccttggctagacttgaattcctgagcttaagcaattctctgtcctcagcctcctgagtagctgggacaaaggcaacgcaccacggtgcctggtttatttgtatctttaaaaaactattttaaattgaattaaccaggcatggtatacgtctgtagtctaactactcaactaggctaagctgatagggctgattgagcctaggagtttgaggttacagtgagctatgctcatagcactgcacttcagcctgggtgatagagtgagacccagtctcttaaaaaaaaactaatgatggtaaaacatacataacataaaatttactatcttaaccgtttgtaagtgtagacattattttaaaatctggttcgatttagggaaagtatatgagaggaaaacatttctagacattatctacctccataaatggaagagaataatgtgacagcaggatcactggatggggtggtcagaactgattttcattccaatctgccaagtcatttttctctgggtatcaggtttctctttagtaatatgaaagggatcctgtcaaggttcctggttccaaagaggcttcttggaggatattcgtgattctggtacatacctagcaaaaattagactgagcatggtggctcatgcctgtaatcccagcactttttgggaggccaaggtgggcggatcacttgaggtcaggagtttgagaccagcctggccaacatggttaaaccccgtctctattaaaactacaaaaattagctggacatggtggtaagcgcctgtaatcccacctgctcaggaggctgaggcaggagaatcgcctgaacctgggaagcagaggttgcagtgagctgagattgctccactgcactccagtctgggcaacacagcaagactccgtctcgaaaaaaaaaactaaaatattctaggtggttttagggtggtctttgagtttttgttttcgtttttttgagacggagttttgctttgttgcccatgctggagtgcggtggcgtgatcttggctcactgcaacctccgcctcccgggttcaggcagttctcctgcctcagcctctggagtagctggaactaccagtgcgtgccactgcgcctggctaattttttgtattttagtagagaccaggtttcaccctgttggccaggatgatctcgatctcctgacctcgttatccacccgcctcggcctcccaaaattctgggattacaggcgtgagccaccgtacccggccaatggtctttgttttctggatgatctgttgtcattgggagaataatacctatgaaattgatgatcacctaagtgttattgacttctagaactacatgtgatttattgcaaggccatcagaagcaaactagggtggccaaagagctgaagcacacagttaagttctttcacttctgtttctttgtatggttgtttagtttttccggggagatattgaactatactgctttagactgttgatggctgctaaggtgttctttgtcaaactgagttattctgattttcctctgcttcctaggaaacccgaaccctagcggagattgccaaagtggagctggacaatatgccactccgtggaaagcagctgcgtgtgcgctttgcctgccatagtgcatcccttacagttcgaaaccttcctcagtatgtgtccaacgaactgctggaagaagccttttctgtgtttggccaggtagagagggctgtagtcattgtggatgatcgaggaaggccctcaggaaaaggcattgttgagttctcagggaagccagctgctcggaaagctctggacagatgcagtgaaggctccttcctgctaaccacgtaagtgagggtcattttcagacgtagaccttagattgctaattccttccatggtctggagagttagcctctagtaaccacttttctatgtttaaagacttttggtcagcctggcatggtggctgactcctgtaatcccagcactttgggaggccggggcaggcggatcacctgaggtcaggagttggagaccagcctgaccaacatggtgaaaccctgtctctactaaaaatacaaaaaattagccaaacatggtggcgtgtgcctgtattcccagctacttgggaggctgaggcaggagaatcgcttgaacccaggaggcagaggttgcagcgagctgagatcacgccactgcactccagcctgggcaacagagtgaaactgcctcaaaaaaataaataaaagactgggcaaaacagcggctcacgcctgtaatcccagcaatttgggaggccgaggcgggcagatcatgagttgaggagatcaagaccatcctggccaacatgctgaaagcccgtctctactaaaaatacaaataaataaaataaaaataccaaaattagcgcacatgtagtcccagcaacttgggaggctgaggcaggagaatcacttgaacctggaaggcagaggttgcagtgagccgagattgtgccattgcactccagcctggcgatagagcaagactctgtctcaaaaaaaaaaaaaaaaaaaagacttttggcccaggcgggacagatcaccaggtcaggagatcgagaccatcctggctaacacggtgaaaccccgtctctactaaaaaatacaacaaattagccgggtgtggtggcgggcgcctgttgtcccagctactctggaggctgaggcaggagaatggcgtgaacctgggaggtggagcttgcagtgagccgagattgcgccactgcactccagcctgggcaagagaacaagactcc

SEQ ID NO: 3141 - DNA, 6000 bp, Homo sapiens
aaggcacaatttactcataagtggttaggttgccttgggaaatggtgtttacattctctacaacaattaatgtttcctcatttatcagtggttataggtctttgaggatacgactataattctatttccccagtcttttaagtgactgtgtgtcttctctcagatgaaggcttgactattgacctgaagaattttagaaaaccaggagagaagaccttcacccaacgaagccgtctttttgtgggaaatcttcctcccgacatcactgaggaagaaatgaggaaactatttgagaaatatggaaaggcaggcgaagtcttcattcataaggataaaggatttggctttatccgcttggtgagcaactgttggcttttgaggcatgtgctctaaaggtggggaagctggagaataatagatgtgcaaaaataggcagtggaaataattctcagatgatgtgttccttgaaagcttgatgaaacagaaccacaaaaatggcacattttaatttttcctcataagttttgtttcaaggataacaagttttttgcctaggatactggagctaaagtatgccctttggaactttttttttttttgagacggagtatcactcttgtggcccaggctggcgtgcagtggcatggtctcggctcactgcaacctccacctcccgggttcaagtgattctcctgcctcagcctcctgagtagctgggattacaggtgtctgtcaccacacccggctaatttttgtatttttggtagagacggggtttcactgttttggccaggctggtctcgagctcctgacctcaggagatccacccaccttggcctcccaaagtattggggttacagatgtgagccactgcacctggctggaacttttttgttttaattaggaaatttcaaacatatagaagtagacagaataataatgaacctgcacatatgcattgcatagcttcagtaattatcaagttgtggttaattttgttttatctgtaccctttccctattttgtccccccatgatcaagagatgggtatctcaccatgttgccttggctagacttgaattcctgagcttaagcaattctctgtcctcagcctcctgagtagctgggacaaaggcaacgcaccacggtgcctggtttatttgtatctttaaaaaactattttaaattgaattaaccaggcatggtatacgtctgtagtctaactactcaactaggctaagctgatagggctgattgagcctaggagtttgaggttacagtgagctatgctcatagcactgcacttcagcctgggtgatagagtgagacccagtctcttaaaaaaaaactaatgatggtaaaacatacataacataaaatttactatcttaaccgtttgtaagtgtagacattattttaaaatctggttcgatttagggaaagtatatgagaggaaaacatttctagacattatctacctccataaatggaagagaataatgtgacagcaggatcactggatggggtggtcagaactgattttcattccaatctgccaagtcatttttctctgggtatcaggtttctctttagtaatatgaaagggatcctgtcaaggttcctggttccaaagaggcttcttggaggatattcgtgattctggtacatacctagcaaaaattagactgagcatggtggctcatgcctgtaatcccagcactttttgggaggccaaggtgggcggatcacttgaggtcaggagtttgagaccagcctggccaacatggttaaaccccgtctctattaaaactacaaaaattagctggacatggtggtaagcgcctgtaatcccacctgctcaggaggctgaggcaggagaatcgcctgaacctgggaagcagaggttgcagtgagctgagattgctccactgcactccagtctgggcaacacagcaagactccgtctcgaaaaaaaaaactaaaatattctaggtggttttagggtggtctttgagtttttgttttcgtttttttgagacggagttttgctttgttgcccatgctggagtgcggtggcgtgatcttggctcactgcaacctccgcctcccgggttcaggcagttctcctgcctcagcctctggagtagctggaactaccagtgcgtgccactgcgcctggctaattttttgtattttagtagagaccaggtttcaccctgttggccaggatgatctcgatctcctgacctcgttatccacccgcctcggcctcccaaaattctgggattacaggcgtgagccaccgtacccggccaatggtctttgttttctggatgatctgttgtcattgggagaataatacctatgaaattgatgatcacctaagtgttattgacttctagaactacatgtgatttattgcaaggccatcagaagcaaactagggtggccaaagagctgaagcacacagttaagttctttcacttctgtttctttgtatggttgtttagtttttccggggagatattgaactatactgctttagactgttgatggctgctaaggtgttctttgtcaaactgagttattctgattttcctctgcttcctaggaaacccgaaccctagcggagattgccaaagtggagctggacaatatgccactccgtggaaagcagctgcgtgtgcgctttgcctgccatagtgcatcccttacagttcgaaaccttcctcagtatgtgtccaacgaactgctggaagaagccttttctgtgtttggccaggtagagagggctgtagtcattgtggatgatcgaggaaggccctcaggaaaaggcattgttgagttctcagggaagccagctgctcggaaagctctggacagatgcagtgaaggctccttcctgctaaccacgtaagtgagggtcattttcagacgtagaccttagattgctaattccttccatggtctggagagttagcctctagtaaccacttttctatgtttaaagacttttggtcagcctggcatggtggctgactcctgtaatcccagcactttgggaggccggggcaggcggatcacctgaggtcaggagttggagaccagcctgaccaacatggtgaaaccctgtctctactaaaaatacaaaaaattagccaaacatggtggcgtgtgcctgtattcccagctacttgggaggctgaggcaggagaatcgcttgaacccaggaggcagaggttgcagcgagctgagatcacgccactgcactccagcctgggcaacagagtgaaactgcctcaaaaaaataaataaaagactgggcaaaacagcggctcacgcctgtaatcccagcaatttgggaggccgaggcgggcagatcatgagttgaggagatcaagaccatcctggccaacatgctgaaagcccgtctctactaaaaatacaaataaataaaataaaaataccaaaattagcgcacatgtagtcccagcaacttgggaggctgaggcaggagaatcacttgaacctggaaggcagaggttgcagtgagccgagattgtgccattgcactccagcctggcgatagagcaagactctgtctcaaaaaaaaaaaaaaaaaaaagacttttggcccaggcgggacagatcaccaggtcaggagatcgagaccatcctggctaacacggtgaaaccccgtctctactaaaaaatacaacaaattagccgggtgtggtggcgggcgcctgttgtcccagctactctggaggctgaggcaggagaatggcgtgaacctgggaggtggagcttgcagtgagccgagattgcgccactgcactccagcctgggcaagagaacaagactccgtctccaaaaaaaaagacttttggtattagcctgggcatggtggctcatgcctgtaataccaacacttcaggaggctgaggcgggtgaatcacgaggtcctgagtttgagaccagcctggccaaggtggtgaaaccccgtctctactaaaaatacaaaaagtagctggacgcggtggtgggcgcctgtgatcccagctactcgggaggctgaggcaggagaatcacttgaacccgggaggcagaggttgcagtgagccgacattgcaccactgcactctagcctgggcgacagaggaagactccgtttccaaaaaaaaagacttttggtactaagctttctcgtatgatttttctgtaatcttatattaatagacgtgggatgacgattatgaaaaataactttttagtcattcggtaggttgtcatgtagtcagtgttaagtctctctttactttgaagatttagagttctgaaaagttgatttgtgcctgcagtatctcttagtgtttaccacaagtcatttctcagagtgtctgtagatgtttaggctgtacttaagtactgcacctacctacttggaatatctttttgagactgtattcagagatctaagtcctgatttcgtcctgtcaaccccagattttcttttttctttttcttttctttttttttttttttttgagacagtctcactctgtagcccgggctagagtggtgcagtggcacaatctcggctcatttcaacctctgtctcccgggtccaagtgattctcctgcctcagcctcccaagtagctgggattacagacgtccgtagagtcagggtttcaccatgttggccaggcttgtcttgaactcctgacctcatgattcacccgcctcgtcctcccaaagtgctgggattacaggcgtgagccaccacccccagcccaaccccaaattttttataatgtcattaggtataaaaacttcagaagcctccaatcctgagccctagctaattcattgtgccagtgacatgtgtagagaagaagcctggtggggtatgatttgattaacactgaactttgttctttcttccagatttcctcgtcctgtgactgtggagcccatggaccagttagatgatgaagagggacttccagagaagctggttataaaaaaccagcaatttcacaagtatgcagtcttgatagatttccctattaggtgtttccttcttaagaaagcttataaagggatatgtaaaagaggcaggtctttgctgcacatgttcactggcagccattatcttggtcctcacaaggaatgcaattcttagctggggtaattctggacaaagttagtaacctaggaaccttgcctatagggaacgagagcagccacccagatttgcacagcctggctcctttgagtatgaatatgccatgcgctggaaggcactcattgagatggagaagcagcagcaggaccaagtggaccgcaacatcaaggaggctcgtgagaagctggagatggagatggaagctgcacgccatgagcaccaggtcatgctaatgagacagggtgagtctaggcctgtaagtcttaaagctgaaaggacaaaatgacatttttaaatgggtttctttgtatcaattaacagaagggcctacatctctgcttttatacttagtttgcgttgattttggtagataaataggcttggagatgtggcagagatactggattctgtggagaaggaaatgataggtataacttcattttggaatctggacaccacaggtggttccaaaggaattagatcctctttgctttctggatctttatttgaagaaagtcattagatctatatgaagacaatgaggaatattcttagtctgttgtttttttagatttgatgaggcgccaagaagaacttcggaggatggaagagctgcacaaccaagaggtgcaaaaacgaaagcaactggagctcaggtaacttttctcgaacactttttccctaacaactctaaaaggtaatgtctcactcctctttcctactgccatgctacctcgtgtatttataaatgtgttggcaaatatttcctggctgcttctcaggttctttctttggattggagatgtttta

SEQ ID NO: 3142 - DNA, 6000 bp, Homo sapiens
ggggaagctggagaataatagatgtgcaaaaataggcagtggaaataattctcagatgatgtgttccttgaaagcttgatgaaacagaaccacaaaaatggcacattttaatttttcctcataagttttgtttcaaggataacaagttttttgcctaggatactggagctaaagtatgccctttggaactttttttttttttgagacggagtatcactcttgtggcccaggctggcgtgcagtggcatggtctcggctcactgcaacctccacctcccgggttcaagtgattctcctgcctcagcctcctgagtagctgggattacaggtgtctgtcaccacacccggctaatttttgtatttttggtagagacggggtttcactgttttggccaggctggtctcgagctcctgacctcaggagatccacccaccttggcctcccaaagtattggggttacagatgtgagccactgcacctggctggaacttttttgttttaattaggaaatttcaaacatatagaagtagacagaataataatgaacctgcacatatgcattgcatagcttcagtaattatcaagttgtggttaattttgttttatctgtaccctttccctattttgtccccccatgatcaagagatgggtatctcaccatgttgccttggctagacttgaattcctgagcttaagcaattctctgtcctcagcctcctgagtagctgggacaaaggcaacgcaccacggtgcctggtttatttgtatctttaaaaaactattttaaattgaattaaccaggcatggtatacgtctgtagtctaactactcaactaggctaagctgatagggctgattgagcctaggagtttgaggttacagtgagctatgctcatagcactgcacttcagcctgggtgatagagtgagacccagtctcttaaaaaaaaactaatgatggtaaaacatacataacataaaatttactatcttaaccgtttgtaagtgtagacattattttaaaatctggttcgatttagggaaagtatatgagaggaaaacatttctagacattatctacctccataaatggaagagaataatgtgacagcaggatcactggatggggtggtcagaactgattttcattccaatctgccaagtcatttttctctgggtatcaggtttctctttagtaatatgaaagggatcctgtcaaggttcctggttccaaagaggcttcttggaggatattcgtgattctggtacatacctagcaaaaattagactgagcatggtggctcatgcctgtaatcccagcactttttgggaggccaaggtgggcggatcacttgaggtcaggagtttgagaccagcctggccaacatggttaaaccccgtctctattaaaactacaaaaattagctggacatggtggtaagcgcctgtaatcccacctgctcaggaggctgaggcaggagaatcgcctgaacctgggaagcagaggttgcagtgagctgagattgctccactgcactccagtctgggcaacacagcaagactccgtctcgaaaaaaaaaactaaaatattctaggtggttttagggtggtctttgagtttttgttttcgtttttttgagacggagttttgctttgttgcccatgctggagtgcggtggcgtgatcttggctcactgcaacctccgcctcccgggttcaggcagttctcctgcctcagcctctggagtagctggaactaccagtgcgtgccactgcgcctggctaattttttgtattttagtagagaccaggtttcaccctgttggccaggatgatctcgatctcctgacctcgttatccacccgcctcggcctcccaaaattctgggattacaggcgtgagccaccgtacccggccaatggtctttgttttctggatgatctgttgtcattgggagaataatacctatgaaattgatgatcacctaagtgttattgacttctagaactacatgtgatttattgcaaggccatcagaagcaaactagggtggccaaagagctgaagcacacagttaagttctttcacttctgtttctttgtatggttgtttagtttttccggggagatattgaactatactgctttagactgttgatggctgctaaggtgttctttgtcaaactgagttattctgattttcctctgcttcctaggaaacccgaaccctagcggagattgccaaagtggagctggacaatatgccactccgtggaaagcagctgcgtgtgcgctttgcctgccatagtgcatcccttacagttcgaaaccttcctcagtatgtgtccaacgaactgctggaagaagccttttctgtgtttggccaggtagagagggctgtagtcattgtggatgatcgaggaaggccctcaggaaaaggcattgttgagttctcagggaagccagctgctcggaaagctctggacagatgcagtgaaggctccttcctgctaaccacgtaagtgagggtcattttcagacgtagaccttagattgctaattccttccatggtctggagagttagcctctagtaaccacttttctatgtttaaagacttttggtcagcctggcatggtggctgactcctgtaatcccagcactttgggaggccggggcaggcggatcacctgaggtcaggagttggagaccagcctgaccaacatggtgaaaccctgtctctactaaaaatacaaaaaattagccaaacatggtggcgtgtgcctgtattcccagctacttgggaggctgaggcaggagaatcgcttgaacccaggaggcagaggttgcagcgagctgagatcacgccactgcactccagcctgggcaacagagtgaaactgcctcaaaaaaataaataaaagactgggcaaaacagcggctcacgcctgtaatcccagcaatttgggaggccgaggcgggcagatcatgagttgaggagatcaagaccatcctggccaacatgctgaaagcccgtctctactaaaaatacaaataaataaaataaaaataccaaaattagcgcacatgtagtcccagcaacttgggaggctgaggcaggagaatcacttgaacctggaaggcagaggttgcagtgagccgagattgtgccattgcactccagcctggcgatagagcaagactctgtctcaaaaaaaaaaaaaaaaaaaagacttttggcccaggcgggacagatcaccaggtcaggagatcgagaccatcctggctaacacggtgaaaccccgtctctactaaaaaatacaacaaattagccgggtgtggtggcgggcgcctgttgtcccagctactctggaggctgaggcaggagaatggcgtgaacctgggaggtggagcttgcagtgagccgagattgcgccactgcactccagcctgggcaagagaacaagactccgtctccaaaaaaaaagacttttggtattagcctgggcatggtggctcatgcctgtaataccaacacttcaggaggctgaggcgggtgaatcacgaggtcctgagtttgagaccagcctggccaaggtggtgaaaccccgtctctactaaaaatacaaaaagtagctggacgcggtggtgggcgcctgtgatcccagctactcgggaggctgaggcaggagaatcacttgaacccgggaggcagaggttgcagtgagccgacattgcaccactgcactctagcctgggcgacagaggaagactccgtttccaaaaaaaaagacttttggtactaagctttctcgtatgatttttctgtaatcttatattaatagacgtgggatgacgattatgaaaaataactttttagtcattcggtaggttgtcatgtagtcagtgttaagtctctctttactttgaagatttagagttctgaaaagttgatttgtgcctgcagtatctcttagtgtttaccacaagtcatttctcagagtgtctgtagatgtttaggctgtacttaagtactgcacctacctacttggaatatctttttgagactgtattcagagatctaagtcctgatttcgtcctgtcaaccccagattttcttttttctttttcttttctttttttttttttttttgagacagtctcactctgtagcccgggctagagtggtgcagtggcacaatctcggctcatttcaacctctgtctcccgggtccaagtgattctcctgcctcagcctcccaagtagctgggattacagacgtccgtagagtcagggtttcaccatgttggccaggcttgtcttgaactcctgacctcatgattcacccgcctcgtcctcccaaagtgctgggattacaggcgtgagccaccacccccagcccaaccccaaattttttataatgtcattaggtataaaaacttcagaagcctccaatcctgagccctagctaattcattgtgccagtgacatgtgtagagaagaagcctggtggggtatgatttgattaacactgaactttgttctttcttccagatttcctcgtcctgtgactgtggagcccatggaccagttagatgatgaagagggacttccagagaagctggttataaaaaaccagcaatttcacaagtatgcagtcttgatagatttccctattaggtgtttccttcttaagaaagcttataaagggatatgtaaaagaggcaggtctttgctgcacatgttcactggcagccattatcttggtcctcacaaggaatgcaattcttagctggggtaattctggacaaagttagtaacctaggaaccttgcctatagggaacgagagcagccacccagatttgcacagcctggctcctttgagtatgaatatgccatgcgctggaaggcactcattgagatggagaagcagcagcaggaccaagtggaccgcaacatcaaggaggctcgtgagaagctggagatggagatggaagctgcacgccatgagcaccaggtcatgctaatgagacagggtgagtctaggcctgtaagtcttaaagctgaaaggacaaaatgacatttttaaatgggtttctttgtatcaattaacagaagggcctacatctctgcttttatacttagtttgcgttgattttggtagataaataggcttggagatgtggcagagatactggattctgtggagaaggaaatgataggtataacttcattttggaatctggacaccacaggtggttccaaaggaattagatcctctttgctttctggatctttatttgaagaaagtcattagatctatatgaagacaatgaggaatattcttagtctgttgtttttttagatttgatgaggcgccaagaagaacttcggaggatggaagagctgcacaaccaagaggtgcaaaaacgaaagcaactggagctcaggtaacttttctcgaacactttttccctaacaactctaaaaggtaatgtctcactcctctttcctactgccatgctacctcgtgtatttataaatgtgttggcaaatatttcctggctgcttctcaggttctttctttggattggagatgttttagctgcccatggtcctagaagttacctgctaaaaagaaagcagctgaatgctggtctcatgaggtttctttgggggttgcctcagggctgggcacacttaacagtgagtttcctggtgaactgatagttttcagtaggccagtctccttggttgagtctcctgttaatctgctcaagttctgaaatgcctctgtcttaaatacattggtgactctctgtaggcaggaggaagagcgcaggcgccgtgaagaagagatgcggcggcagcaagaagaaatgatgcggcgacagcaggaaggattcaagggaaccttccctgatgcggtatatctcccatgtgcccgtgatgtaccagaccagtcctgataaactcaccatgaattgtctgctaggttacc

SEQ ID NO: 3143 - DNA, 6000 bp, Homo sapiens
gcagtgatttctgttacacaatggaaataacctctatcaggcaaaataatactcagcagatttttatgcattattaatgtttcatatcactactaaattttctctcactcgtggaggcaaaatttgctaattatttaaacaacttacatagtttaaaaccgtggataggaaaatatgttattgcttaaatgctgttttttccttttaatcagttttgttcttttgcatattaccttcttgataattttattatattaatgaaacgtgcattcattttctttatgttttataggaaaatgataattctgttgaaattattctggatagagcagagctaatatttacattttatacatcaaaaacataatttttggaaggtcttttttttttttttttaagagacaaggttttgctctttcatccaggcgggagtgctgtggtgcaatcatagttcattgtaacctcaaactcctgggctcaagtgattctcccacttcagcctcccaagtatctagggtatctagggctataggtgtgtgccatcatacctggctaatgtttttgtttttcttggtggagacagagtctcgctgtgttgtccaggcctgtcttgaactcctggcctcaagcggtcctcctgcctcggcctcccaaagtgctgtgattacaggtgtgagctactgtcacttgcctagaagtaatttttttgagtgagcatagttggcgagagtcagtaaaggactatctgcatggagcaaagtttatttataacaggagtttgtaatctagggtccatggatagaatttaggggattatatgtacctggataagaaaaaaattatatattgatttcccttaacctctagctaaagcagcagcatttttcccagtgatgaatagaggcaacaatctatagtagtgttagtgataaccatgactttgttaccaatagaaatcagaaatatttttacatgttgttcctgatacctcaaaatcatttatgtttatcaatacttcagaattttaggtatttattaaacctgtgcatattttgttacttaatgcattaattttaaaaagcacatatttctgtagtacaaattctttaatattttgataatttctatatgatgggtttcttttgtaatcctatttgttttatgtgtttcaaaacgatattccaagagaatttataagcttctctacactgccaaaagtgtttatgtcacaagtaagattaaaactcctaatctagaaacttggttgatatagacaatttttgtgtctttaaccatatttcttttgatcaggtgtgggcaataatagtgaaggtggaagaggaaaggcaggtgcaaagcttttccaagattttcagatgttaagtagaatatggactcatccttggtgtttgcagctagactacattagcaaagaaaataaggtaagtcaggtaacttagtttaaaagcatctattggaagcagaataaacttagacaaaaaattgacctacagactgtatattcaaattttctattgctttgttctattctatgtcttatttctaatttctatatgtcttgcatgtattatgattataggagtgttaaatgttattttattgagcccattttaaaaaactttttattttgaaataattttatacttatagaaaagttgcaaaaatagttctgagaattcccctatacctttgacccagtttcttctaatatcagcatgttgcattagtatagtaaagttatcaaaactaagaaattaactttggtacaatactattaactaaatggcagactttatttggatttcttcaatgtttttacttatgtcttttttgttttccatgatccaatctaggacctcccattgcatttagtaagcatatctgtcctgtcttctttgtctactaaaatctgtaatagttcctcagtccttcctcagctcgtgccaattaacttattcttaaatgaacatcaatataatttccagtgtaagttgagatattctattaaaatagtggtcatttttttttctctagggttattttgatgaagacagtatggatgaatttatagcctcagattctgatgaaacctccatgagtttaagctccgatgattatacaaagtaaatcgaatactttttcgtgccatcctgtattgacaaagttaaaacccctacttgctgattgacctcttataattgacgtttacatctttcctatgcttttctaacaatctgaatgtgtttttttgtttgtttgtttgtttgtttttagaaagaagaaaaaagggaaaaaggggaaaaaagatagtagctcaagtggaagtggcagtgacaatgatgttgaagtgattaaggtctggaattcaagatctcggggaggtggtgaaggaaatgtggatgaaacaggaaacaatccttctgtttctttaaaactggaagaaagtgagtctaatgaatgttgcctttatcatggaacagtaatttggaaaatgtcatgtcgttagtccttttttcagtcacttacctgactaattgactcaaaggaatctttcctcaattgatgagtctaatcaagtactcataattacagtaaatatctgatgaatctttaattataagcaagctactctgtgctctctggtatttgggggaaaggtaaaaagaaaaactaatgtttatttacttgtatatacctaaactctattattttcactacatgtgttagctaactgaattcttgagcaggcttgcaatgtagttgatagttttaaaaatgagtaggagaactggtattcagacctaaaaatgtctaatctcaaagccaccatgatattttcacttaactgtatgggaataaatggaaacatttcagataatcaagtgtgattgtagttaatttttagtcagtaatatacagtaaaactaattttaatcatttagtgtttttcctttgtgattcttcataatctgcaattatctactttaggtttcctgtgtattatgtacagtttctatcacctcttttgttttctttctgtctctcttgtgcatgaaagtgaagtcttagattgaactctgcagtggtttaagttgtctttacctatatgtaagttgaaggattagtgttgagacactgtatcctactagtgcagcctgtatgcctaggagcttaaaaactgggaccaaatgtctgcctatttgaaatagcagattatgaagagagaacaaggtagtggctctaaatatttggcatttgggagttgtggagcaaagcagttaactgtctataaggagaagagagttgtgggggccacctaggttagtgatcctgtgatcagataaacttggctggtctcaggcctacagctgaaataacttggtgattaattattttaattttatttttataatttcaacttttatattcgggggtacatatgctagttgattaacatgggtatattgcatgatgctcagctttggggtatgattgatcccatccccaggtactgaacatagtactcagtagttagtttttcagtctttgccccctttctctctccccactctagtagtcctccgtgtctgtcgctctcctctttatatccatgtgtacccagtgtttagctcttacttatatgtaagaacacgccgtatttggttttctgtttctgtgttaattcacttagtatataatggcctccagctgtatccctgttgctgcaaaggacatgattttgttctttattgtggctgtgtatattctatggtttatatgtaccacattttctctatccaatccactgttgatgggcacctgggttgattccatgtttttgctgttgtgaatagtgctgtaataaatatatgagtgcatgtgtctttctggcagatttattttccttttgttttatacttgtaatgagattgctgggtcaaattgcagttctgctttaagttctttgagaaatctctaaactgccttccataggcggtgaactaatttacaatcccaccaacataaatgttcccttttctttgccccttctccagcatctgctgttttttgactttttaataatagccattctgactggtgtgagattgtgtctcattgtggtttggatttgcatttctcctgtggttaatgatgatgagcatttttcatgtttgttggctgcttgtatgttctcttttgagaagtatctgttcttgtcttttgcccactttttaatggagttacttgtttttttgctgttgaattaagttccttatagattctggatattcattgttggatacatagtttgtgagtattttctctcattctgtaagttgtctgtttactctgttgatagttttttttttgttattttgtgtttttgtttttttgtttgtttgtttgttttttgtttttgctgtgcagaagctctttagtttaattaggtcccagttgtcaatttttgtttctgttgcaattgtttttgaggaattagtcataaattctttctgactcggtgatttctttataaacatttctctcttcagtacctccatggaatagacagatggcagtctaacagtagactctgacttctcttaagaaatcaggggaatagtaaaaattaaactacaaaatttctcttctcattcttctcttctgttaccccataaaacagtttactatcaatgttcatcttctggatagatataaagaatatttttatcagaataataaattattatagtgtaatttaaggcaatgagaagttcctgtatctccttccctgctgctgctgccccaatctgccttttccacataaattcctcagtctctcatctcataattaaaaatatataaagtttacatgttcctggaaattattttcttaaaatactcttgttgaattttttctcataacttatggctaacaggagcagaagagtagaccagtcagtgtgcatcatcctgtgctataaatgggttacgtaagagtatactgagattttttttttaaagtgtactgagatattgatcctttgtcacttgggaatacaattagaatctgaggcagctggtttgcctccgtaaatgagtagtctcttctctttttcctggtatgctatataagcattaacgttttttacatatgccataatgtgaatgggttggaaagcactgggggcagaatgtaggaggctacatgttgtgagcccaaaaacacacagggaaggccatcagttccaaaagacaaattttgaccacttgtctaggatttttgtttcattttagttgtgtgcagtcaaatataagtcatttgtatatggatatattttatatatttttgtagcttatatacgtgtatagtatattagaagcattctccagaactaatagataataaaatttatttttttctttgcatctaaattaactccatataaaatggagtatatcataatgtatggacatacgtagctggtattgtataactttaaaaaaaatgactttcttacagtaaatataagaaaatctgaataggaagtattaaggggctagtctgcctccttagcgcagtaggcagcacatcggtctcataatctgaaggaagtattaaagggttaacaatgttgtacctggaatttgaaatggatattaaataattaattacctataattgagctacaatatgatttttgccacatattttattttcacgtcaaagagttactgtttgctttaatccttttgtagtagctgtctcgtttttctgagaagcagcatcttgaatgagtcatttaagtttagcttacatcatccccatttctgtgttttaaatgttttttattagaaggagagttcatgatcacgaaatgactatgtaaattacttcaaagtgttagatttattattacttaagtatttttagagtaagcttcattggtaagcatttgcattttaaaacgtatgtaattg

SEQ ID NO: 3144 - DNA, 6000 bp, Homo sapiens
aaaaacttatggagctatatggtatttcctgtgtggatgtaacataatttatttaaccagtcttctgttaaggagcatctgggttgtttctaatatatatatatatatatatatatatatatatatatatatatatatatatatatttatagagacagtgtcttactatgtttcatatatatatatatatatatacacatatatatgtatatatttatagagactgtgtcttactgtgttacccaggatggtcttgacctactggggtcaagcaatcctcccacctcagcctcccaaagtgctgggaatacaggggtgagccgccatggctggctggctttttttgtttgtttgtttgttttttcagagatagggtctcactatgttgctcaggatggccttgaacttctgggcttaagcaatcctcctacctcagcctcctgagtagttggaactacaggcccacaccactgtgcccagctatccagtgttttgatgttacaaatgatgccgcagtgaataatcttgtgtacatctcattttgtccctgtaaagtatatctgttggataaattcctagaagttaaattgctgggttaaataatatatgtattttaaaatttcataaatattgctcaagaattatgattctgacataaaataggggttttgaagctgtttgtttgcttatttatttatttattttcagatggagtctcactctgttgcccaggctggagtgcagtggcataatctcaagtcactgcaacctctgtctcctgggctcaagcgatgctccctcctcagcctcccaagtagctgggattacaggcacacaccactacgcccagctaatttttttgtgtgtgtatttttggtagagacaggctttcaccatgttggccaggctgatcttgaactcctgagctcaagtgatccactcactttggcctcccaaagtgctgggattacaggcttgagccactgagcccagccaaagctgtatattaaaaattatggagtaactattttctcagctgatttgctctctttcaggtactgtatctcttattccttccaaaacaaataagcacattcacaagttacgcatttatggtcaagagtcagagaaaggtctaggttgccttctgtggcaatttgaagaaaaatgtgaagatgtgtaccagtaaacttcttctaaaatagttgatgggaacccgttgataatcatcactgaaagcgatacacctatatgtatatcagtaaaactttgtcggccatcctttactaacaaaggaattctttttctttctttcttttttttttgagatggagagatggagtcttgctcttgttgcccaggctggagtgcagtggtgcaatctcggttcactgcaacctccgcctcctgggttcaaccaattctcctgcctcagcctccccagtagctgggattacaggcacccaccaccacacccggctaattttttatatttttagtagagatggggtttcaccatgttggccaggctggtcttgaactcctgacctcaggtgatccacctgcctcggccacccaaagtgctgggattacaggcatgagccaccgcgcctggcctctttttcttttttttttaagtaaaaaaaaaattttttttagagagggagcctcactatttttcccagtttggtcttgaactactgaatttaacccatcttcccttcttggccttccaaagttaagagattacaggcatgagccaccatgttcggctcaggtattctcttatgcttcacaaatatagtgagttgttattcacaatgtattcacaagttgttattcacaacaatattcacaaatgttgttcattttgaaaatgctgtgattattgctgggcatggtggctcacgcctgtaattcaagcactttgggaggttatggtgggaggatagtttgagctctggactttgagacatgagcctgggcaacatcgagacctactctctaaaaaaataaaacaaaaagataaaattagccgggctgtggtggcttaggcctgcagttgtagctacttgggaggctgaggtgggaggatcacttgagcttgggaggtcgaggctgcagtgacccatgatcacgccattatgctccagcctgggaggccaagtgaggccctgtctcaaaacaaaattaaaatttaaaaaatctatgattgcttggcatggtggctcatggctgtaatcccagcacttttgcaggccgaggcgggtggattacctgaggtcaggagttcaagaccagcttggctaacatggtgaaaccccgtctctactaaaaatatgaaaattagttagtcgtggtggtgggtgcctgtaatcccagctactagggaggctgaggcaggaaaatcgcttgaacctgggaggtagtggttgcagtgagccgagatcatgccactgcgctccagcctgcagcctgggctacaagagcgagactccatctcaaaaacaaaacaaaacaaaacaaaacaaaaacaaattgtgattatagttttattattaagtttcttttgtgagacttgtcatttaaagctgtttagtgttgagaagtctctcagcaacagctagtttctaccttaataatttcaattcatttaaaaataatgtgaggcaggagaatagggtttggaggcagggaacctaaggctgagtaaagttgacttcctagaactgaatcaaaaggaaaaccccaactttccacacctaagtaacaaaaagactactccctttgcaaatcctcttccttttccgcttggcagatggaaaactgaaagtatctctgattggttgcagaaagcagatgtttgtatagcagtgtaactttgtaacttcactttagcctctgattggttgctgtccacaaccaattagatgcttgcatagggtgtgacccttgtaacttcactttagcctctgattgcgggccactactttatttacatagggtgtacaccaagtaaccaatggaaaacctctagagagtatttaaatcccagaaaattctgtaatgggggtcttgagcccctgtgctctggcagctcctgcagtcttgtggagtgtactttcattttcaacgtgtctctgcttttgttgcttcattctttccttgctttgtgcattttgtccaattccttgttcgaaacgccaataacctggtaacatgttgactatttactatttttctcatagtgaagtcagttgaacagcaagcacatttctgtgctgccttgtgatggagtacatcattcaaattcactgcatttaccaaggagaaaaaaatgactcctgtaaattgtatgttgaaatgatatttaatgtgtacaagacaaaatcagtatagcaggtacagaggtctggtttctataattgccaactgaactcaaacatttgaaagatataattgcaatgtgtacaggcgtctgttgattaaaaagttgcctgaggccaggcgcggtggctcacccctgtaactccagcactttgggaggtcgaggttggaggatggcttgagcttagatgtttgagaccagcctgggcaacagacagacctacctcatctataccaatacataaatacataattagctgggcttgatggcacgcgcctgcagtcccagctgcttgagaggctgaggtgggaggattgcttgagcctaggaggtcgaggctgcagtgaactgcgtcacgccactgcactccagcctgggtgacagagctagaccctgtctcaggaaaaaaaaaaaaaaaaagttgcctgagcctatcagattttcaaagtgtttcattcaaaaaaggctcccctcttgctatcccagtagaaagcagcaaccctgtcacctaaccccgacaggagctcttgcatatttcaagaaaaataaatagaatgaactaaagcatgcatggcagaataaatttggaaataaatttcgaagcgattagattttagaggacttgtttgtgattagcagagattaccaatgtaaaatcaaattatagatcataaaagcgggaaaggcatttacagatcatccagccaagcttcctctgtaatgagaaggaagcagatctaaattgattggtttgtgagctaaacatcacatcaaattggggaaatggcccgtgtgtgtgtgtgtgtgtgtgtgtgtgtgtgtgtgtattctaagagacactttattcaatatggaaagaattttatgcagcgttcaagttggtcttatgtcgtctgcacacatatacatatatataagtatattatacacatatacatttccaagcatgttggtgtgccaaatattatgtataaaacatctaggaaagcaaataacttgatgatagcctagcatataggaaagaaaatacttacataggatggccatacagattagtggttaagagtgtctggtgaatctcggctccactactgtgggactttgtgtcttggtttcctcatctggaaaatgtaggtttgtctacctcagagagtgtaaagattaaatgagataacccggataaaggattagtgtagtgccgagcatatagtaaactctcaataaatgtaggttgctgttattacttcgttaatatgtcaaagaaaaaagaggttggaccaaaagagcattttcaaaataaagtcaaactatgtcactagcactttcaggtcaattgggactaaattggaccccctgcgaaaaggtggaggggatcaaatgacgtcgaccgccttagcaacaggcccccaaagaaggtgaatttccgtagccaataagactctgtgctttggaggaggtagccaatggctgacggaaagagaaagagggaggacgcgccaattctcctgcctgagcctcggcccaacaaaatggcggcggcagcggtgtcgctttgtttccgcggctcctgcggcggtggcagtggtagcggcctttgagctgtggggaggttccagcagcagctacagtgacgactaagactccagtgcatttctatcgtaaccgggcgcgggggagcgcagatcggcgcccagcaatcacagaagccgacaaggcgttcaagcgaaaacatgaccgctgagcccatgaggtaaaacgcaaccccgtctcatgggccccagcggtctgggcccaggcaccgtctgagtcgggtgtttgggaaggcgttcgcttggtgggttaggcctgtgtgttgcttagccgaaagaggcatcgttttctctttaggtgagaagggtttcggggtatcggcgcaaggctccgacgggggtgggggtggggatggggtggggggaggtggggggggcgcggcctagggtatggggcgcttcttgcaatctcccctaaacggtgacgcttggtcgggctcctctgtttattctttggtgcctgtgggattgagacctcgaagtcggaggcggtctttggtatcccggtcatttttgctaatctttgggcctagaaactgcgtggggaagaagcggggggagggtgagaagagggggaggggtgggcgggcgcgaggatgtgagatcccaggacgacttagaggcgtttaggttgctggagatgggaagcacccgggccctgcgggattttttctctgcagccccaggagacaagcctttttttgattgggttgtggtgcagttccaggtatttaggtatcttttctactccatatcctgaaggatatccttgggtttatttctaggcgaggggggacttaacacagggttttgcttccagaggaccctagtatactactttttgtgatgtccagccttaatgggacctcaagtgtttccccactttctgggcaaatttcgaggagtaattaggccctatctttatttacttatttattccatgaaggatgaagggcaggttaacgtgggctgatgcgaagtaagatttattgcaagggaaaatgcctggcaggcctcctctta

SEQ ID NO: 3145 - DNA, 6000 bp, Homo sapiens
cctccttacagtattagggggctgctgcccaaagcttactaatcatcacacacatcttggtcaagaccagtattccttctccctaaagtcattcgcgggttcagaatttgtttgaaatcgactttactgggggtacaatttacatacgataaagtgcacccatttgtttcttttaagactttacctctccccctacatatttcataagctaaggtaacactgacacatgtcactagcactgactcgtgagttattgctaatgccatcaaggtcagggattcaaacagcacagttgagctgccatcttatttgggaggttgagctgcaggaagagacaaacatgaccaaatccatttctgctgagagaaaaacaattcagtgcatcagtgatatacctgaaagcaaattggaatgtgactactcaaggacgtccaagttactcagaatggcatcttccagttaataagtttattagctgagctagcagatatatttacagctaacccttttatcatatatgtgggtcgcccatttctaaaaccctacattatactactcagcattaaaactacccagataaggatttcctcttagttggctaatccaaaatcatccttatgaataccaattttcattgtattatgtatcaatcatcattgtacagtatttttggttttgattagtctgatgcctagtttgctggatcgttcccctctgtattggaagttaatgcccctgatgatctttatctacagaatagctttaaggtggagaggggtaactattaattaggtacatcctgtacacaaagtagaaaggggctttgccctttgccaattcacagctagaattaatgctaacttcctgagagatattaaaaaaacatatgtacataataagattatttcaatgtaagcttctagcaaaaacttgtcactgagtctacttttgtaaggaagaaactttgatttctgaaaatatgatatctcaaaatgggcttcttgccctaataaaaggtgtctgttacttctgtggggtgagactttgggggatttccacttatattttttggaattaattcaatgagtatatattgcttttgaaaaaagataaaaatataatttttaattaaaaggacaggaaaactaccttattgtacctattgtaaaaaaattaaatgtactgtacaatgccctttgtgttaattgtgcattattaaattactttcaaatacatgcagttgttttcataggtacctgattatcatgattttgacagtgttttccagtctcttttgccatcagatataattaactttgtatttaatcaatccatgattattggtttttacaaatatcaataaaaatcaatgcaaggctgttaaaatgttaagtaaatataaataatttttaccttactttggaattgatactttttttttttttttttgagatggagtctcgctctgtcacccgggctggagtgcagtgacacaatctcggctcactgcaagctccgcctcccaggttcacgccattctcctgcctcagcctcccaagtagctgggactacaggcgcccgccaccacgcctggctaatttttttgtatttttagtagagacggggtttcactgtgttagccaggctggtctcgatctccggacctcgtgatccgcccgccttggcctcccaaagtgctgagattacaggcatgagccaccgtgcccggcctggaattgatactttcaatatttatcccctggcctaaagtgatccaccctcctcggcctcccaaagtgctgggattacaggcatgagccacagagcctgaccatattttcaatatttatccaaaggagctctagataaaatgtcacccattgcctgcacttctgaacactgatctactctgcttaatgggtaagggagccctggatcatcttcaccacataatgactacttcctaggcctggcacagtggctcacacgtgtaatcccaacactttgagaggctgaggcagcaggattgcttgagcccaggagttcaagaccagcctgggcaacgtaatgagactgtctcttaaagaaaaccaaaaaacaaaactacttcctgggttaaacttcacagaagggtgtctttgtaggccgggcgaggtggctcatgcctgtaatccaagcactttgggaggccgaggcgggcgatcacctgagatcaggagttcaagaccagcctggacaacattgtggaaccccgtctctactaaaaatagaaaaattagcagggcgcggtggcatctgcctgtaatcccagctactcgggaggctgaggcaggagaattgcttgaacctgggaggcagaagttgcagtgagccgagatactgccactgcactccagcctgggtgacaaagggagactccgtctcaagaaaaaaaaaaaaaaaaaaagagtatctttgtaatttctttctttttcttttttgaaatagggtctcgctctgtcatccaggctggagtgcacgggagcaatcactgctcactgcagtctcgatctcctaggctcaagtgatcctcccatctcagcctcctgagtagctggaaccacaggcacataccaccacgcctggctaatttaaaaaaaaaatggtagagatgatgtctcattatgtgctcaggctggtctggaactcctggcctcaagcaatcttcccactcgtcctcccaaagtactggcattacaggcatgagccactgcacccggccctgtaatttcattctctatccccattccaccaaaaaaaaaaaaaaagtaacttcattacctccaaagttagggcccaactcttgccagttcaaatctggccccccaccatacttgcctgtctttatcactacttctttatttttttctttttggagacagagtcttgctccatcatccaggctggagtgcagtggcacaatcttggctcactgcagcctccacctggcaggttcaagcgagtctcctgcctcagtctccctagtagctgggattacaggcgcatgccatggcgcccggctaatttttggattttttgtagagacggggtttcaccatgttggccagactggtcttaaactcctgacctaaagtgattcacccgcctaggcctcccaaagtgctgggattacaggcatgagccacggagcctgaccacatcaatacttcttagtatgtactctctatcattgtcccccgaaaatgtgctgggttttggttttttaaaacagttccaagccttttcatttaacaaacagcatggtgcttcctctaagacactttacaaatattagctcatttagtcttccgaacaccctcctgagatttgtagatgaggaaaatgaggcacaattaagtgacttgcccaggtggcagagccaggattcaatgtgggttggtctggatccaaggtcaacatgtttaacaatgaaaaatgttatctttggtccgaaagtattcaccatctgaaatatcaatccttttcctctactgtttgaattttactactcatccttcaagacacaactcaaataacttcttacacgaagttctaccatagtgattccatcccatagtcttctctcttgctctgtccggcactacaccagatattatttcaatgaccggtatatgtcatctccccaactagacagtggccacttcctatatagatgctatgtccaaataaacccattgtaaactgaaaatatcgttaagtcgaaactgcatttaataccctgataaacccatcataaagtcaaaaaaccgtaagttgaaccatgcttaagtccagatgctcctcgactgacatggggttaggtctcattaaacccatcataaagtcgaaaaattgtaagtcgaaccattgtgaggggtaagtcggggaccatccgtacttttcatacccaacagagccccttttatagtacaatccaagaggtaagtgctcaataaatacttgttaaatgaatatgtaagctgaatctttgaaacaggcacattgtatgttctgcatgcagccaaaacattatttccaatttagcttatatctggcagagtcaaaacacttatttacactcagcccctcaccctactcccataactgaaagttctgcttagcagacttctcttcccagaaagtccgagaagcacgaacgctttttgctaacatcctgctcccaagcacagaaaccacagcaggagactgtgtgtatctgtagcacctggtatacagcatctaggacacacaactgaactaataaataaaggtgacaggcgggaagaagagcgcagaattacttgtccaggaaacgggttgggtgggaaagagccggcaactggtaaaagatggaagtacacgccggatctgggaagccaggttccgcgcctcggactcatggaaaaactggatctggatcactgcaaaagaatcaggaaggcttcggtatcaagtaactggtgtcctaaaaccaaaaaacaaagtgcgatgccggggctacgctgttgtgagatgctgttatcagttctcgtcaccaacacagcggcagcaccaggcacaaccgccaatcaaagcggccccacgagtccctccttgaacaggttccttaactcgttcagtccaacactgtgccacaaactcgcgaaaaccggctacctagagccagcgtctttgcgagcttgcggccagctagtgcatgcgcaaatcctctcgccgtgcggaccaatcgcaatgcggcagcgagtgctacgcctgcgcagtaggcctccggtcgccgttccccttccccggctctagcaggccggcttctctgtccaatgcccacccggagctgggaggaggagtctgcgtaatgtgcgtgtgaagagactgggggagctggccggggctcacggtgtttgacccgtcggtcgtgcgtgagaggaaagggaaggaggaggtcccgaatagcggtcgccgaaatgttccggtgtggaggcctggcggcgggtgctttgaagcagaagctggtgcccttggtgcggaccgtgtgcgtccgaagcccgaggcagaggaaccggctcccaggtgactgacccattccaggcaacctccaagtccgagggcctggcgccttaggctccctgtgccttgcagccctctacccccgcgtccccgcgagaaacttaacacatagtcacgtgaattccaaattggcagactccgaaccctgagtcttgcaagcggaggaattggctcagccatgccgacctgaccttcaagagatttgaacccagtagtcggcttgaggccttttcccgggagcgtttgctgttcagggatcccagaacaactggctgtcggcgcctccccggcatccccaccccccacccccctttttagagcaatgaggtcaagtagactttgtcatttaccgattgagactttaaacaggacgtttaagccctacgcctaagtttcttgtgtaaatgagggtgttatctgctcagccttccaaaccacagatgagatccatggatttgaatgcccagtgaaacagaaacggtgcagggcaagtaaggagtcggttggttgtgtaccagacacccagagaattggcccagacttaattggagatgcctgagccgtgtacttcttggtggtctttaaggcttcaaagaaacagtttgcagaacgcattgtattttgttctccattaagttgtttcatcaaattttagagctggaagggattttgtggtaaaggtcaacccactcattttatagataataaactgaggcacagagaggtgaaattacttgccaaaggtcacatagttaattaataggtagagctaaggatagtttgctagcctccaggtccttaatcccttcgctgcaactccatactgcttcctaaagttgacctcaaaaagttaagaatgaattcgggtctcttcccagtaattagcccattgtacat

SEQ ID NO: 3146 - DNA, 6000 bp, Homo sapiens
cccatgtataccaggcactgaggagcctcttcttgccaattgaactgcagcagaaccctccactttaaaatgtattatagcgtttatcctaatcaccagtcactatgactctcttcccagtttttataattgctgttagtaaactgcttataatctatgccatcattcttataatgatcattggtattcgcaacagtgtgccatctcacctgtgactgtggcaccataggactggtggcaggtcttgcctttcagaaaggccccttatcgcttcttggctaagatcaagtgtagtatctgttcttaccagaaaggcaccctttacatccaggccgtgtgaactgggcagtgcgttgtgtacagggaagtgtctcttcacccttgagccccggccactttgggggtctggagagacgccaggggagcaggcctacggcgggcatcggcctctctaggggctctcaactcagctcccatcagttcagcatcctgatgtggcttgagatgaattcttagtgtctggacacaccagagaaagggtcagcatcaaatccacgccaaaggccactcgggacagttctttatttgtcccgtttcccatctgaccccttgagggccgtggtctcgatggccctcctcccgctgtggaaggccgtgtttctgtgctgtttcacctcccagcgatctgcatgcccgcagccaggctctgttggaggtgcggcaccacctatgaagtgaggagcagccagtgtgccttctgggctcttgctgggggcatggcctcatgtgagttgggagggccttggcactgtggatcagcaccacacaccaggagtcgccccccaggcttcctgaaacctcactgccatgaaaacatcaatgtatttagaaaccgaagcaatgctgtcagtgcaagaatgggacaggagagttgagggtaccaacagtggagagatgccaccaaccccggcagtggtgacgggctcagcgggcggggaaggtggcagcctagaggacagcccaaggggcagcggggtgccagggacagggcagtggtgagcagatggaagcagagggcacaggtgaagcaggtctggagaggcccacctccccggcgagaccctagcctgttcttctgtgaagaaagtgatggaaatgaataagcaaaccagctcccaagctggtggcccggctcacacagagcctgagcggctcccagctcgtctcttgatgtggctgatgtggctggcggcagcccgggtgaaacctacctttttgcagcctctgagggtccatggggcaagagctgatccctgcctcgcctccatggaactcctccaaactgtcctccagagagagaccccacaggcaacggctccaccacagcagaccaggggcagtggcagctacccagatcctcttcccagcccctgtggctcgaaaagcagccccatgcaggagagaaggaagccctggatgagcaggaaatctgacctgaaggactttccgacaccactgaatacactcagtgcgacatccagacatgcttggacagctgtgaaaacccagccacaaagagactagaaacgaagtgaggctgggatctctaagaagagagaaaacagagagaaaaaccagcacaaagatcagcatcacacaggccccagccaggcacagggtctccagggcaggggacaggggagatgaagggcagggctccggaggaggtgggcacacagtacaagccaggtgagtgcaggcgccgagcacagggtagatggaacccacctcctgccatctggagtacaggggccaagggctggggccaaagcttcaagagagacagcctgtggcctcagaggagcagccaggatgccttacaagcactgagggccctgcacacccggccttgggctctggaccctgccaagccctgcaccaagagtgagggcagagcaggaaggccgggatggaggtctagacgatttgataagggcagatgccacacgagggacacagtccggagcctaggaagacagtctagagcagtgcgcattgcggcaggaagcccctctgctgggatgccactggaagctgatggcgagtggagagggtcctggggcgcaattccaggcgggctgagcacattccccagctcggtgtcaccccgaggcacaccccaggattcctgagcttcagagtcaccctcgggatgggcagaggatgacagattcagggttcacagcacttaatgtcaatgctaatgacttcaacatgtaaaaggcaaagtctagctgacagtggggccacggatggggagcggacaggcagggcaggtgaggggctgtgtcctcctctgtctgctgggggagggggatgatggccatggtctagggttggcaactgagaggcagatgtggtcatggcagataaggtcagcgcagccaccacggtcgccactgggccgggcagccaaggcttagggctgtctgtgtgattgggtttattgtgtgtgcagtgttctccatctggttaatactgaacgtgccactgaagtcaggacagcccctgcctcctcactgtgtgccatgtgctgcccctggggcttggggggcagggggcaggtgggcgggggcacagccgggtcaacagaccctggcctgggtctcggaactgtgctgcggtcggtgtgacccagcccagggctcccaagctgctggcctggtccccacagagcctgagcagctcccagctcggcagtgcctgtcccttccctgccatcctggtggtgcctggggctcaaggaggatcagctgaggacatgtgccttgagtggtgggcaggaggcacctcgcctcttgcgccaggctcgctttcctgttggtttcttttctatttatttatttgtttattttatttatttattttatatatatatatttttattatactttaagttctagggtacatgtgcacaacgtgcaggttagttacatatgtatacatgtgccacgttggtgtgctgcacccattaactcgtcatttacattaggtatatctcctaatgctatccctcctccctccccccaccccacaacaggccccagtgtgtgatgttccccttcctgtgtccaagtgttctcattgttcagttcccacctatgagtgagaacatgcggtgtttggttttttgtccttgcgatagtttgctgagaatgatggtttccagcttcatccatgtccctacaaaggacatgaactcatctttttttatgggccgcgtagtattccatggtgtatatgtgccatattttcttaatccagtctatcagtgttggacatttgggttggttccaagtctttgctattgtgaatagtgctgcaataaacatacgtgtgcatgtgtctgtatagcagcatgatttatagtcctttgggtatatacccagtaatgggatggctgggtcaaatggtatttctagttctagatccctgaggaatcgccacactgacttccacaatggtggaactagtttacactcccaccatccttttggtttcttttctttcctctgcagctaccaagatgaatgaactaatggagaaatagaaagtcttcagtgatggcctacgccaaagcacaggatggggcgggcaggaagccctctcccaagatcgagttggccgaggatggatgattgtggcagcagaagccgttgcagccccacgttgtgctctaggcagggacctttggcccctttggggagggagagacagacgggcggtttgacttggacacaaagaaagccttggtttctaagcagttgcctccagcctgctttctgcttcctcagctctatgtctctctccttccccttgtcctgagctgctcaggtggcccaggtctgggcaggctggcggcggccctcctgtcatcttggcgggcctgggctgcgtcctcttcctgtggctccactcctccctgctgctgccagccacttgaaagcagagaacccactgtcgcctcccccggctggccttagggtcctgtgcgagacgcacccctcagccgccctccttgagtgcccctggatcccccgcggggtaccagtttcctgctcctccctggctgggcgctcagctctgggctggggaattcagcctgactggttgtccaggaagatgctgtctgggcttcccagggtgacccagtatctccctgagcagtgtgcctgtcacagctgcctccctccctgtgagtaccggaacaggcgtgactggtagggcctctgcctccttggggccattgtacctgctgctgcccgccccaccctgctccctcctggcaccatctcctttgcttccccaaggtccctgtgggcacacaaggcaaggaggccaggaggagccaggtgccagacccccctccatcccagtcgcctgaggcatcccccagccaccactgtgagaggtgggaggccgggcaggcctgtggtcaccatggtgcaggtgcaccacctgatttataggccaagggactcctcttggtcacctctctgtgcccccagcatggggctggccctgcagtgcacccaccatcaagggctgttgtctcttgctccagaatgaggtcttcagggcgccactgctcgcaggaccgggaaggacctggtgccctttgcctggagcgggatagacagggcaggtccctgagcctggggtccgaggggctgggcttcactcctcctgtagtcccggcgctcctggcccaccccctaacgttgcttatctgtggtggaggaagcattagctcagctgcggcctgcacagctcccgggccaggcccacctcccttccttccccagcagccactgttaggtgcacggtagacatgatgaagcgacgtccttaaagcagatagcatctcccgaggctgccccatccctaggttttgggggagcaccccttcccctttggaggctgagcacggcatgtgtgggcaccttggtcacactccagagctcgcttcatccccacgagcggcacctgatctccagtgacggggagactgaggcctggcaaagaggacctgttgcctttgtgtaactggccccagcatgggggaggcattggccccagcatgggggaggcattgaccccaggcctgccaggcctggcagccacagcctggctaggtggaggttactgccttccgcaccactctggcttcctccccgtgcctgtgaagagctcggggcctgcttcctaatttgtaaacacggggcgtgtgtctcagtggctgtgagctagcgagggggtggcgagcgagccggctgcgcaggtcctgaggccccaggcctcattgttggccaacaggcagctgggggcgggctgcggccgctgattaaaggccgcctagagcagcctgtgtggcgacaggtgcccagaagcccaggaagccggtcagtgcccgccccaggtaagctggtgtggtggggttggcaaggacagtctccccgggagcctgggggcaagcaggcagaggccagctcgggaccagcacctgtgtgccagggacaagggtggggaggtcgagcccagcgggagctgggtgcactgcatgggctctttcgggtggctgcttgcctgcttcccggcagctggttccagggctggagacccagtgtgctatgccccaggttcccagccaaggcattccggtgaaggggctggaccccgccaaggtgcggtccctgagctgcctctgcctctcccaatccctgctggggactgtggctggaggcaggcagtagagcgctctgaggcctgccttttctgttcagtaggtgacaggagtggggctgacgctcccagagccaaaggtcacaggtgctgtggtcgggggtggcaggaagtgagccccagaagggtcagagctttggctagggggaggatggtacacagcagggcccgggcgaacccctctctccagtcctcagg

SEQ ID NO: 3147 - DNA, 6000 bp, Homo sapiens
tttacataagcagaatatgaatctaaaaaagaaaaaaatcttcatagaaaaggcagacaagtgtatccattccttgattattgtgggaagtggggggaacagattttctacaggtgccgaatggaagtagtaaagtgtgaatgaggtgtctgggagacaacttacccaactgatttagatacagagcttgaggtgaaatggcagatggcaaagctaagaaagttggagtgagaatgtacaagacctcaaatgccaagccataatttgcaggatgaactcgaaggaaaaaaaattatttcagataaactgtacatgaagtaacaatgaagtactgggctaagcagatggcagagatggaagaaacagatttgagacccattaaaaagaatgaatctacaagatttggtagcttatggaccatgggtgatggtggacaggaaacggtcaaagaggactctaaagtttcaaggttgaaactaggtagaacgtgtgaggcagatctaagtttagaaagggtcaggaaggaaagaagatgagcttgttttcagatgagataatctgggatgagagatatacaatatggcaatttttagcaggcaagtgggattatagcttagactcaaacagcatcaatgcaggaatcaataaagcatttatgagtggacaaaaaaggtgtggagaaagggagcagaggtcttggcctgaatcaaggggagtggccacatttagtgtggggaagaacaagaagggccaggggaaagagtgggcttagcattatcagatgttgaagggacaagggtgaaatctgagagaaggcttttgaaacaagctatagattttcactgtgcaacaggtctgatttcagatatgcagcaagtatgaaatacacatggaattcaaagacaacacaaaagagaaaaaaggaatgtaaaatatctcaacatttcttaatattcactacatattaaaataataatccttcagatacttaggttaactaaaatacacccttcaaattaatttcatttattcctttttactgtgattactaaaaaatttaaaattatgtatatggatcacattcgtggctcacatgatatttctttttttgtggtttatttttgttttgtttttcaactgaatactccacttaaaaagattatcacactggattttttaaaaagtatttaccactaataagagacacaagagacacattttaaatattagtatacagaaaggctaaaaataaaaggataaaaaatacactatgcaacactaaaaaggcagcttaactaataaagtttaatatctaatttagacagtacaaactgacataaaactcaagacgagggcatgaaatcttgaataataaaattacattattaagattggaatgtatcttagtaactgatgcccagggtgaattgtttctttctctctttcttgctttagtcagagatttcagtgcctaagaggaatgagtaatatttaatgcatagacagaggaggaagaggagtccacaaaggattgtgggaagggggaaacaggaataaaggcaatacaacaaaaccaacaaaaactcatgagagtttagagattcaaggagaaagatgaagataagcaccaggaaataatccaccgaaggtagaattagaaaccagacctcagtgggtttgactggggaaggtgaaggagtagtaattgtagcccattcttttaagaagtctggctattaaaggaaggatataagagtactgactacaggaagatacgggattaagaagtagctttcctttctgaaaatgagagtaatttaagcatatgtttatcctaaaagaaccaggtgacagggagaagacccagaaaagagacagaacatttgataaacaaggtctctgaagaagctgcagctttggataggaagaggacttatttctttgatatgggaagagatgcaaagtgattaaggtggagaagtttgtaactagtagtaataagtagatgaaggtgtggcctgataacttggtgggaggaggggaagtaattcattttttttgtattttacaaaagcatcggtctgtgacagactgggggaaacgttaactggtccgataccacgattaggtgagaagcattacactagaccatcaaggctagagcatgccacaaaagatggtgtaggagtgcagataggaaaaaagtcaaggcagactaagaactatgatgctatggtcagtttgcctgtttaagaagagagggctgcatgagtagatgttggaattcgagataaagaggtaatagtgatgtgaaagtatcaaggatgccaaagtatcaaggaaagtgggagaagggccagaaaacaggcagtgacagcaaggagagcagcaagagggtggtactgacagtgattattaatcttgatcaagtagagacaatttgctacaaagaacagaaaattaggtcccattcctagtgagtagattcttcatctgattttactagaaagaatatctcatccagccagaaaccgcatactctggctgagatcactggattacagaaatctttccccaactgcaagtttccatcatgcaaaattttagcacacataccttttcagcaactgtgcgcatttcagttccagtatatgcaaatttggagtcactcctactgggaataaattagaaaaaaaaaaaggaagtggggtttggaatataaaaaggaattaaagcaaaataacaggattaactgtttttgcaatgaaatcttagcagagaccaaagaagaggagggaaactgaattgaggctagagctgcactctatctgttagaagcaatctgggacacatgcacaagtggctgagtgtataaagttataatggacaaagctaaattcctggaatcctgggaactaaggaggtgggcttgagaagtatactatggtatgatttgaagtttaaattaaaatgttaccgaaaggtttcaccacgtcaagtattgaagctactggggatctctgagatcactgaggtccatcaggaggaaaggcaatgtcactgtcaatttacgtgaaggaatggatcaatggggaaatgcctctaaacgtatatgctctctgtcactaagaaaattactgatatctcactggcatttaaggggagacagaacatgaaatacactgagcaaggccaggtgtggtggctcacgcctgaaattccagcacttggggaggtcgaggtgggcagactgcttgagccaggagttcgagaccagcctggccaacatggtgaaaccccgtctgtacaaaaaaaaaagacagccgggtgtggtggcgggcacctgtaatctcagctattcgggagtctgaagtatgagaatcgcttgaacctgggaggcggaggttgcagtgagcagagatcgcgccactgcactccagcctgggcgacagagtgaggctctgtctcacccctaaaacgcaacaattatgataatgcttattaagatgtttatcccatatctcaactgaataggaggtaaggcagaaaccaaagttcaaggttgtatcattaagggagccccggagtgataatggtaattaatttaagacacgatccggacacaatactgccaaagtcgccataattttaggttaacaatgacttagagattataagatatgagtaaacaaatacagtcttaccttgtatcatcgttcaactagagtgggaaaaagcaaaaaacattattgatcacattacgtttgtttgacatatatggatgcagattatatgacaattaggtcatgtgttcacgcacatggtatgaaagactggagaattactttagactgtaaacagctaaactgtatttcctcatcctcttcggcccctcctcaacacaatgcagcggaaacttttgcttccttcaagccccgcaccttctgttaggctcttcgatacccttcaaatgctttggttgatatctctgctccctagacagaagactcgaggcgaggcaaggggctctaactgtggtcagctgctgcgtcgtaatacccggacatcctcattatactccagtgtctttctgacctgccttgcagttttggtcaaccgggcgaaaagcgcagatctaaagagaagccccaggctacaggagaaagggcaaggctcccggggcctgtacagaccgccgggggctcgcaggagactaaacaagtgtcaggcggccagaagaaacggggctccccgcgacagagctatgtaaagggtgtccaaggacctaaatcgaggatgcctgtggcctccgcagccctgggagctgccggcacccaccccggggacacactgggactgctcagcagggttccatccaggctaacagacctactcacctcccctatgcacagccccattacttcctccttctctgtgctcagagcgtggttgagacaaacgaggaaagcgtcagactcgagatgaaccgcctgcaccgcctgcaccacctgcaccgccatcttggcccgacccttctcacgtccgcctcgggcccacttggtcctgaccaaccgggtgctgcggcgcagcctccccagcgcccagcgctgtgcgctccgcccaggcctggccttcggcgcgcgggttcctagggggcggggcttagggagcgggcggggctgtgggggcggggctgtgggggcgaggagggggcagcgggcgcgcggctggcgcgcgggggcgggccttggggcacgggggcggggcccgcccagcagcacctgggaaacgcccgcgcggtttggggcaggcgtggccgtcggggcggagggcggtggccggccgcggtccgggcgtcaggccgggcggcgggggcggcagggaggcggcgctctggggccgcaggcggacgtactctgtgagcggcgcccgggcgcctgggcaggcgcctcccgagtaccggcgcccattttgcccgcccgctaaggagacccgtgcgcggcctacacgcttgggggacagccctttaagacgacatctccgcgaacgccggcctcttgagccagggggacgctcttttgaaagtcagtcccaaaacagttaaggttttattttattttgttttatttccaagtcacagcccccgaatctcgtacaactctccctggaccacttccggttgccggcccgcgcctcataacttcggttcgagtgacctcggcccgggatgcccctcggctcaccccgggctcacgtcgcgatcctggcttgagtggcccagggtgggagacctggaagttttagcctagctgttctcaaggcggattaattagcccaagaaacattatattcatgtgagtaaccttttgcagaaacagtgttatactgtatctgaaaaagtatcactcttaagcttggctgctgctactttctacaaaggcttttaggtagctatttgttggatacagggaaggggaaatggagaacttcagtttttattcaagttcggatgtatcacattaggtatccagaatgcaagtttcctcgggtctccttgtctcgatgatatcagacagtaaaaatatatgtaaaagtaatttttatttcgaggtatgtcaaacgtgccaaggataaaagtacagatcttccaactcacaagtctaggaatcacacgtggattttgaaagcgattctaaatcaaagcacaatatatgccgtgccgcctccacagcccgtccgtgttcgtgtctttgatttggttttctactttgtgtagttttgaagccaggcaggtatggcagtactggaaagggaacattcccaaggtgctacttgaagtgttgatgctttgctcttttctcccaagtcagttccaacccaagtctccccacacatagggtccccatccagtgcaacgatctgtaatgtgcacgccagcagcctccgtttttacctaacgatctgtaaggatcacatggcacatctttctataattaattt

SEQ ID NO: 3148 - DNA, 6000 bp, Homo sapiens
gggtcaaggatgaaagcctcctgtttgggagcatttgtgtatctctgatgcttactgtgactgtgtgtgtggataggggttgtttaggtgtgtctgggagaatgggggtaggcggtttctctgcctcttagagatgtagcatggttacactgaaacagcctgtagtagtcattaagtccaaaaccttcattttatcctagaagaaaccaaggatcagagggacaaaagatctgtctgagaacagatggcaaatcagtgggagaacagagattagctatttttattcctaatctagtaaaccataggtggctgaccatcaacaatgagaaaatgtgcctggttgattttcactgctccctaactgttataatggccgccttttctctaacagctaaaattagttgatattttgtgagtgcctactctatgtcagaccccatgaagagctttaccggatctctcaatctcctggtgactctatgaggtatgtactagtatcacctccaccttagttataaggaaattgaggtttatggagattaagcgacttgttctttcaaatccacgaccagcattcttatactgtgataaaatgcagtccctgctaagcctctgtatcaaactctccccccaaacctttgactttaccacctcattttcatcaaaagagcttgcctcctccttcagaaaaaaaaaaaccaacttcaaatctacctccatttgcactgtcttaccctcctcctcttcagggtcctgctcctccaatcccgtctaactgttggaactcagaaactaataccccaggccaggcacggtggctcatgcctgtaatcccaacactgcgggaggctaaggcaggcagatcacttgaggccaggagttcgagaccagcctggccaacatggcgaaaccccatctctactaaaaatccaaaaaaattagccagacgtgctcgcttgaacccaggaggcagagcttgcagtgagctgagatcatgccactgcacagcctgggcaacaaagacagagcaagactctgtctcaaaaaaaaagaaaagaaaagaaaccaataccccaaaatatggccctctgacatgctgaactcaagaagccgcaaggtctctctgatccttccaccccagactctcccaaagccaggataaagttgttctctggaactctttatctgcctaaagtccaaactcactaaaaagaatacttgttttttcttcccctcccaataagactaacatgtaaccacacctgaacaaaccctttcacaggtattgtgtacctcaggatcactcaaattccaaagagaactattaacaagtcaacctctgtccccattccattctctctagtaatcctttattgcccttcaacagaatctccttctggccaaagttcggtttatttaaaaacaaatagagctggacatgctggctcaggcctgtaatcccagcactttgggaggccaaggcaggaggattacttgagcccaggagttcgagattaggcttgcaacatagcaagaccccgtctctacaaaaacagaaaaacagaatttctcttctaccccttgtcaggcctctgagcccaagctaagccatcatatcctcagtaacctgcacttatacatccagatggcctgaagcaactgaagatctacaaaagaagtgaaaatagccttaactgatcacattccaccactgtgatttgtttctgccccacgctaactgatcaatgtacttggtaatctcccccccacccttaagaaggttctttataatctccccacccttgagaatgtactttgtgagatccaccccctgcccccaaaacattgctcttaactccaatgcctatcccaaaacctataagaactaatgataattccaccaccctttgctgactcctttttttcagactcagcctgtctgcacccaggtgaaataaacagccttgttgctcagacaaagcctgtttggtggtctcttcacatggacacacgtgagacacccctcccataatctgttttgccagatggtatataaactcacgaactctgtagggagatgggtaatcactttatggttctcccaatgtgcatgttaataaatttgtatgccttttctccagttaacctgccttttgtgagctgatttttcagcagatcttcagagggcaaagggaaagattttccccttggctcgtaacacaatcaaatcccaccctccttcccttcatagccaaacttccttcaccaaacctgcttacttccacattcattctacaatctattctccaaagagcaaaggaatcttttccagatcacgtcacttccttccttataaccttcaatggtttcccattcttttttttttttttgggatggggtctcactctgtcacccaggctggagtgcagtggtgtgatcttggctcactgcaacctctgcttcctcggctcaagcaatcctcccaccccaataccccaccccaactccaagcagctgggaccacaggcgcacaccaccaccacatccagctaatttttgtatttttgttagagacagggtttcaccatgttgcccaggctagtctccacctccagagctcaagcaatcaacccgcctcggcctcccaaagtgctgggatacaggcatgagccacggcgcctggtgacaccccattatattcttttattttctttcttttctctttttttctccctccctctttccttccttccttttttcctttttctttcttttttaaatactgtaggcctttactatgggtcattaaattcttgagcaagctggttgtggtggctcaacactgtaatcctgctactctggaggctgaagtgaagaacagcttgagcccagaaggtcgaggctgcagtgagctatgattgtgccactgcactccaccctgggctcagcaagaccttgtctcttaaagaaaaaaaaagattgagcaaatatttatagagccccctaatatgtgccaagcagttttaggcacttggcatacttcagtaaataaaacatcaaaagttcctgccctcagggagcttatattctaatggggacagaaaaggaataatgaacataagtaaattccataagatgttaggtgataaatattagcataaaaagcaaaaattagaccaagaggggaaaaaaaagagtgccaaggtggggtttaatgttgcaattttaaagactgtggtcaaggtagacccaaagcattctaagtgagtgcaaaggccccaaggagggtgcctggtatgtctgtggtacagtaagtaggtcaatgtggttagaatggaatgagatgggactgagtggtagaagaggtcagagaagtaaaccagatgaggtggggagaggagggtcacaaagtaccttataggccattggagggatttggctgccacacccttgctcttagaaggcagtcctcttactacagccttgcaggtccagtgatccgggcaccatccgcctcatcccctcactatgctctagccaaggttgactgaatttagttgcttaaacacctcaagtgtgtctgcccaccttggggcctcacacaatccatttcctctgtttggactcttttatgcttttacctaacaccttatcatttttcaagtcttgactgaaatgtccaaatcaggtcccctcatcttatcctatcacatatttctgccttgtagctcttacctaatgtaattttacattactttgattctttccatcagtgtgtacttcctgaatttgactgtaaaaaacgacttgagtgcaaggactgattctcttgttgattggtgtgtgtccaaagtcagtgccaggtaaactgtacacaatagatacctgttaaatgaattaatgggatgggggatagtcaaaagagtttcccttttttaggataggagaaatccaaagagtttttttatttttgttttttttttgtttgtttgttttgtttttagagacagtgtgtccctcactttgctgctctgccactcaggctggagtgcaataagaacatggctcactgcagcctcgacctcctgggctcaagccatcctctcacctcagcctcctgtagctgggactacaggtgcgcaccaccatgcccaactaatttttaattttctttttgtagagacaaggtttcactatgttgcccaggctagtcttgaactcctagggtcaagcgatcctcccaccttggcctcctaagatgattacaggccataagccactgcgcccggcccaagcagttctgaataatgatgaaatgggctcagttgagagaagctgaagattaactataaacaatgagtaacaaaggagcactggaaggcagaggtggatgggaatcgtagtgtttacggagggactagtctccaataggaattttttttttttttttttttttgagacggagtttcgctcttgttgcctaggctgaagtgcaaaatggcgtgatctcggctcaccgcaacctctgcctcccaggttcaagcgattctcctgcctcagcctcccaagtagtgggattacaggcgcccgcaccatacccagctaattttttttgtacttttagtagagacggggtttcaccatgttggccaggctggttttgaactccggacctcaggtaatccgcccgcctcggcctcccaaagtgctgggattacaggcgtgagccaccgcgcccggcctaggaacctctttcaaattcaatcaccctctaggtcgactataccgcctagctgcttcacaatttgtcccttcctcgccatccatactgccagccttaattcaagttcacattatcacttgattggattattacaaaagcttccctaccaatcggtcgctcttacaccctgggcagcctcctccgatggcccactccccgcctctttcactttctggagatcactgagctctccatcctctctgggaatttaccgatgcccagaacgcccttctttcccccacacgaccctctcctagtctaactcctgggcgtgctttaagctcagctcaggcagcgtcaccttctctggaaagcccaaacccagccaccccactacccgctacccgcggcccacgctgatgaagacagcagaacacggaggccccgcgttcccgccgcgagagcaggagagaaagattacctcccgcgagctctagcgcgcccggctttccggcgcactccagggggcgtggctcgggtccacccgggctgcgagccggcagcacaggccaataggcaattagcgcgcgccaggctgccttccccgcgccggacccgggacgtctgaacggaagttcgacccatcggcgacccgacggcgagaccccgccccatccccgactgcctgaaccgcgccaggagacggaccgcaagtccagcgtacccacagacgactcaggcgggagacgagcggtgtcatggccgccgacagtgacgatggcgcagtttcagctcccgcagcttccgacggtgagcggcttcccagaggtagccttcaaagcctctgcgctctgggagaggggaaggcctcgggctcatagttctagaggctcctcaagcttcagaggactgctccttccgcctgaactagccacgaggagactacaagttccgttgtacaccgcggctccggctgcaaaagcctggagcgttgggagcatggggctgatggaggcatggcgggagatgtagtctggagctcataacggttagtagtaatagttgtgattcagttcagtggagtggattgagcgttgtgatccaaaggaaggtaggacgtattgggagctctggtgtggggcactgccaggctctggggcttactgggagctgttgcttgtggcgctggggcaccatgagaacagtagtatggatccctgtgggatattaagggagctgagatcctcaagccctacaaaatgtttcctgcaggacat

SEQ ID NO: 3149 - DNA, 6000 bp, Homo sapiens
cacctcaggcataggcctgcaaacccagggaaagcaggatgggtgagggggtttagtccctgcctcaccttggggatggaccttcagctgaaaccatatggccccctaggtgcacagccttgattcttccctggagcctacagagcaggcaggctaggccaagccaggctcaacttctgggctcccagtgcccattggctgtgtatgacgggaggcagcagtgagaggccttcctagttagggccaacagctgataccaagcctctgaaatccagcaaggaggtctgcctcccaccagaccctctccagtgtacttccccagataggaccagaggatgtctagttctaggctgagctggcaggcagctattaccccggttctttccccaccccaggtctgtctcttgccttttcttggggcatataagctactgagtggaacatggagctgatcaagaggccgtaatggtcatggctgtttcccagacctgaatattggggtgcttcttgccagtattctaagacatttgagtaattgctgtttgcacttactgcatggtcagaccacgtcactacatttctatgcaaggggacagcaaggcagcgtggtggtcatggctcttagctaacctattcaaagaccttttcctgttgattaatctattttcatatttataaaggagtcttaatgttctgccccataagactttcaaccttgtggttgggagtggggctggttttgtaggccctagggcctgcttctatgtatttatcaacatgtgatacattcaattggttaaatggtttatacagggactgatttgcttcccttcctgccatggctggagctttgggaacagtctgtccttacagagctgcaataagaaataaccaaagatgaagctggtcaaatattttcataacttgcttctgttgatttttttttttgtaaaactttcccaagacattttcagacttaaaaataaagtcagtgttacaggtgctggtcagccttcttacttgtacctcaaacactgggataaaggaggcggtccagggcaatgcagtgatgtctgtcaagacattccccctcccctaaactcagtagcagttgaggatgacatttcaggctagagagacccaaaatacctctgttccacctgagagcaaggtggaagttgcatcagctactgccccaagtgagcttcatcttctgattgtgggctttggaggaacgagagaactggctcttggccactgtgaggggtacagctttgccactcaaatataccttattgtggcattcagggagccagggtccagagctgcagggctgcggtccctggctcacttccacataggccatcacataacctgtcataaaggcatcaaaaccagcccggtgcaatccatccccaggcactgggttaggactggcttggctccctggcacttctgaggtagctctatcagctatttcaggccttgctgccttaatccccatctctaagtcatttttgttgccttgcttggagtgaggcaggttcctagtttcatcggcagccacctcctgctcggtttcttcaggcttgatgctatccccacagacctgcttcttgggaggaccatccttagcttccccagaggtctgtgtccccggtaggttcaataaagccctcttccgtttttccctacgtcgtcgccgtcgccgcttgtcctctgccgcagcctcatcagtgtcaatgataaggtcaatatcgtgagactgaggacactgtggtcccagggggcaccagccataagcctaggggtgggaaagaggcttagaaagaggctccaggcatcagaaccttccctcccaagaaacaggtgggtgctctcaccgagaagttgtcacagatgctggtgggatgaggacggtgggttgctgggggcaggcagcagcggtaatcaatatggtccctcatgctggaaggatagttgcagaactccagggtaaggtgtgggctgccagctgcccgctgcttcccattttcccgttcactgcaacagcgcaagagggtaatggtccactagcatataagctccataagagcagggttttgtggtctgttttgttcactgctgaatcctcagcacctaaaacactgcctgggcacatggtaggagctcaataaatatcttaagtgaatgaaataaactcgtatcaggccccacccctttccctcaaccatttcctcaccatttccggaaggcatattctaagtaggaggccacgaaacgggcatgaaactcagcagcatatttggtgtcataaatgcctgctgggaacatctcacacaggtcagcggtgaaggttcccagactctcagggaggtgtgcatagaagttctggtacaggaacaccaagtctataaggccattgtgtagcaccaggggccggcgggctcggattagctccaggaatagggtccgtactgactggctctggctctcatcaccctagatgaaagtaaaggggtcaatgaggaggacagagtcccccagggagcctcttctgctgggcacttatcccagacttccccacttggaacgctctctctctaccttacccaatgctgcccaccctcctcataccagtcttgtttcccaagccctgtcactagtgattccccatactccctaagaagcagattctccccagacatccagcctagggtaggaagaaataaagtcacagaaagggcagactcaaggctagggaggctagaggcctaccttgtcattgcccttatggtaggggatgccttgggcatactgctggttgaagttgaagccatgctgtatcaggaactgcacagactttggttctatgacatactcctccatgcacagcagagtgagattgaacacttgagccagataggaatgttcaccctgggagaaagagaagtctgctatatcaagatttcagagagccaagctaggaggatgcaaaagcttaagaatgatacaatggactctggggactcaggggggaaaggatggaggcaggtgagggataaaagactacgcattgggcacagtgtacactgggtgataggtgcaccaaaatctcagaaattgccactaaagaacttactcatttaaccaaacaccacctgttccccataaacctattcaaataaaaaaaaaaaaactatcaagtcaaaaaaaaagatttgggagagaaatgcttcctatctgatgttccctagaatctctctaccctccaccccacagccacacctaggattggggtgagatcagctcataccttgtctggctgccgcttgaagcaggcgaggcccagggaaaggatagaacgggtcctggcagcatgacacacggccttgtaacgttcctcaatgcaccttggggttgggtatgggggttgctgtggctaggagttagccttatgaaggacccaaaccacccaggtctgtgacccccccactccacagttgagggctggcactaaagagaaaagggcttatacttactggttcagcaaactcttcctgtccccaagcccactcagctcctgtgggtaggtaaagggagagttgtgacaggcctctagcaccagccccttcacaaccacctgccctccttgtttcccaactctcaccgtgtccacagccacgaaattagctgtctttatggctagcaggagggatggccacatctccttgaagttgttgctttgcacatccactacgggaacctggactactagctcctccccagatgttgtgcttttgctgacaccacctgggggttaggagggtgatggatgttcatgcttaaggaaagagcccaggggaacagacaccaagctaggccacggtgatggtggtaaggggggtagtttccattggtagcttttcccacaagcctttgtaacccacgtgttctacacacaggccttggagtggagaatgccctgaatttggggagaggaagcctgagtcttctactggcttgtatgagcctgggtaaattacttcccacctcgctttcacaatctgtagaggagaaagttggactagacgacctttgattcttttttcccatgtcctgcaggaaacattttgtagggcttgaggatctcagctcccttaatatcccacagggatccatactactgttctcatggtgccccagcgccacaagcaacagctcccagtaagccccagagcctggcagtgccccacaccagagctcccaatacgtcctaccttcctttggatcacaacgctcaatccactccactgaactgaatcacaactattactactaaccgttatgagctccagactacatctcccgccatgcctccatcagccccatgctcccaacgctccaggcttttgcagccggagccgcggtgtacaacggaacttgtagtctcctcgtggctagttcaggcggaaggagcagtcctctgaagcttgaggagcctctagaactatgagcccgaggccttcccctctcccagagcgcagaggctttgaaggctacctctgggaagccgctcaccgtcggaagctgcgggagctgaaactgcgccatcgtcactgtcggcggccatgacaccgctcgtctcccgcctgagtcgtctgtgggtacgctggacttgcggtccgtctcctggcgcggttcaggcagtcggggatggggcggggtctcgccgtcgggtcgccgatgggtcgaacttccgttcagacgtcccgggtccggcgcggggaaggcagcctggcgcgcgctaattgcctattggcctgtgctgccggctcgcagcccgggtggacccgagccacgccccctggagtgcgccggaaagccgggcgcgctagagctcgcgggaggtaatctttctctcctgctctcgcggcgggaacgcggggcctccgtgttctgctgtcttcatcagcgtgggccgcgggtagcgggtagtggggtggctgggtttgggctttccagagaaggtgacgctgcctgagctgagcttaaagcacgcccaggagttagactaggagagggtcgtgtgggggaaagaagggcgttctgggcatcggtaaattcccagagaggatggagagctcagtgatctccagaaagtgaaagaggcggggagtgggccatcggaggaggctgcccagggtgtaagagcgaccgattggtagggaagcttttgtaataatccaatcaagtgataatgtgaacttgaattaaggctggcagtatggatggcgaggaagggacaaattgtgaagcagctaggcggtatagtcgacctagagggtgattgaatttgaaagaggttcctaggccgggcgcggtggctcacgcctgtaatcccagcactttgggaggccgaggcgggcggattacctgaggtccggagttcaaaaccagcctggccaacatggtgaaaccccgtctctactaaaagtacaaaaaaaattagctgggtatggtgcgggcgcctgtaatcccactacttgggaggctgaggcaggagaatcgcttgaacctgggaggcagaggttgcggtgagccgagatcacgccattttgcacttcagcctaggcaacaagagcgaaactccgtctcaaaaaaaaaaaaaaaaaaaaaattcctattggagactagtccctccgtaaacactacgattcccatccacctctgccttccagtgctcctttgttactcattgtttatagttaatcttcagcttctctcaactgagcccatttcatcattattcagaactgcttgggccgggcgcagtggcttatggcctgtaatcatcttaggaggccaaggtgggaggatcgcttgaccctaggagttcaagactagcctgggcaacatagtgaaaccttgtctctacaaaaagaaaattaaaaattagttgggcatggtggtgcgcacctgtagtcccagctacaggag

SEQ ID NO: 3150 - DNA, 6000 bp, Homo sapiens
cgacttgttctttcaaatccacgaccagcattcttatactgtgataaaatgcagtccctgctaagcctctgtatcaaactctccccccaaacctttgactttaccacctcattttcatcaaaagagcttgcctcctccttcagaaaaaaaaaaaccaacttcaaatctacctccatttgcactgtcttaccctcctcctcttcagggtcctgctcctccaatcccgtctaactgttggaactcagaaactaataccccaggccaggcacggtggctcatgcctgtaatcccaacactgcgggaggctaaggcaggcagatcacttgaggccaggagttcgagaccagcctggccaacatggcgaaaccccatctctactaaaaatccaaaaaaattagccagacgtgctcgcttgaacccaggaggcagagcttgcagtgagctgagatcatgccactgcacagcctgggcaacaaagacagagcaagactctgtctcaaaaaaaaagaaaagaaaagaaaccaataccccaaaatatggccctctgacatgctgaactcaagaagccgcaaggtctctctgatccttccaccccagactctcccaaagccaggataaagttgttctctggaactctttatctgcctaaagtccaaactcactaaaaagaatacttgttttttcttcccctcccaataagactaacatgtaaccacacctgaacaaaccctttcacaggtattgtgtacctcaggatcactcaaattccaaagagaactattaacaagtcaacctctgtccccattccattctctctagtaatcctttattgcccttcaacagaatctccttctggccaaagttcggtttatttaaaaacaaatagagctggacatgctggctcaggcctgtaatcccagcactttgggaggccaaggcaggaggattacttgagcccaggagttcgagattaggcttgcaacatagcaagaccccgtctctacaaaaacagaaaaacagaatttctcttctaccccttgtcaggcctctgagcccaagctaagccatcatatcctcagtaacctgcacttatacatccagatggcctgaagcaactgaagatctacaaaagaagtgaaaatagccttaactgatcacattccaccactgtgatttgtttctgccccacgctaactgatcaatgtacttggtaatctcccccccacccttaagaaggttctttataatctccccacccttgagaatgtactttgtgagatccaccccctgcccccaaaacattgctcttaactccaatgcctatcccaaaacctataagaactaatgataattccaccaccctttgctgactcctttttttcagactcagcctgtctgcacccaggtgaaataaacagccttgttgctcagacaaagcctgtttggtggtctcttcacatggacacacgtgagacacccctcccataatctgttttgccagatggtatataaactcacgaactctgtagggagatgggtaatcactttatggttctcccaatgtgcatgttaataaatttgtatgccttttctccagttaacctgccttttgtgagctgatttttcagcagatcttcagagggcaaagggaaagattttccccttggctcgtaacacaatcaaatcccaccctccttcccttcatagccaaacttccttcaccaaacctgcttacttccacattcattctacaatctattctccaaagagcaaaggaatcttttccagatcacgtcacttccttccttataaccttcaatggtttcccattcttttttttttttttgggatggggtctcactctgtcacccaggctggagtgcagtggtgtgatcttggctcactgcaacctctgcttcctcggctcaagcaatcctcccaccccaataccccaccccaactccaagcagctgggaccacaggcgcacaccaccaccacatccagctaatttttgtatttttgttagagacagggtttcaccatgttgcccaggctagtctccacctccagagctcaagcaatcaacccgcctcggcctcccaaagtgctgggatacaggcatgagccacggcgcctggtgacaccccattatattcttttattttctttcttttctctttttttctccctccctctttccttccttccttttttcctttttctttcttttttaaatactgtaggcctttactatgggtcattaaattcttgagcaagctggttgtggtggctcaacactgtaatcctgctactctggaggctgaagtgaagaacagcttgagcccagaaggtcgaggctgcagtgagctatgattgtgccactgcactccaccctgggctcagcaagaccttgtctcttaaagaaaaaaaaagattgagcaaatatttatagagccccctaatatgtgccaagcagttttaggcacttggcatacttcagtaaataaaacatcaaaagttcctgccctcagggagcttatattctaatggggacagaaaaggaataatgaacataagtaaattccataagatgttaggtgataaatattagcataaaaagcaaaaattagaccaagaggggaaaaaaaagagtgccaaggtggggtttaatgttgcaattttaaagactgtggtcaaggtagacccaaagcattctaagtgagtgcaaaggccccaaggagggtgcctggtatgtctgtggtacagtaagtaggtcaatgtggttagaatggaatgagatgggactgagtggtagaagaggtcagagaagtaaaccagatgaggtggggagaggagggtcacaaagtaccttataggccattggagggatttggctgccacacccttgctcttagaaggcagtcctcttactacagccttgcaggtccagtgatccgggcaccatccgcctcatcccctcactatgctctagccaaggttgactgaatttagttgcttaaacacctcaagtgtgtctgcccaccttggggcctcacacaatccatttcctctgtttggactcttttatgcttttacctaacaccttatcatttttcaagtcttgactgaaatgtccaaatcaggtcccctcatcttatcctatcacatatttctgccttgtagctcttacctaatgtaattttacattactttgattctttccatcagtgtgtacttcctgaatttgactgtaaaaaacgacttgagtgcaaggactgattctcttgttgattggtgtgtgtccaaagtcagtgccaggtaaactgtacacaatagatacctgttaaatgaattaatgggatgggggatagtcaaaagagtttcccttttttaggataggagaaatccaaagagtttttttatttttgttttttttttgtttgtttgttttgtttttagagacagtgtgtccctcactttgctgctctgccactcaggctggagtgcaataagaacatggctcactgcagcctcgacctcctgggctcaagccatcctctcacctcagcctcctgtagctgggactacaggtgcgcaccaccatgcccaactaatttttaattttctttttgtagagacaaggtttcactatgttgcccaggctagtcttgaactcctagggtcaagcgatcctcccaccttggcctcctaagatgattacaggccataagccactgcgcccggcccaagcagttctgaataatgatgaaatgggctcagttgagagaagctgaagattaactataaacaatgagtaacaaaggagcactggaaggcagaggtggatgggaatcgtagtgtttacggagggactagtctccaataggaattttttttttttttttttttttgagacggagtttcgctcttgttgcctaggctgaagtgcaaaatggcgtgatctcggctcaccgcaacctctgcctcccaggttcaagcgattctcctgcctcagcctcccaagtagtgggattacaggcgcccgcaccatacccagctaattttttttgtacttttagtagagacggggtttcaccatgttggccaggctggttttgaactccggacctcaggtaatccgcccgcctcggcctcccaaagtgctgggattacaggcgtgagccaccgcgcccggcctaggaacctctttcaaattcaatcaccctctaggtcgactataccgcctagctgcttcacaatttgtcccttcctcgccatccatactgccagccttaattcaagttcacattatcacttgattggattattacaaaagcttccctaccaatcggtcgctcttacaccctgggcagcctcctccgatggcccactccccgcctctttcactttctggagatcactgagctctccatcctctctgggaatttaccgatgcccagaacgcccttctttcccccacacgaccctctcctagtctaactcctgggcgtgctttaagctcagctcaggcagcgtcaccttctctggaaagcccaaacccagccaccccactacccgctacccgcggcccacgctgatgaagacagcagaacacggaggccccgcgttcccgccgcgagagcaggagagaaagattacctcccgcgagctctagcgcgcccggctttccggcgcactccagggggcgtggctcgggtccacccgggctgcgagccggcagcacaggccaataggcaattagcgcgcgccaggctgccttccccgcgccggacccgggacgtctgaacggaagttcgacccatcggcgacccgacggcgagaccccgccccatccccgactgcctgaaccgcgccaggagacggaccgcaagtccagcgtacccacagacgactcaggcgggagacgagcggtgtcatggccgccgacagtgacgatggcgcagtttcagctcccgcagcttccgacggtgagcggcttcccagaggtagccttcaaagcctctgcgctctgggagaggggaaggcctcgggctcatagttctagaggctcctcaagcttcagaggactgctccttccgcctgaactagccacgaggagactacaagttccgttgtacaccgcggctccggctgcaaaagcctggagcgttgggagcatggggctgatggaggcatggcgggagatgtagtctggagctcataacggttagtagtaatagttgtgattcagttcagtggagtggattgagcgttgtgatccaaaggaaggtaggacgtattgggagctctggtgtggggcactgccaggctctggggcttactgggagctgttgcttgtggcgctggggcaccatgagaacagtagtatggatccctgtgggatattaagggagctgagatcctcaagccctacaaaatgtttcctgcaggacatgggaaaaaagaatcaaaggtcgtctagtccaactttctcctctacagattgtgaaagcgaggtgggaagtaatttacccaggctcatacaagccagtagaagactcaggcttcctctccccaaattcagggcattctccactccaaggcctgtgtgtagaacacgtgggttacaaaggcttgtgggaaaagctaccaatggaaactaccccccttaccaccatcaccgtggcctagcttggtgtctgttcccctgggctctttccttaagcatgaacatccatcaccctcctaacccccaggtggtgtcagcaaaagcacaacatctggggaggagctagtagtccaggttcccgtagtggatgtgcaaagcaacaacttcaaggagatgtggccatccctcctgctagccataaagacagctaatttcgtggctgtggacacggtgagagttgggaaacaaggagggcaggtggttgtgaaggggctggtgctagaggcctgtcacaactctccctttacctacccacaggagctgagtgggc

SEQ ID NO: 3151 - DNA, 6000 bp, Homo sapiens
tggtgctgcccgcacccccaaagtcaacccttttagtgctcgccaggacctcatggggggcaagatcaagttttttgacctgcccagcaagtctgtcatctctctggtatttgacctggatgcaccagggcccggaactatgcccctggctgactggcaggagcccctggccccacctattcgccggtggcgttccttgcctggttcgcctgagttcttgcatcaagaggcttgtccatttgtgggccgggaagaatcgctatctgatgggcccccaccacgcctaagtagtctcaagtacagagttaaagagatcccaccattccgggcatctgccctaccagctgctcaagcccatgaggctatggactgctccattctccaggaagaaaatggttttgggtccaggccccaggggaccagtccatgccctgcgggtgcttctgaggagatggaggtagaagaaaggccagcaggctcaactccagccaccttctccacctcaggcataggcctgcaaacccagggaaagcaggatgggtgagggggtttagtccctgcctcaccttggggatggaccttcagctgaaaccatatggccccctaggtgcacagccttgattcttccctggagcctacagagcaggcaggctaggccaagccaggctcaacttctgggctcccagtgcccattggctgtgtatgacgggaggcagcagtgagaggccttcctagttagggccaacagctgataccaagcctctgaaatccagcaaggaggtctgcctcccaccagaccctctccagtgtacttccccagataggaccagaggatgtctagttctaggctgagctggcaggcagctattaccccggttctttccccaccccaggtctgtctcttgccttttcttggggcatataagctactgagtggaacatggagctgatcaagaggccgtaatggtcatggctgtttcccagacctgaatattggggtgcttcttgccagtattctaagacatttgagtaattgctgtttgcacttactgcatggtcagaccacgtcactacatttctatgcaaggggacagcaaggcagcgtggtggtcatggctcttagctaacctattcaaagaccttttcctgttgattaatctattttcatatttataaaggagtcttaatgttctgccccataagactttcaaccttgtggttgggagtggggctggttttgtaggccctagggcctgcttctatgtatttatcaacatgtgatacattcaattggttaaatggtttatacagggactgatttgcttcccttcctgccatggctggagctttgggaacagtctgtccttacagagctgcaataagaaataaccaaagatgaagctggtcaaatattttcataacttgcttctgttgatttttttttttgtaaaactttcccaagacattttcagacttaaaaataaagtcagtgttacaggtgctggtcagccttcttacttgtacctcaaacactgggataaaggaggcggtccagggcaatgcagtgatgtctgtcaagacattccccctcccctaaactcagtagcagttgaggatgacatttcaggctagagagacccaaaatacctctgttccacctgagagcaaggtggaagttgcatcagctactgccccaagtgagcttcatcttctgattgtgggctttggaggaacgagagaactggctcttggccactgtgaggggtacagctttgccactcaaatataccttattgtggcattcagggagccagggtccagagctgcagggctgcggtccctggctcacttccacataggccatcacataacctgtcataaaggcatcaaaaccagcccggtgcaatccatccccaggcactgggttaggactggcttggctccctggcacttctgaggtagctctatcagctatttcaggccttgctgccttaatccccatctctaagtcatttttgttgccttgcttggagtgaggcaggttcctagtttcatcggcagccacctcctgctcggtttcttcaggcttgatgctatccccacagacctgcttcttgggaggaccatccttagcttccccagaggtctgtgtccccggtaggttcaataaagccctcttccgtttttccctacgtcgtcgccgtcgccgcttgtcctctgccgcagcctcatcagtgtcaatgataaggtcaatatcgtgagactgaggacactgtggtcccagggggcaccagccataagcctaggggtgggaaagaggcttagaaagaggctccaggcatcagaaccttccctcccaagaaacaggtgggtgctctcaccgagaagttgtcacagatgctggtgggatgaggacggtgggttgctgggggcaggcagcagcggtaatcaatatggtccctcatgctggaaggatagttgcagaactccagggtaaggtgtgggctgccagctgcccgctgcttcccattttcccgttcactgcaacagcgcaagagggtaatggtccactagcatataagctccataagagcagggttttgtggtctgttttgttcactgctgaatcctcagcacctaaaacactgcctgggcacatggtaggagctcaataaatatcttaagtgaatgaaataaactcgtatcaggccccacccctttccctcaaccatttcctcaccatttccggaaggcatattctaagtaggaggccacgaaacgggcatgaaactcagcagcatatttggtgtcataaatgcctgctgggaacatctcacacaggtcagcggtgaaggttcccagactctcagggaggtgtgcatagaagttctggtacaggaacaccaagtctataaggccattgtgtagcaccaggggccggcgggctcggattagctccaggaatagggtccgtactgactggctctggctctcatcaccctagatgaaagtaaaggggtcaatgaggaggacagagtcccccagggagcctcttctgctgggcacttatcccagacttccccacttggaacgctctctctctaccttacccaatgctgcccaccctcctcataccagtcttgtttcccaagccctgtcactagtgattccccatactccctaagaagcagattctccccagacatccagcctagggtaggaagaaataaagtcacagaaagggcagactcaaggctagggaggctagaggcctaccttgtcattgcccttatggtaggggatgccttgggcatactgctggttgaagttgaagccatgctgtatcaggaactgcacagactttggttctatgacatactcctccatgcacagcagagtgagattgaacacttgagccagataggaatgttcaccctgggagaaagagaagtctgctatatcaagatttcagagagccaagctaggaggatgcaaaagcttaagaatgatacaatggactctggggactcaggggggaaaggatggaggcaggtgagggataaaagactacgcattgggcacagtgtacactgggtgataggtgcaccaaaatctcagaaattgccactaaagaacttactcatttaaccaaacaccacctgttccccataaacctattcaaataaaaaaaaaaaaactatcaagtcaaaaaaaaagatttgggagagaaatgcttcctatctgatgttccctagaatctctctaccctccaccccacagccacacctaggattggggtgagatcagctcataccttgtctggctgccgcttgaagcaggcgaggcccagggaaaggatagaacgggtcctggcagcatgacacacggccttgtaacgttcctcaatgcaccttggggttgggtatgggggttgctgtggctaggagttagccttatgaaggacccaaaccacccaggtctgtgacccccccactccacagttgagggctggcactaaagagaaaagggcttatacttactggttcagcaaactcttcctgtccccaagcccactcagctcctgtgggtaggtaaagggagagttgtgacaggcctctagcaccagccccttcacaaccacctgccctccttgtttcccaactctcaccgtgtccacagccacgaaattagctgtctttatggctagcaggagggatggccacatctccttgaagttgttgctttgcacatccactacgggaacctggactactagctcctccccagatgttgtgcttttgctgacaccacctgggggttaggagggtgatggatgttcatgcttaaggaaagagcccaggggaacagacaccaagctaggccacggtgatggtggtaaggggggtagtttccattggtagcttttcccacaagcctttgtaacccacgtgttctacacacaggccttggagtggagaatgccctgaatttggggagaggaagcctgagtcttctactggcttgtatgagcctgggtaaattacttcccacctcgctttcacaatctgtagaggagaaagttggactagacgacctttgattcttttttcccatgtcctgcaggaaacattttgtagggcttgaggatctcagctcccttaatatcccacagggatccatactactgttctcatggtgccccagcgccacaagcaacagctcccagtaagccccagagcctggcagtgccccacaccagagctcccaatacgtcctaccttcctttggatcacaacgctcaatccactccactgaactgaatcacaactattactactaaccgttatgagctccagactacatctcccgccatgcctccatcagccccatgctcccaacgctccaggcttttgcagccggagccgcggtgtacaacggaacttgtagtctcctcgtggctagttcaggcggaaggagcagtcctctgaagcttgaggagcctctagaactatgagcccgaggccttcccctctcccagagcgcagaggctttgaaggctacctctgggaagccgctcaccgtcggaagctgcgggagctgaaactgcgccatcgtcactgtcggcggccatgacaccgctcgtctcccgcctgagtcgtctgtgggtacgctggacttgcggtccgtctcctggcgcggttcaggcagtcggggatggggcggggtctcgccgtcgggtcgccgatgggtcgaacttccgttcagacgtcccgggtccggcgcggggaaggcagcctggcgcgcgctaattgcctattggcctgtgctgccggctcgcagcccgggtggacccgagccacgccccctggagtgcgccggaaagccgggcgcgctagagctcgcgggaggtaatctttctctcctgctctcgcggcgggaacgcggggcctccgtgttctgctgtcttcatcagcgtgggccgcgggtagcgggtagtggggtggctgggtttgggctttccagagaaggtgacgctgcctgagctgagcttaaagcacgcccaggagttagactaggagagggtcgtgtgggggaaagaagggcgttctgggcatcggtaaattcccagagaggatggagagctcagtgatctccagaaagtgaaagaggcggggagtgggccatcggaggaggctgcccagggtgtaagagcgaccgattggtagggaagcttttgtaataatccaatcaagtgataatgtgaacttgaattaaggctggcagtatggatggcgaggaagggacaaattgtgaagcagctaggcggtatagtcgacctagagggtgattgaatttgaaagaggttcctaggccgggcgcggtggctcacgcctgtaatcccagcactttgggaggccgaggcgggcggattacctgaggtccggagttcaaaaccagcctggccaacatggtgaaaccccgtctctactaaaagtacaa

SEQ ID NO: 3152 - DNA, 6000 bp, Homo sapiens
ttcatgtttcaaagattccttccaggttagaatttgaattttaagtaccacagtcccaggaatgagacacttatttttcatttttattttttagctttagttttagtatgaggataatgctggcttaataaaatgtgttgggaagtgtttcctcttcttttttttaacccttaattcttggtttggatcttcttctattttttggaagagtttgtgaagggttggtaaaggatttttttttaaacatttggtagaatttacccatgaagccatctggtcctgggctttttatctgtgggaagtttttgattacaaattccatctcttggtataggtctattcagactttctatttcttcttgattcagttttggttgtttgtctttctaggtattaggtttgttttcatccaaaaaaatttaatctaattttttggcatataattgttcatagaattcccttttatcctttttatctttgtaaggttggtggtaatgtctccttttatttctgattttagtaatttgaggctttcatccgtttttctttatcagtctagctaaaggttgtcaattttgttgatcctgtcaaagaagcaacttttgttttattgattttctctattcttctgctttccattaatttctgctctaatctttatttccttctttctgctcattttgaattcagtttgctcttctttttctagtatcctaaggtggaaatcttgattattgatttgaagagagtttctttttagattgcaactagaggtggtgattacagtccttgaaatgttgtcagatgattgtttaagcaaaaatatggttatgaggtagaattcactttttggaattttcttaggggagaaaaaccctgttggtgcaatagatattcaaaactgaacatgagtcaataacattatgtcatcattaaaaaaataagaacagagttgagcacacaaatgaaaccagtaggaaacgcccattctcaacactggtcaaattttggagtgttctgttcaactctcaagagttcagataaggccaggtgcagtggctcatgcctgtaatcccagcactttgggaggccgaggcaggcggatcatgaggtcaggagatcgagaccatcctggctaacacagtgaaaccccatctctactaaaaatacaaaaaaattagccgggagtggttgcgggcgcctgtggtcccagctactggggaggctgaggcaggagaatggcataaacctgggaggcggagcttgcagtgagctgagatcacgccactgcactccagtctgggcgacagagcgagactccgtctcaaaaaaaaaaaaaaaaaaaaaaaaagagttcagataaatcacattgcaaatttttaaagatttatttgactgtgacaacctcctgtttaaaactgcacattcttacagctatttaccatataagataactcttaagaactggagatagtcagctcccctgggttaatttgaagcagaagagggcagttgttatactgccctgtcagttggatgcggagtcttactcaaaattcattctcagcattcttcttttatggtatcttctttggcacttagcagcgcatcaggtaggcatcttctatttttcttcattccttaatttcctttgtatccctcaaatggttatttatttggctggagtctgttttgttcattaagcaaacatgtctttgctttgaacatgtctttgatttgatggatacttaaattcctcatcaaacattttgttgctatgcataacgttttctttggccaactccagcaatttcccacattttgacatgcaatcatgttaactcccattttcttttgtaatccaacatcttctatttagataattactttaacaatcaatgacttaatattctaatcataaatttatacaaaaataaaattacctccaaaacattgctacctttcctaaacattcagtcttgccacagtttaataaaaggaaagaacattaaaaaggataagacactgtaatgattagatgctttttataagcctaaaggcattgtgattatttagacagaagagaagaaagtgaagtgaaaacctgatagttatgtagtctcatggtttgctgttgagaggctgaacaccagctgctttccttttctaggaagataataaagtgggctttggctacaacataaagatgttgggttagacagtttcactacagtaagaacaacgggatgagttgcccaggaaattgtgaaatactttctaatgatctttaaagatataatgaacactaattcatctggatttgtttacgtgtggtcctggttaaaggcaaagggaaggatcagataacttcatgttttttccatttaacatacccaatagattcttgattaggggaagggaaaatgagcaagatacagtccagtattctaaaaacaatcagccttaggggatcatttcaaaagcatctgttttggacttaagtctttgatacttaaccaaattgactacacagtgaaaaattctagtgcctgggttttatagggtagaagaaagacatgcagtcaagtggccaatacttcatgtgaagataagcaatgagatccttcttgctgtctttcttttgactgttctgggcaatatcaaattagtttcagtggcttgattctaggccaagattctggcaacagattgtagtcttaccttgttttcttcaatctcactggatctctctctctttttaccccccttaggctgagggtaaaaagctgggattggtaggctgggtccagaacactgaccggggcacagtgcaaggacaattgcaaggtcccatctccaaggtgcgtcatatgcaggaatggcttgaaacaagaggaagtcctaaatcacacatcgacaaagcaaacttcaacaatgaaaaagtcatcttgaagttggattactcagacttccaaattgtaaaataatggcctgaatttaagttttctaagataaactcagtggtttggtttttattattaatagagatagaactattgtgtgttaatattagcattagtcaataagttattttaatgtcagatttttgaatgttattatatattacctgtatgatggaaggattaccactgtacacaaatctaatcaataaaaacgttagaaccttctgcttagagtacttttaaaaaatcttcagtgaacttccttttgggcgaaatgagaggtctttattcagtaaacatttgtaggaagaggattttgaggtaatttaaagaggtctgaaagaaaaaaagtctgagtcatttctttaaatggtttctatgaaatgttcttcaagaaattccatgcctaataagaacaaataccacaagttcaatttgttagctctgttcaccttatgtttggatgaattacttctgctgttgtttcttttctctgggtaaggaattcacataaagttatgttatgggctgaactgtgtcccaccaaattcatatgttaaagtctcagtccccagtacctcagaaagtgactgtatttggacatagggcctttaaagaggtgattaagattaaatgaggctgtgagggtgggccctaatccaatctgactggtgttcttataagagaacatattggctatagacacgtgtgcaaaaatcaaagaccctgtgaaaatggccatctacaagccaaggagagaggcctcaggagaaatcgttgctgccaacaccttgatctcagacttccagtctctagaactgagaggaaatagacttctgctgcttaagctactcagtctgaggtattttgttatggcagccctaggtatagtaataatcataaacagttatcaggattttgcttaatcagccctagaagactggttggttgggtttggttagtcactaaactagcatatatcaaatgcttaccaggtctgacaaattcgttataaattccactttaaattctcaatgaaaatgagatagaaagcaaaaactaaggactggttaacaattccaaaacactttattctcacagcattctcagagttctgctctcctttagttatttttataactaaaagctgtggtggcactggggagattcaagtcagtgaagagagtcttggtgttgtcatctgtaaattaagagttgagcaaaggccgggtgcggtggctcacgcctgtaatcccaacactttgggaggccgaggcgggcagatcacctgaggtccggagttcgagaccagcctgaccaacatggagaaacccccgtctctactaaaaatacaaaattagccgagtgtggtggcgcatgcctgtaatcctagctactcgggaggctgaggcaggagaatcacttgaaccctggaggcggaggttgcagtaagctgagatcgcaccactgaattccagcctgggcaacaagagctaaactccgtctcaaaaaaaaaaaaaaaaaaaaaaagagttgagttagacagtttctcagccttttccagctccaaatgccataattctaagatggcaggctctggaattattcattcattcggtgcctaccataggccaggcactgttcttggtaactgggatacagcagtaaacaaaatatataaactccttaccttcacatagcttacattctagggagagaagacaataagtaaacacataaaatatatattgaattaaacggtagttaagagcaaaggtgaaaatgagaaaaaaaaggaaagggaaaacacgggaaaaaaaaataaaaacaaaagtaaaagctacgacatagtctttaacaccatgccaaaagggaataaggattgagactgtaggtaccggttcactgaaccctgggatgcggatccttggctggaacaactggtgcgcatgcgcactggtgtctcgcggcctggcgcgccccctccgaagcgcatgctcgtgggcacgcacgagcctcaagatccaaggtgcgcgcgtcggcgtccgaggcggttggtgtcggagaatttgttaagcgggactccaggtgactctgggggaagcacgcgacgaaaagatgatgccggggtctcttctaacaccagaagggccctgatgatggctgcgcgcagctttcggagccggatgcgcgagggccccggaggcccggcggcctggcggccgggcgggcccagtttggggacaaggacggggctggccagggaggggctgggcctggcgggaaggcagcgctgccccggactcggcccgcgcggccctcccaggcccccgtgccctggatccaggcccgtgcgtcccgtcagtcccaggcgctgggaggcgtcatcaggaaatcattgggtttacattaatcggaatacttgttaaacgtttacccgtcagttgctgccggctgcttagtgcattagcttagaaagcagcagaaattctgcagttaagagccctgatttgtcccgagtttggaaaaccggccccaccgcctgcaggggcccacccacgtggctctcactgatggagaagaaggggagacctttaatggcactggaatcttagggtttggttttttttgttttgttttttgtttttgtgttttcacttgcaggaaaacttaaaatcaagttcaggcagccccatgccatcattattattaccaaggtagtttatgcccatctgtaaagaccaaaagaatattaataatgaccttctggccgggcgcggtggttcacacctgtaatcccagcactttgggaggccaaggcgggaggatcacttgagttcaggagttcgagaccaggctggttaacatggtgaaaccccatctctacataagagacaaaaattagccaggcatggtggcgagcgcctgtaatcccagctactcgggaggctaaggctggaggattgcttgagcccgggaggtgcaggctgcagtgagccgagattgtgtcattgcactccagcctgggtgacagagt

SEQ ID NO: 3153 - DNA, 6000 bp, Homo sapiens
cataacattcacacaaattagtgctgtcacaagcaaaaggcacctctgcacttttccaaagcttcagaattacctcgatctaagggacagatctgcactgtccaatatggtagccatcagtcatatgtagcttactgaacactagagcactagaaacgtgggtagtccaaattgagatgtgctaatacacactcaatttccaactcagcattaataaaaatcatatcaattttttacattgattataggatgaaatgattttatcctatttggatacactagattacataaaatatattattaaaactaaccttttaaaaaatctgtttaatgtgactactagaaaatttaaaatgatagatgtggcttatagttccattgaacagtgctggatagagcagtggttaaaatggcaggctctgaaatcacactactttggttttatcctagctcttacactaacagatatgtaacactgaggaaattaaactctctaaaatgcaatcacctaatctataaaatggatctaataatgatatcatatgattgtggtgagaagtaaataaagtagtatatataaataatgtattacagtgtttggcatataagtgctaaaaacatcccaggatactgggactaaactgagctcctctaaacccctaaatgaacaatccccccacctctaacccctaccccaaaggggctcacacattaggcctgggttcaagaagtcttccacctcagctaggaaatcccaaggatctaagaaaaacactgatcaacaaaactttggggtataaacttagactgactccttctgagcagtcttaatctcatcatctttgtctcgtttcctataatacctcatctcctacaatgccaaatccaagatcttttttttttaaatctctataattgcatcccaatattcctcattcttctagtttactaagatcatggcaattcatagcatgaattctgtcacactttatctaccccatcccattgcatcctctggtcttaagatgtctgcatctcttttcatactcttcttccatgtcatgtcatctttcttctctcctaattgctacagtctgaatatttgtgtctctaccaaattcataagcatatgatatctgtattgtctccattttatagattagctgattgagttttagaaagtttaatttcctcagtatcatatagctgttagtaagagctaggataaaaccaaagtagcgtgatttcagagcctgccattttaaccagtactctatccagcactgttcaacagaactataatgtacatacatcatttaaaattttctagtactcacattaaaaaagctaaaaaaaaaataaaaaagtgaagttaatcttaattacgtatttggataatctaatatattcaaaatatcaaatatcattttgtcctataatcaatgtaagataactgtaaagattaaattaattaaattgtataattaaacctactacatctttgtcctgaactgtaaaactttttttttcctgctgtacaacttttgaatgtaggaaattatgtattatgtatctctggatgccaggcagaacaatcaaatgcttcacccatggcaagcccttcacttcatgaatattaatgaaggaccactaaatataatttatcagcatctttcttatgctaacgcaaacattagaaaaagtatcctccttccctttatatacataatttcaattggcttccacaccatcctccagctcacctgtatctcacactttttttctggactttagggccttacttccatctaccttctaaatatcatcatttagatgacctgaaggcaacctaaacataacatgtcccaaactgatcagagaatctttctctttcttttttttgagacagagtttcaggtttcgctcttgttgcccaggctgaaatgcaatggcacaatctccgctcactgcagcctccacctcccgggttcaagcgattctcctgcctcagcctcccgagtagctgggattacaggtgcccgccaccacacctggctaattttttgtatttttagtagagccaaggtttcaccatgttggccaggctggtctcaaactcctgacctcaggtgatccgcccgcctcggcctcccaaagtgctgggattacaggcgtgagccaccacgactggcctctaatcaactttcttcctatatttcttgtttgataataaaagtaatagccaacatgagaattttatatatattatcctatttaatcctcacaacaactctacgtattctatcatcctttatcaccaaataggatttaaaggcatggtaacttgctcaagatcacaaaactattaagtggcagatgcacaccttggcatgtttgactccaaaggccatgctctcaaacaccttccatccaagcacataaagcaaaattagaaaccttgaagtcatcctagaaattctactcgctctctacatcctgccacccagtcatctctctcctactatctaaatgtttcccaaactagtcctctcctctttgtactgcctccattcggcctttctctcctgaactactgcaataaccacctaattgatattttgactcgaatctcaaccacctatagggttctttctgtatttaaatttcatcatgttgctgccccacttaaaatttttataaaggtttccaattgccaaccaggttaagtacaaacttcttaacaactggatttttgcctcctctcccagtcatcccatcgttgcccaaatgtgctctagggcgatcatactgcacagctcgtctttttttattttttattttttgtgacagggtctcactttgttgcccaggccagagtgcagcgattttggctcactgcaacctctgcctcccaggttcaagcaattctcctgtcccagccctgcaagtagctgggattacaggagcgcactaccacgcccggctaattttcgtatttttagtagagacagggtttcaccatgttggccaggctggtctcgaactcctgacctcaggtgatccgcccgccttggcctcccaaagtgctgggattacaggtgtgagccaccgtgcccagccaacttgtctctcttaacatggtgacactcactccttcctcagctcacatggttctctctcagctgacttctaatcatccttccagatttagttcagtatcaactcttcaagcctttcttccctgctgcagcctcctttccttcacctgccaacagattaggtattccttcccctgcagtccccctttacctcatttctaattaacctcatcacaagttactctattaatatgtgtttctgtctgttgctcctgactcagagttctttgaggacaggggttttatatcaatcacacatcgctagcatagcccctggaatatagcactctataccatatgtgtaccaaatggaagggtttatatcgggcttacaaatcacagcaaagaatgtctgggaatatcaggatagtcagtcttccatatttgctgggagggaaaaggaacacttctgaagaagtgctgatgacccggaaagtcagttaaggacaacaggtgtgcctaaaaaagaagtaaagatcagagaactcacagacttccattagagagaacacaaagaaatcatttatttaaagatcagactaaatccaaaacaattaggttcacaaagccaacagaaatgcaagatacagacatacacagccaacattctcttaagtcaatttcaaaatgttgaaagctatttcggcaataaaaatcacaaactttctgcactgccaaggtgagggaaattacatttcaaaggcgattccaaaaaaacctaatcaagactttcctcaggatcaatttttggtattcacatttccttagcatgtaatacaggtgcctgtcttcggcgtacggataaacccagaaggccaagagcaaaaatcgtgattaactttaaagagtttaacttgcaccccttgtatgatgccacaggatacaatactataaaccgccactcacacaagatgagttacagttgccatgggttaaatctgctgcctggaaaacaaattttaagtcctccacccagaagggtctggggaatgggacgcaacaaagaccaagccagaacaccccggagcccagacctgctcagaaaacgcgttccacgtgtgcgcgcccgcaagcccggcttcgcttcccgccccgcggggagcgcccttagctgccctatagcgttcgcgcccggaccaggacgagtagaggggacggggccctcgagccatcgaggatataataaatacccgttagtcacaccacactaccttcctgctagcgcgaggcaggcaattaccatccactagccgcaagcagccagcgtctcacccgatgcgcaggcccaaccccgcacccgcacccgcacccagcacgcacgcgcgcggcagagcgggtgcagagagcgcggcactgagtcccgcctcgcccgggggcaacgtgagattggcgctgctcgcagccaatccgctggcagcgagtctgtccgggaaagcttccgcaagctgcgcagcgccgggcctgagggcgtgtatccgcggccgtagcagccgggctggtcctgctgcgagccggcggcccggagtggggcggcgggtaagtgggcacgaacgcggtggacgctgtacagtcgccttcgtcggtagggaactgctggcggcctaggggtcgtcctgagagggaaaagcgggctccggctgcatctgcggcgccctgcgtggccgtaagagccaagtggcctcagaggctcgccccctacgcaaatcctcgttgtcttgccagggtcctgacgtgacgtgcggccgcgagaaggaaggggcgggttgggggaggcgctgaggtggtagcagcggcggcttttgctgagttttctctggcccagagcgctcgggctgtcggtctagcaggggggactcccctgaggggccgctgcgggtcgccgtcttcggaggcaccggcgagggcagagccaacagcctcttcacggtctgtaaggtcattgtttgccagtcgtgggcagcgcggcaaacctgctgggaaaaggttttctggttggaataggatgagtaccgcaccagctttgccttccagctgagatgtaaatttcaggcctccatcctgtggaacgtgggaaaactatcttgagtgttggcatgttctaagtatgacataatagtttaatgtatgataaatcatgggtgtttagacgaaagatttacacatataaattggaggctttagcggtcttagtgtaactaacttttcgtccccttaacccttgatgcctgttctatgggtctctagagcggaaggagcattatactccggaaacatttgctggaaggggttatgagaaattcctctctgtatgctaactccgtaatacaagcgtttgtgtattttaaaatcacagctgttccaaatataatctagcctcgttttccccctccgtcggatgataggtgttcttcaggacagttttattttaagcaattcttagtctcaagtaaacaccatcattaaaagaactgagaactattatcaattcttcctttggagtccatcttcaatggaaaggagaagggaaaaccttttttaaaaagaagaaagaaaactgaagtttttgatttgactagagaaatattcagaagactccttattttcacctagtttaatcacaaaattgagaaacaaacattatcccttgaccatgtaaattttacaccacattatgtcaacagcatgtaccttccacattgagtattcagaaagaagtgatctgaactctgaccattctttatggatacattaagtcaaatataagagtctgactacttgacacactggctcggtgagttctgctttttctttttaatataaatttattatgttggtaaattta

SEQ ID NO: 3154 - DNA, 6000 bp, Homo sapiens
atgccactgcactccagcctgggtaacagagtgagaccctgtctctgtaagaaaaacaaaatggctgggcatgctggctcatgcctgtaatcccagcacttttggaggatggtgcagaaggactgcttgaggccaggagttcaagaccagcctgggcaacatagtgagagcctatcactattaaaataaaaacaaattagccgggtgtggtggcatgtgcctgcagtcctcaaatttattgggaagctaaggtgggaggagctatgatcacgccagtctcttaaaaacaaaagagtacttggtccaggtgaaaagaaaatatagtagaaaagcttaagccaaaacaataaaatgagagcaagatgattttctttattgctagtgtatagcctctatttagagatggttgagacaaggtgaagtctccttgtttctgcactgttatcaactggtcttatatgtcacacaagaaacttggattttaccatgactgcaatggatgatcactgaatgacttagagtatgacttgagcaaacatgcatttttaaaacatcactctgccaagctggaatggagaagggtagagaagcatcaagaagactatttgatttatctgagtaatttacttgaggaaaaaatgagggtatggggatcaagttgagagtaaagcagtagaagacagtgctctgagcaaatggatatggaatataaaggaaaagaagttatcctaagacttaggtgaccttgtattcttgtttgcatacgatggttctgattatacctaatctcttgtagtagttattaccaaagctccattttactctctaaacagcctgtttggactatacattacaggttgagtattccttatccacaatgctttggagcagaagtgtttcagattttggattgttttggattttggaatatcggcatatacataatgagatatcttggggacagggcccaagtctaaacatgaaattcatttatgtttcatatacatcatacacacacagcctaaagataattttatatagtatctttaataattttgtgcatgaaataaagttttgattgcattttaattgcaacctgtcaggaagtcaggtatggaattttccgcttgtggcacaacactggtgctaaaaaagtttctaattttagaacattttctattttgggtttctgattagggatgctcaacctgtatattaattgctttaccattaacattcagctgtctggcttggcctttagataagattagtagtgaagccagaggatcagattgtgggtggtaagggagtaatcaggaataagataagttccatttatacttgtttggtttaaggtgcaaagtaatctggtgataaaaataaataggagcatccttattctacaggtagaaactgaaaatatgggtagatgaagtaacctaggtagaatacatagcataagaagagatgaagaaaagaaccttgggaatagaaatatttaagagaggaaaagagaaggaagaccccataagaagaaagagaaggtcagaaatatatgccggtgaaagtgatcctatagaagccaaaggaagtttcaacaaaagtgagatgattagtgtaaaatatttcagagaagtcactatttaaaagaaaacatcgtttgctcttacaaagtctatcacataaaatggactaaatggacacatatttatcatgtctaccagcacatcattcttatcctcctccagtcaacttcaaatatactccagaagatagaaaataaatattattgttattatttgaggcagggtctcactgtcacccaggctggagtgcagtggcacgatcttggctcactgcaacctccacctcccaggctcaagcgattctcctacctcagcctcccgaatagctgggactatagatgtgctgccaccatgccaggctaaggttttgtattttttgtagagacagaatttcaggcttcaccatgttgcccaggctggtcttgaaatcctgagctcaagtgatctgtccacctcagcctcccaaagcactgggattacaggcatgagccaccgtgactggccaaaataaatattaatttttaaaaatcaatttctcctgttttcctgtcttaatgctttaagttcattttaaaaaatatctttcaacaaatgtactgctaaactggattcaattaaaatcctcaactaactgtatttcctccttttcacgttactttaatgggttattaaagacaagaaaagtcgctgtcaagattttttgtttttgtaaaaggcaatttccagggctgcataatatggtcagtacagtcaatcaaaactttgatactctgtagagctaacacaagagagtaacaagcagcagctaaggcaccataagatcctgaatcacataagatgattaagttcaaaacttaaatactgaaacagtgaagtatacttacactatttagatagataagttaacaaggattgaaactaaaatgatctattttctagattctatacaatgagaaaaaaaaaagtcttacttagaaaaaggaccaatgttgaaataaagcgtgaaagaaaaaagaaaattctatcccagattagaattcttcaaaattaagtcttatatactaaaaactactaaactatacactttaaatgggtggattttattgcatgtgaattatatctcaaaaaagctgttaaaaaaactaagttgtatacaacacaaaaccttaagcttctttaaaaactatgtttaaacacacatgtcataaagtttaccatcttagacactttttttttttttttgagacgaaatctcactctgtcacctaggctggagtacagtggaatgatctcggctcattgcaacctctgcctcccaggttcaagcgattctcctgcctcagcctcccgagtagctgggactacaggcatgcgccaccatgcccggctaatttttgtatttttagtagagatgaggtttcaccatgttggccaggctggtcttgaactcctgaccttgtgatctgcctgccttggcctcccaaagtgctgggactttaaatgtacagttgagtggtattaaaaacattcatattgttgtgcaatcatcaccattaccatccacatccagaactctcttcatcttgcaaaaccaaaaactctgtacccattaagcaataactttccattccttcctccccttaatttccggcaaccactaaacttaaaacttttaagtgtttagtataatgtgaaattcttaccagattatgtataatatttgttaaagtccaagcaacaggaacactgaagaagggaatgctgagtaagacaatatgaagcaagccaactcccaatgcatatgtcagccacataccccggctgttcatgacacgggtatttggattcacttcactgtgggcaactccaacgttcatgtttgctctgtaggaagtaatgaaatgaatcaacactgatacaactggcaacctaacacccccaattctgacatgacaaggtacctgtgttgcgaggattattttttcctagttactttgaagtagcacacaaacaccatccaaaatatgctacttgtagatgctgatgacagcagtaaagaatcttcagcatttgactttagggtaagacaagacttgttattatggttctatttgaaaaaatagttacaatgcctttccaaaagtttgttttctagcatgttgttttactgaataggaaaattcaaactgaaagagaaaacctacattttcttatatcatgagagcaaagtgaaaagccaaaagctaaatttaccaacataataaatttatattaaaaagaaaaagcagaactcaccgagccagtgtgtcaagtagtcagactcttatatttgacttaatgtatccataaagaatggtcagagttcagatcacttctttctgaatactcaatgtggaaggtacatgctgttgacataatgtggtgtaaaatttacatggtcaagggataatgtttgtttctcaattttgtgattaaactaggtgaaaataaggagtcttctgaatatttctctagtcaaatcaaaaacttcagttttctttcttctttttaaaaaaggttttcccttctcctttccattgaagatggactccaaaggaagaattgataatagttctcagttcttttaatgatggtgtttacttgagactaagaattgcttaaaataaaactgtcctgaagaacacctatcatccgacggagggggaaaacgaggctagattatatttggaacagctgtgattttaaaatacacaaacgcttgtattacggagttagcatacagagaggaatttctcataaccccttccagcaaatgtttccggagtataatgctccttccgctctagagacccatagaacaggcatcaagggttaaggggacgaaaagttagttacactaagaccgctaaagcctccaatttatatgtgtaaatctttcgtctaaacacccatgatttatcatacattaaactattatgtcatacttagaacatgccaacactcaagatagttttcccacgttccacaggatggaggcctgaaatttacatctcagctggaaggcaaagctggtgcggtactcatcctattccaaccagaaaaccttttcccagcaggtttgccgcgctgcccacgactggcaaacaatgaccttacagaccgtgaagaggctgttggctctgccctcgccggtgcctccgaagacggcgacccgcagcggcccctcaggggagtcccccctgctagaccgacagcccgagcgctctgggccagagaaaactcagcaaaagccgccgctgctaccacctcagcgcctcccccaacccgccccttccttctcgcggccgcacgtcacgtcaggaccctggcaagacaacgaggatttgcgtagggggcgagcctctgaggccacttggctcttacggccacgcagggcgccgcagatgcagccggagcccgcttttccctctcaggacgacccctaggccgccagcagttccctaccgacgaaggcgactgtacagcgtccaccgcgttcgtgcccacttacccgccgccccactccgggccgccggctcgcagcaggaccagcccggctgctacggccgcggatacacgccctcaggcccggcgctgcgcagcttgcggaagctttcccggacagactcgctgccagcggattggctgcgagcagcgccaatctcacgttgcccccgggcgaggcgggactcagtgccgcgctctctgcacccgctctgccgcgcgcgtgcgtgctgggtgcgggtgcgggtgcggggttgggcctgcgcatcgggtgagacgctggctgcttgcggctagtggatggtaattgcctgcctcgcgctagcaggaaggtagtgtggtgtgactaacgggtatttattatatcctcgatggctcgagggccccgtcccctctactcgtcctggtccgggcgcgaacgctatagggcagctaagggcgctccccgcggggcgggaagcgaagccgggcttgcgggcgcgcacacgtggaacgcgttttctgagcaggtctgggctccggggtgttctggcttggtctttgttgcgtcccattccccagacccttctgggtggaggacttaaaatttgttttccaggcagcagatttaacccatggcaactgtaactcatcttgtgtgagtggcggtttatagtattgtatcctgtggcatcatacaaggggtgcaagttaaactctttaaagttaatcacgatttttgctcttggccttctgggtttatccgtacgccgaagacaggcacctgtattacatgctaaggaaatgtgaataccaaaaattgatcctgaggaaagtcttgattaggtttttttggaatcgcctttgaaatgtaatttccctcaccttggca

SEQ ID NO: 3155 - DNA, 6000 bp, Homo sapiens
atccctccataaatcaattcatcatctgtaaagatggagctaatacctcactggtttactgtgaagaatcaaataaggaagaatatataaagtgttgttctacaaatgataaggccttataaaatgtagagtattataataagagatcattatgtaaaggaatgctgagaattctttttaaatactaactaccctctaattaatctatatatttgatttagttttggggtacccagttctcaggagagcagctgtgaacaactacctttcaatagttgtttttgttgttctcaacagctgggaggctttcctgtcccaatcaagcagggaaacagtggactataggctactccatcatcataacattcacacaaattagtgctgtcacaagcaaaaggcacctctgcacttttccaaagcttcagaattacctcgatctaagggacagatctgcactgtccaatatggtagccatcagtcatatgtagcttactgaacactagagcactagaaacgtgggtagtccaaattgagatgtgctaatacacactcaatttccaactcagcattaataaaaatcatatcaattttttacattgattataggatgaaatgattttatcctatttggatacactagattacataaaatatattattaaaactaaccttttaaaaaatctgtttaatgtgactactagaaaatttaaaatgatagatgtggcttatagttccattgaacagtgctggatagagcagtggttaaaatggcaggctctgaaatcacactactttggttttatcctagctcttacactaacagatatgtaacactgaggaaattaaactctctaaaatgcaatcacctaatctataaaatggatctaataatgatatcatatgattgtggtgagaagtaaataaagtagtatatataaataatgtattacagtgtttggcatataagtgctaaaaacatcccaggatactgggactaaactgagctcctctaaacccctaaatgaacaatccccccacctctaacccctaccccaaaggggctcacacattaggcctgggttcaagaagtcttccacctcagctaggaaatcccaaggatctaagaaaaacactgatcaacaaaactttggggtataaacttagactgactccttctgagcagtcttaatctcatcatctttgtctcgtttcctataatacctcatctcctacaatgccaaatccaagatcttttttttttaaatctctataattgcatcccaatattcctcattcttctagtttactaagatcatggcaattcatagcatgaattctgtcacactttatctaccccatcccattgcatcctctggtcttaagatgtctgcatctcttttcatactcttcttccatgtcatgtcatctttcttctctcctaattgctacagtctgaatatttgtgtctctaccaaattcataagcatatgatatctgtattgtctccattttatagattagctgattgagttttagaaagtttaatttcctcagtatcatatagctgttagtaagagctaggataaaaccaaagtagcgtgatttcagagcctgccattttaaccagtactctatccagcactgttcaacagaactataatgtacatacatcatttaaaattttctagtactcacattaaaaaagctaaaaaaaaaataaaaaagtgaagttaatcttaattacgtatttggataatctaatatattcaaaatatcaaatatcattttgtcctataatcaatgtaagataactgtaaagattaaattaattaaattgtataattaaacctactacatctttgtcctgaactgtaaaactttttttttcctgctgtacaacttttgaatgtaggaaattatgtattatgtatctctggatgccaggcagaacaatcaaatgcttcacccatggcaagcccttcacttcatgaatattaatgaaggaccactaaatataatttatcagcatctttcttatgctaacgcaaacattagaaaaagtatcctccttccctttatatacataatttcaattggcttccacaccatcctccagctcacctgtatctcacactttttttctggactttagggccttacttccatctaccttctaaatatcatcatttagatgacctgaaggcaacctaaacataacatgtcccaaactgatcagagaatctttctctttcttttttttgagacagagtttcaggtttcgctcttgttgcccaggctgaaatgcaatggcacaatctccgctcactgcagcctccacctcccgggttcaagcgattctcctgcctcagcctcccgagtagctgggattacaggtgcccgccaccacacctggctaattttttgtatttttagtagagccaaggtttcaccatgttggccaggctggtctcaaactcctgacctcaggtgatccgcccgcctcggcctcccaaagtgctgggattacaggcgtgagccaccacgactggcctctaatcaactttcttcctatatttcttgtttgataataaaagtaatagccaacatgagaattttatatatattatcctatttaatcctcacaacaactctacgtattctatcatcctttatcaccaaataggatttaaaggcatggtaacttgctcaagatcacaaaactattaagtggcagatgcacaccttggcatgtttgactccaaaggccatgctctcaaacaccttccatccaagcacataaagcaaaattagaaaccttgaagtcatcctagaaattctactcgctctctacatcctgccacccagtcatctctctcctactatctaaatgtttcccaaactagtcctctcctctttgtactgcctccattcggcctttctctcctgaactactgcaataaccacctaattgatattttgactcgaatctcaaccacctatagggttctttctgtatttaaatttcatcatgttgctgccccacttaaaatttttataaaggtttccaattgccaaccaggttaagtacaaacttcttaacaactggatttttgcctcctctcccagtcatcccatcgttgcccaaatgtgctctagggcgatcatactgcacagctcgtctttttttattttttattttttgtgacagggtctcactttgttgcccaggccagagtgcagcgattttggctcactgcaacctctgcctcccaggttcaagcaattctcctgtcccagccctgcaagtagctgggattacaggagcgcactaccacgcccggctaattttcgtatttttagtagagacagggtttcaccatgttggccaggctggtctcgaactcctgacctcaggtgatccgcccgccttggcctcccaaagtgctgggattacaggtgtgagccaccgtgcccagccaacttgtctctcttaacatggtgacactcactccttcctcagctcacatggttctctctcagctgacttctaatcatccttccagatttagttcagtatcaactcttcaagcctttcttccctgctgcagcctcctttccttcacctgccaacagattaggtattccttcccctgcagtccccctttacctcatttctaattaacctcatcacaagttactctattaatatgtgtttctgtctgttgctcctgactcagagttctttgaggacaggggttttatatcaatcacacatcgctagcatagcccctggaatatagcactctataccatatgtgtaccaaatggaagggtttatatcgggcttacaaatcacagcaaagaatgtctgggaatatcaggatagtcagtcttccatatttgctgggagggaaaaggaacacttctgaagaagtgctgatgacccggaaagtcagttaaggacaacaggtgtgcctaaaaaagaagtaaagatcagagaactcacagacttccattagagagaacacaaagaaatcatttatttaaagatcagactaaatccaaaacaattaggttcacaaagccaacagaaatgcaagatacagacatacacagccaacattctcttaagtcaatttcaaaatgttgaaagctatttcggcaataaaaatcacaaactttctgcactgccaaggtgagggaaattacatttcaaaggcgattccaaaaaaacctaatcaagactttcctcaggatcaatttttggtattcacatttccttagcatgtaatacaggtgcctgtcttcggcgtacggataaacccagaaggccaagagcaaaaatcgtgattaactttaaagagtttaacttgcaccccttgtatgatgccacaggatacaatactataaaccgccactcacacaagatgagttacagttgccatgggttaaatctgctgcctggaaaacaaattttaagtcctccacccagaagggtctggggaatgggacgcaacaaagaccaagccagaacaccccggagcccagacctgctcagaaaacgcgttccacgtgtgcgcgcccgcaagcccggcttcgcttcccgccccgcggggagcgcccttagctgccctatagcgttcgcgcccggaccaggacgagtagaggggacggggccctcgagccatcgaggatataataaatacccgttagtcacaccacactaccttcctgctagcgcgaggcaggcaattaccatccactagccgcaagcagccagcgtctcacccgatgcgcaggcccaaccccgcacccgcacccgcacccagcacgcacgcgcgcggcagagcgggtgcagagagcgcggcactgagtcccgcctcgcccgggggcaacgtgagattggcgctgctcgcagccaatccgctggcagcgagtctgtccgggaaagcttccgcaagctgcgcagcgccgggcctgagggcgtgtatccgcggccgtagcagccgggctggtcctgctgcgagccggcggcccggagtggggcggcgggtaagtgggcacgaacgcggtggacgctgtacagtcgccttcgtcggtagggaactgctggcggcctaggggtcgtcctgagagggaaaagcgggctccggctgcatctgcggcgccctgcgtggccgtaagagccaagtggcctcagaggctcgccccctacgcaaatcctcgttgtcttgccagggtcctgacgtgacgtgcggccgcgagaaggaaggggcgggttgggggaggcgctgaggtggtagcagcggcggcttttgctgagttttctctggcccagagcgctcgggctgtcggtctagcaggggggactcccctgaggggccgctgcgggtcgccgtcttcggaggcaccggcgagggcagagccaacagcctcttcacggtctgtaaggtcattgtttgccagtcgtgggcagcgcggcaaacctgctgggaaaaggttttctggttggaataggatgagtaccgcaccagctttgccttccagctgagatgtaaatttcaggcctccatcctgtggaacgtgggaaaactatcttgagtgttggcatgttctaagtatgacataatagtttaatgtatgataaatcatgggtgtttagacgaaagatttacacatataaattggaggctttagcggtcttagtgtaactaacttttcgtccccttaacccttgatgcctgttctatgggtctctagagcggaaggagcattatactccggaaacatttgctggaaggggttatgagaaattcctctctgtatgctaactccgtaatacaagcgtttgtgtattttaaaatcacagctgttccaaatataatctagcctcgttttccccctccgtcggatgataggtgttcttcaggacagttttattttaagcaattcttagtctcaagtaaacaccatcattaaaagaactgagaactattatca

SEQ ID NO: 3156 - DNA, 6000 bp, Homo sapiens
ctgcactgttatcaactggtcttatatgtcacacaagaaacttggattttaccatgactgcaatggatgatcactgaatgacttagagtatgacttgagcaaacatgcatttttaaaacatcactctgccaagctggaatggagaagggtagagaagcatcaagaagactatttgatttatctgagtaatttacttgaggaaaaaatgagggtatggggatcaagttgagagtaaagcagtagaagacagtgctctgagcaaatggatatggaatataaaggaaaagaagttatcctaagacttaggtgaccttgtattcttgtttgcatacgatggttctgattatacctaatctcttgtagtagttattaccaaagctccattttactctctaaacagcctgtttggactatacattacaggttgagtattccttatccacaatgctttggagcagaagtgtttcagattttggattgttttggattttggaatatcggcatatacataatgagatatcttggggacagggcccaagtctaaacatgaaattcatttatgtttcatatacatcatacacacacagcctaaagataattttatatagtatctttaataattttgtgcatgaaataaagttttgattgcattttaattgcaacctgtcaggaagtcaggtatggaattttccgcttgtggcacaacactggtgctaaaaaagtttctaattttagaacattttctattttgggtttctgattagggatgctcaacctgtatattaattgctttaccattaacattcagctgtctggcttggcctttagataagattagtagtgaagccagaggatcagattgtgggtggtaagggagtaatcaggaataagataagttccatttatacttgtttggtttaaggtgcaaagtaatctggtgataaaaataaataggagcatccttattctacaggtagaaactgaaaatatgggtagatgaagtaacctaggtagaatacatagcataagaagagatgaagaaaagaaccttgggaatagaaatatttaagagaggaaaagagaaggaagaccccataagaagaaagagaaggtcagaaatatatgccggtgaaagtgatcctatagaagccaaaggaagtttcaacaaaagtgagatgattagtgtaaaatatttcagagaagtcactatttaaaagaaaacatcgtttgctcttacaaagtctatcacataaaatggactaaatggacacatatttatcatgtctaccagcacatcattcttatcctcctccagtcaacttcaaatatactccagaagatagaaaataaatattattgttattatttgaggcagggtctcactgtcacccaggctggagtgcagtggcacgatcttggctcactgcaacctccacctcccaggctcaagcgattctcctacctcagcctcccgaatagctgggactatagatgtgctgccaccatgccaggctaaggttttgtattttttgtagagacagaatttcaggcttcaccatgttgcccaggctggtcttgaaatcctgagctcaagtgatctgtccacctcagcctcccaaagcactgggattacaggcatgagccaccgtgactggccaaaataaatattaatttttaaaaatcaatttctcctgttttcctgtcttaatgctttaagttcattttaaaaaatatctttcaacaaatgtactgctaaactggattcaattaaaatcctcaactaactgtatttcctccttttcacgttactttaatgggttattaaagacaagaaaagtcgctgtcaagattttttgtttttgtaaaaggcaatttccagggctgcataatatggtcagtacagtcaatcaaaactttgatactctgtagagctaacacaagagagtaacaagcagcagctaaggcaccataagatcctgaatcacataagatgattaagttcaaaacttaaatactgaaacagtgaagtatacttacactatttagatagataagttaacaaggattgaaactaaaatgatctattttctagattctatacaatgagaaaaaaaaaagtcttacttagaaaaaggaccaatgttgaaataaagcgtgaaagaaaaaagaaaattctatcccagattagaattcttcaaaattaagtcttatatactaaaaactactaaactatacactttaaatgggtggattttattgcatgtgaattatatctcaaaaaagctgttaaaaaaactaagttgtatacaacacaaaaccttaagcttctttaaaaactatgtttaaacacacatgtcataaagtttaccatcttagacactttttttttttttttgagacgaaatctcactctgtcacctaggctggagtacagtggaatgatctcggctcattgcaacctctgcctcccaggttcaagcgattctcctgcctcagcctcccgagtagctgggactacaggcatgcgccaccatgcccggctaatttttgtatttttagtagagatgaggtttcaccatgttggccaggctggtcttgaactcctgaccttgtgatctgcctgccttggcctcccaaagtgctgggactttaaatgtacagttgagtggtattaaaaacattcatattgttgtgcaatcatcaccattaccatccacatccagaactctcttcatcttgcaaaaccaaaaactctgtacccattaagcaataactttccattccttcctccccttaatttccggcaaccactaaacttaaaacttttaagtgtttagtataatgtgaaattcttaccagattatgtataatatttgttaaagtccaagcaacaggaacactgaagaagggaatgctgagtaagacaatatgaagcaagccaactcccaatgcatatgtcagccacataccccggctgttcatgacacgggtatttggattcacttcactgtgggcaactccaacgttcatgtttgctctgtaggaagtaatgaaatgaatcaacactgatacaactggcaacctaacacccccaattctgacatgacaaggtacctgtgttgcgaggattattttttcctagttactttgaagtagcacacaaacaccatccaaaatatgctacttgtagatgctgatgacagcagtaaagaatcttcagcatttgactttagggtaagacaagacttgttattatggttctatttgaaaaaatagttacaatgcctttccaaaagtttgttttctagcatgttgttttactgaataggaaaattcaaactgaaagagaaaacctacattttcttatatcatgagagcaaagtgaaaagccaaaagctaaatttaccaacataataaatttatattaaaaagaaaaagcagaactcaccgagccagtgtgtcaagtagtcagactcttatatttgacttaatgtatccataaagaatggtcagagttcagatcacttctttctgaatactcaatgtggaaggtacatgctgttgacataatgtggtgtaaaatttacatggtcaagggataatgtttgtttctcaattttgtgattaaactaggtgaaaataaggagtcttctgaatatttctctagtcaaatcaaaaacttcagttttctttcttctttttaaaaaaggttttcccttctcctttccattgaagatggactccaaaggaagaattgataatagttctcagttcttttaatgatggtgtttacttgagactaagaattgcttaaaataaaactgtcctgaagaacacctatcatccgacggagggggaaaacgaggctagattatatttggaacagctgtgattttaaaatacacaaacgcttgtattacggagttagcatacagagaggaatttctcataaccccttccagcaaatgtttccggagtataatgctccttccgctctagagacccatagaacaggcatcaagggttaaggggacgaaaagttagttacactaagaccgctaaagcctccaatttatatgtgtaaatctttcgtctaaacacccatgatttatcatacattaaactattatgtcatacttagaacatgccaacactcaagatagttttcccacgttccacaggatggaggcctgaaatttacatctcagctggaaggcaaagctggtgcggtactcatcctattccaaccagaaaaccttttcccagcaggtttgccgcgctgcccacgactggcaaacaatgaccttacagaccgtgaagaggctgttggctctgccctcgccggtgcctccgaagacggcgacccgcagcggcccctcaggggagtcccccctgctagaccgacagcccgagcgctctgggccagagaaaactcagcaaaagccgccgctgctaccacctcagcgcctcccccaacccgccccttccttctcgcggccgcacgtcacgtcaggaccctggcaagacaacgaggatttgcgtagggggcgagcctctgaggccacttggctcttacggccacgcagggcgccgcagatgcagccggagcccgcttttccctctcaggacgacccctaggccgccagcagttccctaccgacgaaggcgactgtacagcgtccaccgcgttcgtgcccacttacccgccgccccactccgggccgccggctcgcagcaggaccagcccggctgctacggccgcggatacacgccctcaggcccggcgctgcgcagcttgcggaagctttcccggacagactcgctgccagcggattggctgcgagcagcgccaatctcacgttgcccccgggcgaggcgggactcagtgccgcgctctctgcacccgctctgccgcgcgcgtgcgtgctgggtgcgggtgcgggtgcggggttgggcctgcgcatcgggtgagacgctggctgcttgcggctagtggatggtaattgcctgcctcgcgctagcaggaaggtagtgtggtgtgactaacgggtatttattatatcctcgatggctcgagggccccgtcccctctactcgtcctggtccgggcgcgaacgctatagggcagctaagggcgctccccgcggggcgggaagcgaagccgggcttgcgggcgcgcacacgtggaacgcgttttctgagcaggtctgggctccggggtgttctggcttggtctttgttgcgtcccattccccagacccttctgggtggaggacttaaaatttgttttccaggcagcagatttaacccatggcaactgtaactcatcttgtgtgagtggcggtttatagtattgtatcctgtggcatcatacaaggggtgcaagttaaactctttaaagttaatcacgatttttgctcttggccttctgggtttatccgtacgccgaagacaggcacctgtattacatgctaaggaaatgtgaataccaaaaattgatcctgaggaaagtcttgattaggtttttttggaatcgcctttgaaatgtaatttccctcaccttggcagtgcagaaagtttgtgatttttattgccgaaatagctttcaacattttgaaattgacttaagagaatgttggctgtgtatgtctgtatcttgcatttctgttggctttgtgaacctaattgttttggatttagtctgatctttaaataaatgatttctttgtgttctctctaatggaagtctgtgagttctctgatctttacttcttttttaggcacacctgttgtccttaactgactttccgggtcatcagcacttcttcagaagtgttccttttccctcccagcaaatatggaagactgactatcctgatattcccagacattctttgctgtgatttgtaagcccgatataaacccttccatttggtacacatatggtatagagtgctatattccaggggctatgctagcgatgtgtgattgatataaaac

SEQ ID NO: 3157 - DNA, 6000 bp, Homo sapiens
agcgattctcctgcctcagcctcccgagtagctgggattacaggcatgtgccaccacgcccggctaattatatatttttagtagagatggggtttctccatgttggtcaggctggtctcgaactcccgacctcaggtgatctgcccgccttggcctcccaaagtgctgggattacaggtgtgagccaccatgcccatccttctcgtggcttttaataccattaaaatgcagacaactaccaaatattcatccctaaatctctaccctgcattccaaactcacataaacatccaactaacaggcatcttaaattgaacatgccccaaaatgaacttctgatctctctgaaaatctgcttctttcatagtctttcccatcttagtaaatggcaactccttccatttagcagaccaaaaccttgaaatcattcctgattcctctttctctcataccctatatcagcaaattctgagaactttgcctccataattaacccagaatctcactgcttcttacatctctactgcgaccaagcagtctgcaggacagactgcttctgccctgtcctgctattttccacacagaaagacaaaggattaaaaaaaaaaaactcaccacaccacgtaacctctgcttaaaaccctctaacagtatcccaccatattcagaaaaaaagctaaagattttaccttggcccacaaggatttacgtgttttcactcagacctcatctcctattactctttccttttcagcctctagacaaactggcctccttgatagtcctttaacatgtcaggtatgcttccatttaatagtctttgcgtatattgttctgtaagccaagaatacctttaaatagcctcacaacttgctccttgacttccaccggtctctcaaatatcacatccatattgaagccttcctgaactactcaatttaattgcaacctttctggcttgcacactcctatcttcctccctgctttagttttctccacagcacttaatgctatctaatataatatttattatacccattttgtctcccaccactataatgtaagcatcagaagagaatagattttaatctattttattcactgacacatcccctgaacagtgcccagcaaataataggtactcaataaatatttattgttggtgttgaatttttcagtgaaaaaatcccatctgcaaaagcctagtttccagaacagagaaaggtcctgactcttccatgaagcgcacaaacatcctgctactttgaggttttacttaccctgatcccggtgccattgtcttggatctgaatcaacttcaggcctccctctttaacaatcacttgaatacttgtggattttgcatctaaactggcaaatcaaacagaaaataatttatcagtctgcaactactctaatgtacatattttaatatgagccaagcaatgataacaaactccaaatacaaacaatagtgcctcattaacgtgtttttcctttgtcttacaggctcatacactgtatgagtttacatattgtgtgagagagagggaagagacgggcagagcaaccatcatttctaataggacattcagcactatttctgttcctctaggaaagacagcaagtgaagttaaaaatagatttcttttggcagatgtctcttctcaactaattttacttttacctgaactttattcagcctcaggttcctaagtgactctaataaaatgtcactaaataatgtcactaaaaaataaaattctgaatgattttctctactattcccttttatatttacgatggaggggaaaaaaaaaagtaatgcagaaagttaataaatctttaggaagtcaatgaattttctggccaggcgcaatggctcacacccataatcccagcactttgggaggccaaggcgggtggatcacctgaggtcaggagtttgagaccagcctgaccaacatggagaaaccccatttgtactaaaaatacaaaattagccaggcatggtgacgcatgcctgtaatcccagctactcaggaggctaaggcaggagaatcacttgaacccaggaggtggaggttgcggtgagctgagatcgcgccattgcactccaacctgggcaacaagggcaaaactctgtctcaaaaaaaaaaaaaaacccaaaaaaaagaagtcaataaattttttgtgctttcaaagagtagcctataagcacagaccaactgctagagaaaacaaattttctagcaggggctgcatgagaaagagttatctattccccacacagacaattctttattcagaaataagataataggctgggcacgggggctcacacctgtaatcccaacacttggggaggctgaggtgggcggatcacctgaggtcaggagttcaagaccagcccggccaacatggagaaaccccgtctctactaaaaataaaaaaattagccgggtgtggtcatgcacgcctgtactcccagctactcgggaggctgaggcaggaagatcgcttgaaaccaggaggcagaggttgccctgagccaagatcacgccactgcacttccgcctgggcaacagagtaagacttcatcttaaaaaaaaaagaaagaagacaataagttacttaaatattacagacatttctcatgagcccctgtattgaagttgtattagtcatctcaacttatatattaaaaagagtataactggactccatataaaaatctccacttgagccgggcgcggtggctcatgcttgtaatcccagcactttgggaggccaaagcgggcagatcacctgaggtcaggaaatcgagaccatcctggctaacatggtgaaaccctgtctctattaaaaatacaaaaaactgcagggcgcggtggctcacgcctgtaatcccagcactttggaaggctgaggcaggcggttcacctgagatcgagagttttgacaccagcctgaccaacatggagaaatcccatctctactaaaaatacaaaattagccaggtgtggtggcacatgcctatagtcctagctactcgggaggctgaggcaggagaatctcccttgaacctgtgaggaggaggttgcagtcagctgagatcgcgccactgcactccagcctgggtgacaaagtgagactccgtctaaaaaaaaaataaaaaaaaaataaaaatctccacttaagtaattaattacaagccaccaagctagtatgtttagttttgttttacagtattctggcacagtacaataataggcccagttgtcctgtcaattcattctaacacagtagaaacaaaagccagtctgccattgcttctgttactactattacaagtgaaaaggaaaaaacatccccaggttcttgctccttctttcatctaccttccaattctcttcctttccttcagtggtcctttctacccactgttctctcagtcccattgccctgaatagtttatactttcacaataaatccctctagaaacctaccactccaaactgaagcattcttttttctattaacgtacggacgtcactaacaactgattttaacaaaataatctgacataacgtttaggtgtattttgggcttgtctttttggaagtttatagtctgcactcacttttccttccacatgtttcaaatctcttcccttcacattttttgtcacagttataagcttcaaaatccaaggatgacccataaaatctggtatcttcgaagtgcgtcctccgaaataaaggacaggaaaacactaagaggggtcactaatttaacaatagggtaatcagaagtcaagcccaaagtgcatcagcctgtcctaaaactacaaacgatttgttttgaaagaaactcaaaatgaattgtgcctttggatgtgaacagatgatttctggaatgaatgaaaagcaagaaaacagtaacacagtaccctctgaaaaaaggtttttctccccatcttaagcttttatacatcttttaacttcgcatgttctgcatacataattttaaattaagtggcttccttacttagttaacggtaccattaagacaacactacgtatattcctccacttacactccaaacaacccttaaaaggtctcgggggagagcggtaaagaaacacacggtctgcggaaaaggagaaggcctgactggcacgtcagggaacccggcggcctccgccgttgtgggcatgcgctgtacatgcctctgcccgggcaaagaggcgtgtccgcgccattgagtgacgcggcccgttaagtcgtagcccttaagtgagcccggctcgactccctccgtaccagttctcaatcatctctttgatagcattagctggccgctggataacttcccccgccgcgatgcggttcaccactgtctcgtccagccgccgaataacccctgccacgaacgacattttggcgccagaagagccaaggaaacgtctagatgctcaacggaagtgccttcagccaatcacctcagtgcctcgtgctcacgttcttccttcagctgtagcttacgccatccagccccacccttcagcggcagctattgattggacagcttgaatgccagtcaaatttctcaactctgtgggttgctgggtctcttcgtccctccctgaagcggctactgcccgctacctagaaggatatgcgcttgcgcgttagagatcgctgtccgctcttcctattggttcgtttttaggagctcggggaatacgaaatatccagccaataggagcagagatgccggaaccgggcttgtgtgcctctgctgaggtgatctggcgcagagcggaggaggtgcttggcgcttctcaggctcctcctctccccttgcggcctttctaacgttggccctgctcttgtggcctcccgcagaatgtggatgacgcccaaaagaagcaagatggaagtcgacgaggctctagttttccggcccgagtggacccagcgttatttggtggtggagcctccggagggcgatggggccctgtgcctggtctgtcgccgcctcatcgtagctacccgcgaacgcgacgtcaggcgccactacgaggctgagcacgaatactacgagcggtatgtggcggacggcgagcgcgcggccctggtggagcgtctgcgtcagggcgacttgcccgtggcctccttcactcctgaagagagagctgctcgtgcaggcctcgggctctgccgcctcttggccttgaagggtcgcggctggggtgagggggactttgtataccagtgcatggaggtgttgctgagagaggtactgcccgagcatgtaagcgtcctgcaaggcgttgacttatctccagatatcacaaggcagaggatcctgagcattgacaggaatctacgcaaccagctttttaaccgagccagggactttaaagcctattctcttgccttggacgaccaggcttttgtggcctatgagaactacctcctggtctttatccgcggtgtaggccctgagttggaggtgcaagaagatcttctgaccataatcaacctgactcatcatttcagtgttggtgcgctcatgtcggcaatcctagagtccctgcagacagcagggcttagcttgcagagaatggttggactgaccacgacccatactttgaggatgattggtgagaactcaggactcgtctcatacatgagagaaaaggccgtaagccccaactgttggaatgtcattcattattcaggatttcttcacttggaactgttgagctcctatgatgtagatgttaatcagatcataaataccatatccgaatggatagttttgattaagaccagaggcgttaggcgacctgaatttcagactttactaacggaatctgaatcagagcatggtgaaagggttaatggacgatgtctgaacaattggcttaggagagggaaaactttaaaactaatattctctctaagaaaagaaatggaagcgttcttggt

SEQ ID NO: 3158 - DNA, 6000 bp, Homo sapiens
actgggaatacaaatctgtcaagaaaactagtaggaatgagctataggacagtaactggtaaggacctaataattttttttttaatgtacgtattttaactatattcactgctacaacaggaccagtaacaactatatttatttaaaaaaaaaaagactgccatgcagttacagaattacttaatacagaaaacagtaaaatacacttttttctttttctttttttttttttttttttacaaacaagactagcttatagcaaattctctatagctaagggtcaatttaaaatccttggcttatatctccccctcactcaatgactacatgatgcaaactaattttattaacaccttaagcaaaacatactggaatttcacaaaatgtacaagatttcaatatttaaggaactggggttagaaagcagaagtggctttcaggtcttccagtctttctctcaagtaataaagctctgctgtgaatattcaaagctattgggaaattaccggtagatttttctgtttttttttttcggttttccactatgttgtttctctagatatgtaagcttactctattaaccaaaatctcagcttgaccattcttgataagtacctaatcgacatgtaactttttttctgccttaaatatgtataacaggacagagcccttaaatctgattcaattattaattcctgatttacaagtgctatggtgagctaacagaacttatcaatgcctttattgcactttactagccaaatttagaaggttggaattagtctctcctatctagtattctgtcagtttgcccagcttgtacttttaattttgcttctaatggtaatctgccctatcccttgaaataaaataatctacattttgggagggctaattcttcattgtgccaggctgtcccatgcactgcaggggtgagtgtctttaggcttaaatgccaacagaagcccctagtaaatatgacaaccaaaaaagtgcccctacacatttctcagcatcctctggaatgacaggttactgcctctagttgaaagccactggcacaactttggtttttaagctcttatgccatttattttaattgcccagacatcaattccacctaaattcttagtcatagcctggttccttgaatttgctggattagtaaccacagattaaggtgtttcaatagttaagacaggactttggaacaagagtttttaaattgtataatacttgagaggatctatgaatataaattgggtcctgtttataattagttttacataatgaactttaagattgccttttcatggtgaacagaagtttggaaattactgttttggcacaaagcagattatcttagtagaaatacagaattactgcaatctgtgaataagactgcttttaaatatttctacttgtgtgctatcttacatatagaatgtgtacgacagttccaaattttagaataaatccatttctagcatctaacaaaatctgatactgtatcattttaaaacaaagtgtttactttaggcaggattttttaaaataaagcagcaatacccacgcagataagacaaaaaagctaaaatatctcacacctcctaatcctggagtgcaatcttttttcctcatcgtttttgatagggccaaacttgtgtctacagtaaaaaaaaaaaaaaaaagaattactaactggcaaccattaagattctatacttaccatagtcctttaataggcaagctgataaaatagcccccagttattaaaaaaaaaatccaaggaaaacccccaataattagtcttatctccaaattgcatgaagtctcctatatctgaaacttaaaaatgattctaatgacttcctctatcagtaatgtgttatcactgaggtgggtgatggggagggaagagggaagaaatctgtcagtattaccttcgaactcagaaatgtttaaaaaaaagtctcaaacattttgatggttagacaaaacacctccactgttatgtatgggcttcctttttggaaacttatgaacttgctatgtgagcttctgcaaattggttcaaaagcacatttaaggagttgataatttaagactatatgaatcagaattttaacactccattaaaataagagctgaaatttttggcatttatcttcagaacacctaaaaaacagactgcaaattcaactcacattaatactaaatctctttaaaattaactatatcataaaagacaatgactttgtcactaaactaagttttaaaaaaggtggcattctcatgtttcagtcccatgctgccatttgagatgaaaaaaaaggcaactgtcagaattttaattgtgatcagtttggacggctggtacttggtactttctcacaatccaaattagtaaacttgaaaactcaaaccaatttttgcttttagaattaaattcttgttgagtttttcaatcttgtactacaaagccttatggattagattcatttctttctctcacaaggtcatcccaaccgggctccatttcagttgtggcaacccgaaacagggcttggagatgctcatctgttaatggctgactcaaagtgtgttggtttcgagtcaaatatgaaaaagccttttcacagatttggttactatcaaacaaggatgccaccttacaggcaacccctttgataattgggtaggattcagcagacaatccagcataaaactgccccaagtctttgattctgtattcattccaaagattagtgtttgcctgaagttttgttagctccaccctcactgaaataggtgcatattcaggtttaaagttaaatggatttgaaaaaagttctaagtcctttttaatgaacctgaggtccttaaaatgtctctcaaattctttttggagacgacagatcaccatttgatacctatcaggatcaaatattttttcatcttccttattttgctgttttagctcatcaacaacttctctgagggcaggaaagtctgttagatttttttcctcaatatgtctttgaaataaattcagcttaacttcgaaagtacaaatatggtcaaaggcagcagcagcaaagactttactaactcgtaattcttcactgagttctcgaaggtgttccataatgtccaccaagaagccaaagtcacaaagccattgtttgtctgagaagtggactgttgttgcccctactgaaaccaagaacgcttccatttcttttcttagagagaatattagttttaaagttttccctctcctaagccaattgttcagacatcgtccattaaccctttcaccatgctctgattcagattccgttagtaaagtctgaaattcaggtcgcctaacgcctctggtcttaatcaaaactatccattcggatatggtatttatgatctgattaacatctacatcataggagctcaacagttccaagtgaagaaatcctgaataatgaatgacattccaacagttggggcttacggccttttctctcatgtatgagacgagtcctgagttctcaccaatcatcctcaaagtatgggtcgtggtcagtccaaccattctctgcaagctaagccctgctgtctgcagggactctaggattgccgacatgagcgcaccaacactgaaatgatgagtcaggttgattatggtcagaagatcttcttgcacctccaactcagggcctacaccgcggataaagaccaggaggtagttctcataggccacaaaagcctggtcgtccaaggcaagagaataggctttaaagtccctggctcggttaaaaagctggttgcgtagattcctgtcaatgctcaggatcctctgccttgtgatatctggagataagtcaacgccttgcaggacgcttacatgctcgggcagtacctctctcagcaacacctccatgcactggtatacaaagtccccctcaccccagccgcgacccttcaaggccaagaggcggcagagcccgaggcctgcacgagcagctctctcttcaggagtgaaggaggccacgggcaagtcgccctgacgcagacgctccaccagggccgcgcgctcgccgtccgccacataccgctcgtagtattcgtgctcagcctcgtagtggcgcctgacgtcgcgttcgcgggtagctacgatgaggcggcgacagaccaggcacagggccccatcgccctccggaggctccaccaccaaataacgctgggtccactcgggccggaaaactagagcctcgtcgacttccatcttgcttcttttgggcgtcatccacattctgcgggaggccacaagagcagggccaacgttagaaaggccgcaaggggagaggaggagcctgagaagcgccaagcacctcctccgctctgcgccagatcacctcagcagaggcacacaagcccggttccggcatctctgctcctattggctggatatttcgtattccccgagctcctaaaaacgaaccaataggaagagcggacagcgatctctaacgcgcaagcgcatatccttctaggtagcgggcagtagccgcttcagggagggacgaagagacccagcaacccacagagttgagaaatttgactggcattcaagctgtccaatcaatagctgccgctgaagggtggggctggatggcgtaagctacagctgaaggaagaacgtgagcacgaggcactgaggtgattggctgaaggcacttccgttgagcatctagacgtttccttggctcttctggcgccaaaatgtcgttcgtggcaggggttattcggcggctggacgagacagtggtgaaccgcatcgcggcgggggaagttatccagcggccagctaatgctatcaaagagatgattgagaactggtacggagggagtcgagccgggctcacttaagggctacgacttaacgggccgcgtcactcaatggcgcggacacgcctctttgcccgggcagaggcatgtacagcgcatgcccacaacggcggaggccgccgggttccctgacgtgccagtcaggccttctccttttccgcagaccgtgtgtttctttaccgctctcccccgagaccttttaagggttgtttggagtgtaagtggaggaatatacgtagtgttgtcttaatggtaccgttaactaagtaaggaagccacttaatttaaaattatgtatgcagaacatgcgaagttaaaagatgtataaaagcttaagatggggagaaaaaccttttttcagagggtactgtgttactgttttcttgcttttcattcattccagaaatcatctgttcacatccaaaggcacaattcattttgagtttctttcaaaacaaatcgtttgtagttttaggacaggctgatgcactttgggcttgacttctgattaccctattgttaaattagtgacccctcttagtgttttcctgtcctttatttcggaggacgcacttcgaagataccagattttatgggtcatccttggattttgaagcttataactgtgacaaaaaatgtgaagggaagagatttgaaacatgtggaaggaaaagtgagtgcagactataaacttccaaaaagacaagcccaaaatacacctaaacgttatgtcagattattttgttaaaatcagttgttagtgacgtccgtacgttaatagaaaaaagaatgcttcagtttggagtggtaggtttctagagggatttattgtgaaagtataaactattcagggcaatgggactgagagaacagtgggtagaaaggaccactgaaggaaaggaagagaattggaaggtagatgaaagaaggagcaagaacctggggatgttttttccttttcacttgtaatagtagtaacagaagcaatggcagactggcttttgtttctactgtgttagaatgaattgacaggacaactgggcctattattgtactgtgccagaatactgtaaaacaaaactaaacatactagct

SEQ ID NO: 3159 - DNA, 6000 bp, Homo sapiens
ggaacaaaaaaaatctgtaactggtggtgatcaattagctgtaaaccgcgttgcactttgaccatccttttcttttgaaagaaataattttaacatacccaataaagagaacggggaccgggtgcagtggttcatgcctgtaattccagcactttgggaggccaaagcgagcagatcacctgaggtcaggagttcgagaccagcctgaccaacatggagaaaccctgtctctactaaaaatacaaaattagccaggcttggtggcgcatgcctgtcatcccagctactcaggaagctgaggcaggagaatcacttgaacccaggaggtggaggttgcagtgagccgagatcgtgccattgcactatagcctgggcaacaagagcaaaactctatctcaaaaaaaaaaaaaaaaagagaatgggttctggaatcagacttcctggatcctattttatcagctttataatctcaaaaaaaggaaatttcctatcccctaatttcctcatttgtaaaatagagaataataagttctatctcataaagttattctgcagattaataattctttggttttttttattttattattcttttcttttcttttgagatggagttttgctcgtcacccaggctggagtgcagtggtacgatcttggctcactgcagcctccacctcccaggttcaagcaattctcctccttcagcgtcctgaggagctgagattacagccatgcaccaccacatctggctaatttttgtatttttagtagagacagggtttcatcatgttggttaggctggtctagaactcctgacctcaaatgatcagcccccctcagcctcccaaagtgctggtattacagatgtgagccactactccagccctattttgttttatgtttttgagatggaatcttgctctgtccccaggctggcatgcagtggcacgatctcggcttactgcaacctccgtctctcggcttcaagcaattctcgtgcctcagtgtcccaagtagctgggattacaggcttctgccaccaggtccagctaatttttgtatttttagtagagacagagtttcaccactttggacaggctggtctcgaactcctgacctcaggtatccacccgccttggcctcccaaagtgctgggattacaggcgtgagccactatgcctggcctactttatttttcaatagagacaaggtctcaccatgttggccaggttggtcttgaactcttggcctcaagcaattcccccacctcggcctctcaaagggctaggattataggcgtgagacaccacgcccagctgttctgcaaattaaatatttctgtgcaattcttagcataacacctgcctggcacaccgtaagaacacaataaaagctgttattattattactacctagctaagtactaggcacataataggtgctaacttcaacttaaaaataataatttattactacatcaacacttgatagtcttatttcaataacaaatgtttcttaactacaacaacattcacagatcatttcttgtggcttaaaactctcccaaacttaccaatattagtggcaccagcatccagactgttttctactaactcctttaccgcagtgcttagactcagtaccacctgcccagagcaaatctgatggactgacttccgatcaataggtttgatggccttagcaggttctgtactagagaaatcagttacaagaaacaaatcaagtattcagctatatattttcatcctgattttaactgtgggaaatgactcaacactgtaaataatttatgggtctaatctattcatttattatattagcaaatacatttattatatccagaaatagaaacactgttttacaatccttaaacatgtacccaaaatacttctggatagatacttcaaattcaacagatccttactatctaattatactaagatccacatggagaaaacatacattgtatctctcaaattaccaaaatctttggcaacaatggtgtcttctttcttgaaaagtgaaagcatggctggctgtggtggctcatgcctgtaatcccagcactttgggaagcagagatgggtggataacttgaggtcaggagttcgacaccagcctggccaacacggtgaaaccccgtctttactaaaaatacaaaaaattagccaggcatggtggtgggcacctgtaatcctagctactcaggaggctgaggcaggagaatcgcttaaatccaggaggcggaggttgcagtgagctgagattgcggcattgcactccagcctgggcaacgagcaaaaaaaaaaatgaaagtaacataatttcccaacataattagaaaaaccaacagtatgctgggaaatacacaatgtttaagtcaaaatcatctcagaaattgggtaccagttatataactattccttatacacagttgcctttgataccccactccaaactgaagctgccagctgctgtcttagcaaagaccctcaaagctcttgctgtactagctttaagagttttataaaggttttatctccccttattccctgctccaatacatcctccactctatcaccagagctatttttgaaatcacaaatctggtcaaataatttttctgcttaaaaatttactagtgccccacttcctactatatgaaagttaaaatttagtcatcattggggccaaaactaccttcttttcagaatctctctaatcctttcccttcatcaagtcccctacattattattattattattattattattgttattattgttattatttgagacagagtctcaccccgttgcctatgctagagggcaatggcatgagctcagctcactgcaacctccgcctcccaggttcaagcgattctcctatctcagcctcccaagtagctgggattacaggcgcccaccatcacacccagctaatttttgtgtttttagaagagatagggtttcaccatgttggccaggctggtctcgaactcctgacctcaggtgatccgcctgcctcggcctcccaaagtgctaggattacaggggaccgcaaccagccatcccctatattgtagcacagtgaacaactgtcctgaacatcacaagctctttgagacactacagtgtataagcaggtctctgtctaaaccgctctcctcttcctcctctgcccaaacaatgtctgctcaaagaatgtatcccgtgtgttcattaacttagcaatttccagcaaacagtttaattgataacttgttaagagaaggcaggaaacctccatgaaagagaaatcactgggtatttcctacagcatttaacacatcgtaggcctttaataaacccttctgaaataaacaaacctctttactcttcattccaccttgctaagaatctcacctaagtctgtctaccatgtgaaactgcagatgacctcacagaaaatggaaagaagtatctctaaaaataagtttatttggcagcacactataggctacaggtccacttctgatttttttttttttttttttttgagaccgagtcttgctgcgttgcccaggccggactgcagtggcacgatctcagctcactgcaacctccgcctcctgggttccagcgattctcctgcctcagcctccaaagtagctaggattacaggctcccgccatcatgcccagttaatttttgtatttttagtagaaacggatttcaccatgttggccaggctggtcatgaactcctgacttcatgatccacccgccttggcctcccaaagtgctgggattataggcgtgagtcaccgctctcggcccacttcagatatttattttgaggagggagcgcatttagacacagaccccaaatttatttaaatgtctcaatacatttaaatgtagttacctaaatatatctaatatatttaaatgcagagagcaaatttgcgtttacaaatctgacatggaatgcaaatgtgctagccaagattcggtgtagcttaccagccagaaatcacacatcctaacaggtagaaacgtattgcatttttaaaaactgcgcagctatgcaaataaggatgtgtctggacgctctaccgtccccaaaataaccttaattttttaaaaaggccaggcacggtgcatcatgcctttaattccagcactttgaggggccaaggcgggcggattgcttgagctcaggcgttcgagaccagcctgggcaacgcagcgaaatccccgtctctacaaaaaaaaattaaaaataaaatactataaaaataaaaataaaaggggagagagaacaggtagaaaggaaatgcattcagtctatggggatttcacgctcccgcttcaagtccacggccctgtgatgggatgtgggcaaggcctgtctgggacaggccgaacccaactcctcacagggccgaatcctttgcccgcagcccaggaccccgaaggagcttgcctcggcctcaaggcgcacccaaggggcacgagatcgctgcaacactgaggtcgccactccggggcctccagggggctgcctcgccacgcgcctcggccatgttccccccatttccagggaggttggaatgccgtgggtctcaaagagggcgcgcgagaggggacaccggaagactgcgagccccgctcacctcgagctctcagctcgctccatggatgcaacacccgatccgcctcggggactgggaaagttccctccagggctcccacaggcgctccgcctcctgaactcccattggctgctttcgacgttgtgctccaccctttccgggcggggcggcaaaaatacttcccgtctctccttttcgcctattggctctgtcaaaggtcgacttcgtgacgtcaaagagcctgggccaatcagagcacaccggactgcgttttcccgaacgcccgcagcagggtcagaagggaggtggccggtctccgtcgtgacctctgacggtttctgagcgttggcctttggcacgcgctacccccttttgctttggttctgccatgccgatgtaccaggtaaagccctatcacgggggcggcgcgcctctccgtgtggagcttcccacctgcatgtaccggctccccaacgtgcacggcaggagctacggcccagcgccgggcgctggccacgtgcaggtaggagcgcggggccccccgcccagtgcgcacgcgcggcgaccggctgctggcccgggtccccccaggccggagcgagcgcgtcccaaccggttcacggccccaccccggcatctgtgccggccggccagggactcactcagacttttatgttttaaaagatttatccaggccgggcgccgtggctcacgcctgtaatcccagcactttgggaggccgaggcgggcggatcacctgaggtcaggagttcgagactagcctggccaacatggtaaaacctcgtctctactaaaaatacagaaattggccgggtgtggtgaggcgcctgtaatcccagctactcgggaggctgaggcaggagaatcgtttgaaccctggaggcggagtttgcagtgagctgagatcgagccattgcactcgagcctgggcaacaagagctaaactctatctcaaaaaaaaaaaaaaaaaaaaaaaaaatatatatatatatatatgtatgtatctttccaggtcgggcgcggtggttcacgcctggagtctcagcgctttgggagactgaggcgggaggatcaattgaatcccaagagtttgagaccactctcagcaacatagcgagacccttgtctctattttttaaatgttttaattaaaatacaaatctgtccatattttttctttttttaatatatggttgcttaaacattttggttcagagattctaccctctgaaaagtgaatagcacataaatgctcattttgaggaattacaaagcgaaccccagggtcaccatggcccaggttgacacacattgtcaccact

SEQ ID NO: 3160 - DNA, 2086 bp, Homo sapiens
gatcacgaagtcaggagatcgagaccatcctggctaaaacggtggaaccctgtctctactaaaaatacaaaaaattagctgggcatggtggtgggcgcctgtagtcccagccactcaggaggctgaggcaggagaatggtgtgaacccgggaggcagagcttgcagtgagctaagatcgtgccactgcactccagcctgggcgacagggcgacagagcaagaatccgtctcaaaaaaaaaaaaaaaaaaaaaaaaaacctcttaaaacaagtacagcaagaactttgagggtctttgctaagacagcagctggcagcttcaatttggagtagggtatcaaaggcaactgtgtataaggaatagttatataactggtatccaatttctgagatgattttgacttaaacattgtgtatttcccagcatactgttggtttttctaattatgtgggaaattatgttgcttttacttttttttttgctcattgcccagcctagggtgcaatgctgcaatctcagctcactgcaacctccgcctcccaggtttaagtgattcttctgcctcagcctcccaagtagctgggattacaggcgcccaccaccatgcctggctaattttttgtatttttggtagagacagggtttcacgacgttggccaggctggtctcaaactcctgatctcaagtgatccacctgcctctgtgtcccaaattgctgggattacaggcatgagccaccgcaccggccatgctttcagttttcaagaaagaagacaccattattgccaaagattttggtaatttgagagatacaatgtatgttttctccatgtggatactagatagtaaggatgtgttgaatttgaagtgtctatccagaagtattttgggtacttgtttaaggattgtaaaacaatgtttccatttctggatataataaatgtatttgttaatataataaatgaatagattagacccataaactatttgcagtgttgagtcatttcccacagttaaaatcaggatgaaaatatatagctgaatacctgctttgtttcttgtaactgatttctttagtacagaacctgctaaggccatcaaacctattgatcggaagtcagtccatcagatttgctctgggccggtggtactgagtctaagcactgcggtgaagaagatagtaggaaacagtctggatgctggtgccactaatattggtaagtttgggagagttttaagccacaagaaatgatcagtgaatgttgttgtagtcaagaaacatttgttattgaaataagactatcaagtgttgatgtagtaataaactattatttttaagttaaagttagcacctattatgtgcctagtacttagctaggtagtaataataataacgacagcttttcttgtgttcttatggtgtgccaggcaggtgttatgctaagaattgcacagaaatatctcatttaatttgcagaatagctgggcgtggtgtctgacgcctgtaatcctagccctttgagaggctgaggtggggggattgcttgaagccaagagttcaagaccaacctggccaacatggggagacctcgtctctattaaaaaataaagcaggccgggtgtggtggctcacgcctgtaatcccagcactttgggaggccaaggcgggtggatacctgaggtcaggaattcgagaccagcctgtccaaaatggtgaaactctgtctctactaaaaatacaaaaattagccagacctggtggcagaagcctgtaatcccagctactggggaggctcaggaatgagaattgtttaaatttgggaggtggaggttgcagtgaaccgagatggtgccactgcacgccagcctggggacagagcaagactctgtctcaaaaaaataaaataaaataaaataaaataaatcctggagtagtggctcacatctgtaatcccagcactttgggaggctgaggggggctgatgctttgaggtcaggagttcaagaccagcctaaccaacgtggtaaaaccctgtctctactaaaaatacaaaaattagccagatgtgatggtgcatggctgtaa

SEQ ID NO: 3161 - DNA, 6000 bp, Homo sapiens
agatcatgccactacactccagcctgggtgacagagtgagactctatctcaaaaaaataaaaattaaaaaactaaaaacctacagtaccgccttttacataatgcaatggtttggtaagcacatgcaccccagggaggtagtggcagattcagtcaaccttcccagcagcgtggagacgcagtcaggcatagcaggtgttgatgtggtttgaacccacagcttggctcaaatccacactcccctacttagtaccgagtgaagccacttaccctctaagtgccttacttttcttttcttttcttttttcttttttcgagacagagtctcgctctgtcacccaggctggagtgcagtggcatgatcttggctcactgcaaacttcgccttccaggttcaagcaattctcctgcctcagcctcccaagtagctgggattacaggcgcccaccaccatgccgggctaatatttgtatttttgatagagatggggtttcaccatattgcccaggctggtctcgaactcctgacctcaagtgatctgtctgcctcggcctcccaaagtactaggattagaggcatgagccaccacacctggccacttttcttatctatatttgttatgtggatgacttgtgttaacgcaaataagatgctgctcgtcatctttaaagaaaataggtggcaacctgttatagcaagtcctgtttttatttgtacttatgaggctttaattaaacgctaagaattaaaatgcacataataatagactttacctcacaaactggcttcaaatattcgatgagacttacatgtattacttaaatgaggttaaatttaaccttttaaaaatgatttattgtggctgggcacagtggctcacacctgtaatcccagcactttgggaggccaaggcagacggatcacttgaggccaggagttgaagaccagcctgaccaacacggcaaaaccccatctccgctaaaaatacaaaaattagccaggcatggtggtgcacacctgtaatcctagctactcaggaggctgagacacaagaatcgcttgaacccgggaggcagaggttgcaaggaggtgagatcacaccactgcactccagcctgggcaatagagtgaggctctgccttaaaacaaagaaaaatgattttgggggatgatggggtgtcactgtgttgaccaggcttgtctcaaactccttgcctcaagcaatccacccacctcagcctcccaagtagctggaactacaggcgcatgccaccacgcctggctaatgtgtgtgtgtgtgtgtgtgtgtgtgtgtgtgtagaaacaaggtcttactgtgttgtttaagctgctctcaaactcctgggctcaagtgatcctcccacctcggcctcccaaagcattggaattacaggtgtgagccacctcactgagccctccacctttcagctgaacgcagaaaagtacaatcttttaacccaaagcgttcctcacacttagggtcaggaagagcccttcatgccctggaggcaactactaaccctctgctaaacactctgactctgggtgtgagaaacacacctactgtgccccacatatttttccaaatacaacttaatttagccttcacgacaaccctggagtgaaggatcattaactttatttcatagatgtggaaactgagactcagaggcaggaaatgacctccttctggaggctgcaaattctttgatgctcctttgatcaacaggtgggagctggccagaggtggtggctcacacctataatcccagcactttgggaggccaaggtgggaggattgactgaggccaggagtttgaaactagcctgggcaacatagcaagacctcatctctacaaaaaatacacaaattagcagggtgtggtggtgcacacctgtagtcgcagccactcgggaggctgaagtggtagcattgcttgagcccaggaggttgaggctggagtgagccatgatcaagccactgcactccagccgaggagatggagatagaccctgtctcaaacaacaacaaaaaaataggtgaggatcagccaggcatggtggctcacgcctgtaatcctagaactttgggaggccaaggtgggaggattgcttgaggccaggacttcaagaccagcctgggcagcctagcaagatcccatcccttaaaaaaaagtttttaggctgggcatggtcactcatgcctgtaatcctagcactttgggaggccaaggcaggcgggttgcctgagctgaggagtttgagaccagcctgggcaacatggtgaaatcctgtctctactaaaatacaaaaaattagccaggtgtggtgttgggcacctgtaatcccaggtactcaggaggctgaggcaggagaattgcttgaacccaggaggcagaggttgcagtgagccgagagcgcaccactccactccagcctggacaacagagcgagactccgtctcaacaaaaaaatgtttttaattagccagctgtgatgatgcatgcccatgtcccagctacttgggaggctgaagcaggaggattgcttgagcctgggaggtcaaggctgcagtgagctatgattgcgcccctgcactccagcctggacagcggagggagaccctgtctgaaaataaaaaaagaggtgggggcctatgaccccccctttaattttggcccaaccttagtaacaggatagtcattgagtagggcaaaagtgatgttatgatgtttttcagcctccaatttacagtctaaaacatgtcttgggtaaacacagcaagactccatctcaaaaaaaaaaaaagaaaaaaaatcagaagtgaacctgtagcctgtagtgtgttgccaaataaacttatttttagagatacttctttccattttctgtgaggtcatctgcagtttcacatggtagacagacttaggtgagattcttagcaacatagaatgaagagtaaagaggtttgtttatttcacaagggtttattgaaggcctacgatgtgttaaatgctgtaggaaatacccactgatttctcttttcatggaggtttcccgccttctcttaacgagtgatcaattaaactgtttactgggaacttgctaagttaatgaacacacgggatacattctttggatgagcagacattggttgggcagaggggcaagaggagagcagtttagacagagacctgcttatacactgtagtgtctaagagagcttgtgatgttcaggaaacagttgttcactgtgctgcaatataggggacggccagttgcggtggctcacacctgtaatcctagtgctttggaaggccaaggcgggcagatcacctgaggtcaggagttagaaaccagcctggccaacatggtgaaaccccatctctactaaaaacacaaaaattagctgagtgtaatggtggatgcctataatcccagcaacttgggaggctgagacaggagaatcacttgaacttgggaggtggaggttgcagtgagccgagatcatgccattgcactctagcccaggtgacagggtgagactctgtcaataataataataataataataataataataataataataataataatgtaggggacttgatgaagggaaaggatcagagagattctgaaaagaaggtagtttggggcccagtgatgactagattttaagtttcatatagtaggaagtggggcactagtaatttttcaagcagaaaaattatttgaccagattcgtgatttcaaaaatagctctggtgatagagtggaggatgggttggagcagggaataaggggaaatgaaaccgttataaaactcttaaagtgggctgggcatggtggctcacgcctgtaatcccagcactttgggaggctgaggcgggcggatcacgaagtcaggagatcgagaccatcctggctaaaacggtggaaccctgtctctactaaaaatacaaaaaattagctgggcatggtggtgggcgcctgtagtcccagccactcaggaggctgaggcaggagaatggtgtgaacccgggaggcagagcttgcagtgagctaagatcgtgccactgcactccagcctgggcgacagggcgacagagcaagaatccgtctcaaaaaaaaaaaaaaaaaaaaaaaacctcttaaaacaagtacagcaagaactttgagggtctttgctaagacagcagctggcagcttcaatttggagtagggtatcaaaggcaactgtgtataaggaatagttatataactggtatccaatttctgagatgattttgacttaaacattgtgtatttcccagcatactgttggtttttctaattatgtgggaaattatgttgcttttacttttttttttgctcattgcccagcctagggtgcaatgctgcaatctcagctcactgcaacctccgcctcccaggtttaagtgattcttctgcctcagcctcccaagtagctgggattacaggcgcccaccaccatgcctggctaattttttgtatttttggtagagacagggtttcacgacgttggccaggctggtctcaaactcctgatctcaagtgatccacctgcctctgtgtcccaaattgctgggattacaggcatgagccaccgcaccggccatgctttcagttttcaagaaagaagacaccattattgccaaagattttggtaatttgagagatacaatgtatgttttctccatgtggatactagatagtaaggatgtgttgaatttgaagtgtctatccagaagtattttgggtacttgtttaaggattgtaaaacaatgtttccatttctggatataataaatgtatttgttaatataataaatgaatagattagacccataaactatttgcagtgttgagtcatttcccacagttaaaatcaggatgaaaatatatagctgaatacctgctttgtttcttgtaactgatttctttagtacagaacctgctaaggccatcaaacctattgatcggaagtcagtccatcagatttgctctgggccggtggtactgagtctaagcactgcggtgaagaagatagtaggaaacagtctggatgctggtgccactaatattggtaagtttgggagagttttaagccacaagaaatgatcagtgaatgttgttgtagtcaagaaacatttgttattgaaataagactatcaagtgttgatgtagtaataaactattatttttaagttaaagttagcacctattatgtgcctagtacttagctaggtagtaataataataacgacagcttttcttgtgttcttatggtgtgccaggcaggtgttatgctaagaattgcacagaaatatctcatttaatttgcagaatagctgggcgtggtgtctgacgcctgtaatcctagccctttgagaggctgaggtggggggattgcttgaagccaagagttcaagaccaacctggccaacatggggagacctcgtctctattaaaaaataaagcaggccgggtgtggtggctcacgcctgtaatcccagcactttgggaggccaaggcgggtggatacctgaggtcaggaattcgagaccagcctgtccaaaatggtgaaactctgtctctactaaaaatacaaaaattagccagacctggtggcagaagcctgtaatcccagctactggggaggctcaggaatgagaattgtttaaatttgggaggtggaggttgcagtgaaccgagattgtgccactgcacgccagcctggggacagagcaagactctgtctcaaaaaaataaaataaaataaaataaaataaatcctggagtagtggctcacatctgtaatcccagcactttgggaggctgaggggggctgatgctttgaggtcaggagttcaagaccagcctaaccaacgtggtaaaaccctgtctctactaaaaatacaaaaattagccagatgtgatggtgcatggctgtaa

SEQ ID NO: 3162 - DNA, 6000 bp, Homo sapiens
tgaccagattcgtgatttcaaaaatagctctggtgatagagtggaggatgggttggagcagggaataaggggaaatgaaaccgttataaaactcttaaagtgggctgggcatggtggctcacgcctgtaatcccagcactttgggaggctgaggcgggcggatcacgaagtcaggagatcgagaccatcctggctaaaacggtggaaccctgtctctactaaaaatacaaaaaattagctgggcatggtggtgggcgcctgtagtcccagccactcaggaggctgaggcaggagaatggtgtgaacccgggaggcagagcttgcagtgagctaagatcgtgccactgcactccagcctgggcgacagggcgacagagcaagaatccgtctcaaaaaaaaaaaaaaaaaaaaaaaacctcttaaaacaagtacagcaagaactttgagggtctttgctaagacagcagctggcagcttcaatttggagtagggtatcaaaggcaactgtgtataaggaatagttatataactggtatccaatttctgagatgattttgacttaaacattgtgtatttcccagcatactgttggtttttctaattatgtgggaaattatgttgcttttacttttttttttgctcattgcccagcctagggtgcaatgctgcaatctcagctcactgcaacctccgcctcccaggtttaagtgattcttctgcctcagcctcccaagtagctgggattacaggcgcccaccaccatgcctggctaattttttgtatttttggtagagacagggtttcacgacgttggccaggctggtctcaaactcctgatctcaagtgatccacctgcctctgtgtcccaaattgctgggattacaggcatgagccaccgcaccggccatgctttcagttttcaagaaagaagacaccattattgccaaagattttggtaatttgagagatacaatgtatgttttctccatgtggatactagatagtaaggatgtgttgaatttgaagtgtctatccagaagtattttgggtacttgtttaaggattgtaaaacaatgtttccatttctggatataataaatgtatttgttaatataataaatgaatagattagacccataaactatttgcagtgttgagtcatttcccacagttaaaatcaggatgaaaatatatagctgaatacctgctttgtttcttgtaactgatttctttagtacagaacctgctaaggccatcaaacctattgatcggaagtcagtccatcagatttgctctgggccggtggtactgagtctaagcactgcggtgaagaagatagtaggaaacagtctggatgctggtgccactaatattggtaagtttgggagagttttaagccacaagaaatgatcagtgaatgttgttgtagtcaagaaacatttgttattgaaataagactatcaagtgttgatgtagtaataaactattatttttaagttaaagttagcacctattatgtgcctagtacttagctaggtagtaataataataacgacagcttttcttgtgttcttatggtgtgccaggcaggtgttatgctaagaattgcacagaaatatctcatttaatttgcagaatagctgggcgtggtgtctgacgcctgtaatcctagccctttgagaggctgaggtggggggattgcttgaagccaagagttcaagaccaacctggccaacatggggagacctcgtctctattaaaaaataaagcaggccgggtgtggtggctcacgcctgtaatcccagcactttgggaggccaaggcgggtggatacctgaggtcaggaattcgagaccagcctgtccaaaatggtgaaactctgtctctactaaaaatacaaaaattagccagacctggtggcagaagcctgtaatcccagctactggggaggctcaggaatgagaattgtttaaatttgggaggtggaggttgcagtgaaccgagattgtgccactgcacgccagcctggggacagagcaagactctgtctcaaaaaaataaaataaaataaaataaaataaatcctggagtagtggctcacatctgtaatcccagcactttgggaggctgaggggggctgatgctttgaggtcaggagttcaagaccagcctaaccaacgtggtaaaaccctgtctctactaaaaatacaaaaattagccagatgtgatggtgcatggctgtaatctcagctcctcagaaggctgagggaggagaattgcttaaacctgggaggtggaggttgcagtgagccaagatcgattgtgccactgcattccagcctgggtgacaagagcaaaagtccatctcaaaaaattaaaaaaaaaaaaaaaaaagggaagaaaaaaaagaaaatgacaaaattaaaaaaaaattattaatctgccaaataactttatgagatagaacttattacctccattttacagttgaggaaattaagggacagtaaatttcctttttttgagattataaagctaataaaatagaatctaggaagtctgattccagaaccagttctgtttttttttcttttttttttttttgagatagagttttgctcttgttgccgaggctgcggtgcaatggcacgatctcaactcactgcaacctccacctcccaggttcaagcgattctcctgcctcagcctcacaagtagctgggattacaggcatgcaccaccacgcctggctaattttgtatttttagtagagatagagtttctctacgttggtcaggctggtctcgaactactgacctcaggtgatccgctcgctttggtctcccaaagtgctgggattacaggcatgaaccactgcgcccggcccccgttctccttactgggtatgttaaaattatttctttcaaaggaaaaggctggtcaaagtgcaacggtctttacaactaattgatcacaaccagttacagatttttttgttccttctccactccaactgcttcacttgactagtgtaaggaaaaaaaaaagaggaaagaaagaaaatgctaaactatttaatctgggctagtaaatggccagaaagaactttataaaaatgaaatatacaaaatgacactagtatgtttaactaaaggtatagttacgacacttaaatttgcacgttataaataatatcaatataaaaactgatagcgtgggtccatttttaataaatatataaatattttaaactttctagatctaaagcttaaggactatggaatggatctcattgaagtttcaggcaatggatgtggggtagaagaagaaaacttcgaaggcttaagtaagttaactttctaatcctattacaaaataattgggccacatgtcttagaattttgagtaacactgtcttgggaaacacaaaaacagttttttaaagccagttactagatatcatgtatatttgttgttatagcacttgagatatcttagtccttactttacagtctctttcagctctgaaacatcacacatctaagattcgagagtttgccgacctaactcgggttgaaacttttggctttcaggggaaagctctgagctcactttgtgcactgaggtgagaaaatatttttatccattcacttgaccccttagaaaaacctctctgaaaattaattggaatcattattatttacaattttctatctcaatatctcagcttctagcttctgaattctgttttgtctcactgccaatctaagtcctagtacttctgaaatgtgagcaataaatgaatgaaatgaagcaaatagtattctttaaaaaattggttacccttattaaaacagtaacttctcaatttgaacataacatatagataataaatgatagttaccattggttttcattatcaatttttagggaaacatttcaccaaagcactatttaattacagcacagatactaaatttttataaataattacatgcacacacacatatatagacatatatatacatatatatacatatatatacatatatatacatatatacatatatatacatatatacatatatatacatatatacatatatacatatatatatacacatatatacatatatacatatatatacatatatacatatatatacatatatatacatatatatatacatatatatacatatatatacatatatatatacatatatatgtatatatatatatatatattttttttttagacagagtcgcactctgtcacccaggctggagtgcagtggcacagtctcagctcactgcagtctctgcctcccaggttcaagtgactttcgtgactcagcctcctgaagagctgggactatagcgtgcaccaccactcctggctaatttttgtatttttagtagagatggggttttgccatgttgcccaggctggtctggaactccaggcctcaagtgatctgccctccttggcctcccaaagtgctggaattacaggcacgagccaccgcaccctgccctacatatacattttaattataatatcttttggattctttaaaaaaaattttaaaaattttaaaaaattctttaaaaaaattcttttaaaaaattttgtttgaagagtaataacaaaacaaatctctatttgagaatcaataaatcttgagatcatttatggttttgcaattcaacctgaaaaatgaagtcaaagcttttatcaaaacaaagcatgtttagtgctctctgtctcactgtcttttagatgccagaccttagattttgtgatgactcctcaaccgtttagatctcggttatctcagagggatcatcagctttttaagaaaattttgagagaaaagcaagtgaagaaaagagtagtcagtgcccaacatcatggatctctcactgaacacaccatgcctggtattctctcacagtgatgtcaccatttctacctgccacgtatcggcgaaggttgggactcgactggtgtttgatcacgatgggaaaatcatccagaaaaccccctacccccaccccagagggaccacagtcagcgtgaagcagttattttctacgctacctgtgcgccataaggaatttcaaaggaatattaagaaggtacagtaaattaatcctggttttcaagagtattggttaatgcacatgagcaaaagatttactaaagatgtttattcttcagttgattctcttcccataatttattgagaaatgctttatttgcatttctcattaaagacttaacttcaggatgatttacttttttctttttatcacataatgtttattaggactgggaaacatagtgagactctgtctctatgaaaaattaaaaaaaaaattgactgggcatggtggcatgcacctgtagttccagctacttgggaggctgaagtgggaggatcacctgagcccaggaacttgagactgcagtgagctatgattgcgtcactacacttcagactgtgagacagagtaagaccctgtctggaaaaatatatatacatatatatacattttttttattttttatttttatctttttttgagatggagtctcactttggcgccctggctgcagtgcagtggcgcgatctcagttcactgcaacctccacctgccaagttcaagcgattctcctgcttcagccttctgagtagctaccattacaggcgcgcgccaccacgcccggctaatttttgtattttcagtggagacggggttccaccatgttgtccaggctggccaggctggtcttgaattcctgccctcaggtgatccgcccacctcggcctctcaaagtgctgggattacaggcgtgagccaccatgcctgaccttatgtacttatatttttatgagaatatttctcttggttttctgataaatgagttactggaacccttatgaatttgaatgcaaatgaaacagctaaatgttatataattgttgtgtttaa

SEQ ID NO: 3163 - DNA, 6000 bp, Homo sapiens
agtcagccaagatcatgccactacactccagcctgggtgacagagtgagactctatctcaaaaaaataaaaattaaaaaactaaaaacctacagtaccgccttttacataatgcaatggtttggtaagcacatgcaccccagggaggtagtggcagattcagtcaaccttcccagcagcgtggagacgcagtcaggcatagcaggtgttgatgtggtttgaacccacagcttggctcaaatccacactcccctacttagtaccgagtgaagccacttaccctctaagtgccttacttttcttttcttttcttttttcttttttcgagacagagtctcgctctgtcacccaggctggagtgcagtggcatgatcttggctcactgcaaacttcgccttccaggttcaagcaattctcctgcctcagcctcccaagtagctgggattacaggcgcccaccaccatgccgggctaatatttgtatttttgatagagatggggtttcaccatattgcccaggctggtctcgaactcctgacctcaagtgatctgtctgcctcggcctcccaaagtactaggattagaggcatgagccaccacacctggccacttttcttatctatatttgttatgtggatgacttgtgttaacgcaaataagatgctgctcgtcatctttaaagaaaataggtggcaacctgttatagcaagtcctgtttttatttgtacttatgaggctttaattaaacgctaagaattaaaatgcacataataatagactttacctcacaaactggcttcaaatattcgatgagacttacatgtattacttaaatgaggttaaatttaaccttttaaaaatgatttattgtggctgggcacagtggctcacacctgtaatcccagcactttgggaggccaaggcagacggatcacttgaggccaggagttgaagaccagcctgaccaacacggcaaaaccccatctccgctaaaaatacaaaaattagccaggcatggtggtgcacacctgtaatcctagctactcaggaggctgagacacaagaatcgcttgaacccgggaggcagaggttgcaaggaggtgagatcacaccactgcactccagcctgggcaatagagtgaggctctgccttaaaacaaagaaaaatgattttgggggatgatggggtgtcactgtgttgaccaggcttgtctcaaactccttgcctcaagcaatccacccacctcagcctcccaagtagctggaactacaggcgcatgccaccacgcctggctaatgtgtgtgtgtgtgtgtgtgtgtgtgtgtgtgtagaaacaaggtcttactgtgttgtttaagctgctctcaaactcctgggctcaagtgatcctcccacctcggcctcccaaagcattggaattacaggtgtgagccacctcactgagccctccacctttcagctgaacgcagaaaagtacaatcttttaacccaaagcgttcctcacacttagggtcaggaagagcccttcatgccctggaggcaactactaaccctctgctaaacactctgactctgggtgtgagaaacacacctactgtgccccacatatttttccaaatacaacttaatttagccttcacgacaaccctggagtgaaggatcattaactttatttcatagatgtggaaactgagactcagaggcaggaaatgacctccttctggaggctgcaaattctttgatgctcctttgatcaacaggtgggagctggccagaggtggtggctcacacctataatcccagcactttgggaggccaaggtgggaggattgactgaggccaggagtttgaaactagcctgggcaacatagcaagacctcatctctacaaaaaatacacaaattagcagggtgtggtggtgcacacctgtagtcgcagccactcgggaggctgaagtggtagcattgcttgagcccaggaggttgaggctggagtgagccatgatcaagccactgcactccagccgaggagatggagatagaccctgtctcaaacaacaacaaaaaaataggtgaggatcagccaggcatggtggctcacgcctgtaatcctagaactttgggaggccaaggtgggaggattgcttgaggccaggacttcaagaccagcctgggcagcctagcaagatcccatcccttaaaaaaaagtttttaggctgggcatggtcactcatgcctgtaatcctagcactttgggaggccaaggcaggcgggttgcctgagctgaggagtttgagaccagcctgggcaacatggtgaaatcctgtctctactaaaatacaaaaaattagccaggtgtggtgttgggcacctgtaatcccaggtactcaggaggctgaggcaggagaattgcttgaacccaggaggcagaggttgcagtgagccgagagcgcaccactccactccagcctggacaacagagcgagactccgtctcaacaaaaaaatgtttttaattagccagctgtgatgatgcatgcccatgtcccagctacttgggaggctgaagcaggaggattgcttgagcctgggaggtcaaggctgcagtgagctatgattgcgcccctgcactccagcctggacagcggagggagaccctgtctgaaaataaaaaaagaggtgggggcctatgaccccccctttaattttggcccaaccttagtaacaggatagtcattgagtagggcaaaagtgatgttatgatgtttttcagcctccaatttacagtctaaaacatgtcttgggtaaacacagcaagactccatctcaaaaaaaaaaaaagaaaaaaaatcagaagtgaacctgtagcctgtagtgtgttgccaaataaacttatttttagagatacttctttccattttctgtgaggtcatctgcagtttcacatggtagacagacttaggtgagattcttagcaacatagaatgaagagtaaagaggtttgtttatttcacaagggtttattgaaggcctacgatgtgttaaatgctgtaggaaatacccactgatttctcttttcatggaggtttcccgccttctcttaacgagtgatcaattaaactgtttactgggaacttgctaagttaatgaacacacgggatacattctttggatgagcagacattggttgggcagaggggcaagaggagagcagtttagacagagacctgcttatacactgtagtgtctaagagagcttgtgatgttcaggaaacagttgttcactgtgctgcaatataggggacggccagttgcggtggctcacacctgtaatcctagtgctttggaaggccaaggcgggcagatcacctgaggtcaggagttagaaaccagcctggccaacatggtgaaaccccatctctactaaaaacacaaaaattagctgagtgtaatggtggatgcctataatcccagcaacttgggaggctgagacaggagaatcacttgaacttgggaggtggaggttgcagtgagccgagatcatgccattgcactctagcccaggtgacagggtgagactctgtcaataataataataataataataataataataataataataataataatgtaggggacttgatgaagggaaaggatcagagagattctgaaaagaaggtagtttggggcccagtgatgactagattttaagtttcatatagtaggaagtggggcactagtaatttttcaagcagaaaaattatttgaccagattcgtgatttcaaaaatagctctggtgatagagtggaggatgggttggagcagggaataaggggaaatgaaaccgttataaaactcttaaagtgggctgggcatggtggctcacgcctgtaatcccagcactttgggaggctgaggcgggcggatcacgaagtcaggagatcgagaccatcctggctaaaacggtggaaccctgtctctactaaaaatacaaaaaattagctgggcatggtggtgggcgcctgtagtcccagccactcaggaggctgaggcaggagaatggtgtgaacccgggaggcagagcttgcagtgagctaagatcgtgccactgcactccagcctgggcgacagggcgacagagcaagaatccgtctcaaaaaaaaaaaaaaaaaaaaaaaacctcttaaaacaagtacagcaagaactttgagggtctttgctaagacagcagctggcagcttcaatttggagtagggtatcaaaggcaactgtgtataaggaatagttatataactggtatccaatttctgagatgattttgacttaaacattgtgtatttcccagcatactgttggtttttctaattatgtgggaaattatgttgcttttacttttttttttgctcattgcccagcctagggtgcaatgctgcaatctcagctcactgcaacctccgcctcccaggtttaagtgattcttctgcctcagcctcccaagtagctgggattacaggcgcccaccaccatgcctggctaattttttgtatttttggtagagacagggtttcacgacgttggccaggctggtctcaaactcctgatctcaagtgatccacctgcctctgtgtcccaaattgctgggattacaggcatgagccaccgcaccggccatgctttcagttttcaagaaagaagacaccattattgccaaagattttggtaatttgagagatacaatgtatgttttctccatgtggatactagatagtaaggatgtgttgaatttgaagtgtctatccagaagtattttgggtacttgtttaaggattgtaaaacaatgtttccatttctggatataataaatgtatttgttaatataataaatgaatagattagacccataaactatttgcagtgttgagtcatttcccacagttaaaatcaggatgaaaatatatagctgaatacctgctttgtttcttgtaactgatttctttagtacagaacctgctaaggccatcaaacctattgatcggaagtcagtccatcagatttgctctgggccggtggtactgagtctaagcactgcggtgaagaagatagtaggaaacagtctggatgctggtgccactaatattggtaagtttgggagagttttaagccacaagaaatgatcagtgaatgttgttgtagtcaagaaacatttgttattgaaataagactatcaagtgttgatgtagtaataaactattatttttaagttaaagttagcacctattatgtgcctagtacttagctaggtagtaataataataacgacagcttttcttgtgttcttatggtgtgccaggcaggtgttatgctaagaattgcacagaaatatctcatttaatttgcagaatagctgggcgtggtgtctgacgcctgtaatcctagccctttgagaggctgaggtggggggattgcttgaagccaagagttcaagaccaacctggccaacatggggagacctcgtctctattaaaaaataaagcaggccgggtgtggtggctcacgcctgtaatcccagcactttgggaggccaaggcgggtggatacctgaggtcaggaattcgagaccagcctgtccaaaatggtgaaactctgtctctactaaaaatacaaaaattagccagacctggtggcagaagcctgtaatcccagctactggggaggctcaggaatgagaattgtttaaatttgggaggtggaggttgcagtgaaccgagattgtgccactgcacgccagcctggggacagagcaagactctgtctcaaaaaaataaaataaaataaaataaaataaatcctggagtagtggctcacatctgtaatcccagcactttgggaggctgaggggggctgatgctttgaggtcaggagttcaagaccagcctaaccaacgtggtaaaaccctgtctctactaaaaatacaaaaattagccagatgtgatggtgca

SEQ ID NO: 3164 - DNA, 6000 bp, Homo sapiens
gttcattcaggctgggcatggtggccaaaaattagccaagcatggtggcgggtgcctgtagtcccagctacttggcaggctgaggcaggagaatcgcctgaacccgggaggcggaggtgcagtgagccaagatcgcgtcactgcactccagcctggtgacagagcaagactccgtttcaaataaaaaactaacacactgtacaactgcatgtaaggtggaaaagacaactggaattaaaatgtgctcaggtccttgtagaagataagaaatccagaggaaagcaagcaaagggggaaaaagaaacagaaaagataaaatgattgtgccaactcaatactaggccataaggctaagtctccataaatgtctttttttttttttttttttttttgagacagagtatcactctgtcacccaggctggagtgccgtggcacaatctcagctcactgcaacctccacctcctgggttcaagcaattctcatgcctcagcctcccaagtggctgggattacagacaaatgccaccacatgcagctaatttgtgtatttttagtagagatggggtttcgccatgttggccaggctggtctcgaactcctggcctcaagtgatctgcctgcctcagcctccccaagtgctgggatcacagatgtgagccactgtgcccagcccctacataaatttcaaacaccacattccctgactacaacacaataaagttagaaatcaaataacgaaaatataactagcaaaattctgtatgtttgaaaattttaaatattttcccagaaactataaaactacatgttaatgtggataaatctcaaacaatcttaactgaaataattaaatcacagaagcctgaataatggattcatttacataattaaagaacacattcatagtggtaacactataatgaaagatgagaaagattaacacaaagttcaccctagtgtttacctatgggtaataaggggactgtgaggtagggtagaaagaaggtacacaaaggatctctacagcactattaatgtttcatttcttgagctggggctagagatctgggtgatatctcatttttattttttaaactacatatacgctttgtacactttcagatattagaacttcaataaaattataaaaaaagaaacagagagggaaaaaataattaagtataattgtcaagatggagctaaaaaataacacgggtgaacaaggtgccacccacatctaagcttccttcccatgtcatgcaatgcctctcctcatctgctccatcaatcaataaaggcataatcactcctgtgatacctttaagaaaagaacacgctttaagaaaagaaacgctctctcgaagccgagtgcggtggctcacacctgtaatcccagcactttgggaggccgaggcaggcggatcacctgaggtcaggagttggagaccagcctggccgacatggcgaaaccccatctctactaaaaatacaaaaattagctaggcatggtggcacatgcctgtaagcccagctacttgggaggcctcagcctcccaagaccatgagaatcgcttgaacccaggaggcagaggctgcagtgagctgagactgtgccactgcactccagcctgggcaacagaaagagactgtctcaaaaaaaaaaaaaaaaaaaaagaacatgctctcttattcaaggttacccttctatcactccaaggattcaccccataatcttatctttcttgatatgttacactcactaaaatgttcacatcaaatcaagtttgtagacacttgtccttaccaccttacaaaaagtgagatggtatcaacagaggtaagacactgcttttacctgcatgtcacttttggcagctttcgcagcattgaaaagatcattggctggtggctctgactgtttccggctatgacgatgtaccgcttgggaccctttctttggatattttgccacctgatacacataaaaagatcagaaatatgaaaaaaaggtaatagtgacattaacacttggtttcatcattatcacacaagtaggcttacgctgccaattccacagcagtctgagttagactcagtcctgaaataattgatttttgtattatgaagtttattaacttttttccctttaaaaaaaaaattccttgagtctccttcccgtatctctataaccaaacatccttttcttttcttttctcttcgaaatttctcttcttcctatttccgtcccttaatactttgtaaatcttgtccttttttgaaccatatcacctgaacctcttaggttttctcttttttttgagacggagtctcgctctgtcgcccaggctggcgtgcagtggcgtgatctcggctcactgccagctctgcccccggggttcgtgccattctcctgcctcagcctcccgaatagctgggctgcttcccccacaagattcaaaaacaaaagaaaactggctgactcaccggcgttgttttcagtggtcgttttgctgctttcttcttcacaccgcgattgaagctgtcctcaaatcattttcttgtcttcttgtctatttgtatgaattactgagttacattctcattgctacttatttaagcaaagtattcttagtttgttaagaacaaagaactacaaattgtgttcattttctgtcctttcctgttcttagactaaattacctgaaatacatcaaaatatatgctgtatgcttacctatatcaaaactatgttgtttaggtgccgggcacagtggctcacacctgtaatccagcactttgggagttcaaggcgggcggatcgcctgaggtcaggagttcaagaccagcctggtcaacatggcaaaaccccgtctctactaaaaatacaaaaattagccaggtgcagtggacagtgcctgtaatctcagctactcatgaggctgaggcctgagaattgcttgaacccaggaggccaaggtggcagtgagctgagatcatgccactgcactccagcctgggtgacagagtgaaactccgtctgaaaaaaacaaaacaaacaaacaaacaaaaaaccagaccatattgtttagggatacttagctgacaaaataatagagacaagcatgacataattaccataaaaatcaggccctggggtgctggtggggaaggtttaagtggaaagaatggagcggtgacaatgtgtgtcaacctgggaggtggtgaccctggggttcgctttgtaattcctcaaaatgagcatttatgtgctattcacttttcagaggatagaattctgaactaaaatgtttaagcagccatacgcaaaaaaaaaagaaaaaatatggatagatttttattttaattaaaacatttaaaaaatagagacaaggcagctgggcgtggtggctcacgcctgtaatcccagcaatttgggaggccgaggcaggcgaatcacgaggtcaagagatcgagaccatcctggctaacacggtgaaaccaagtctctactaaaaatacaaaataaagttagccaggcgtggtggcgggcgcctgtagtcccagctactggggaggctgaggcaggagaatggcgtgaacccgggaggtggagcttgcagtgagtcgagatcaggccactgcattccagcctgggcgacagagcaagactccaactcaaaaaaaaaaaaaaaacatagagacaagggtcttgctatgttgctcagggtggtctcaaactctccgggctcaagcaatcctcccgcttcggtctcccaaagcgctgagattccaggcgtgaaccaccgcgctcgaccaggaaaaaaatatatatatatataatatacaatatattttataatatattatgtcatatattacacataatatacaatatgtataatacgcataataaaggtatatttaatatatataaagatatatatgtatataataatttttttttttgagacggagtttcactcttgctgcccaggctcgagtgcaatggctcgatctcagctcactgcaagctccgcctccagggttcaaaccattctcctgcctcagcctcccgagtagctgcgattacaggcgcccgacacacgcccggctaatttttgcatttttagtagacacggggtttcaccatgttggccagactggtctcgaactcctgatctcaggtgatccgcccgcctcggcctcccaaagtgccgggattacaggcgtgagccacggcgcccggcctgaataaatcttttaaaacataaaaatctgggtgagcccctggccggccggcacagatgccggggtggggccgcgaatcggttgggaagcactctatccggcctaggggcacccgggccagcacccggccgccgcgcgtgcgcagtgggcggggtgccccgcgctcctacctgcaagtggccagtgccaagtgctgggccgccgctcctgccgtgcatgttggggagccagtacatgcaggtgggctccacacggagaggggcgcagacccggtgatagggctttacctggtacatcggcatggcgcaaccaaagcaagagagggtggcgcgtgccagacaccaacggtcggaaaccgccagacaccaacggtcggaaaccgccagacaccaacgctcggaaaccgccagacaccaacgctcggaaaccgccagacaccaaggctcggaatacacgccagaccacgacggagggcgaccacctcccttctgaccctgctgcgggcgttcggaaaaaaaacgcagtccggtgtgctctgattggtccaggctctttgacgtcacggactcgacctttgacagagccactaggcgaaaaggagagacgggaagtattttttccgccccgcccggaaagggtggagcacaacgtcgaaagcagccaatgggagcccaggaggcggggcgcctgtgggagccgttgagggcactttcccagtccccgaggcggatccggtgttgcatccttggagagagctgagagctcgaggtgagctgggctcgcggtcgcccctctcgctcgccctctttgagaaccacggcttccgacctccctggaaatggggggaacatggccgaggcgcgtgggaggccgcctcgtggaggccccggagcggcatcctcagcgccccagcgatccggtgcccattaggtgcgccttgaagccgaggcaagctccttcggggtgctgggctgcgggcaaagaattcggccctgtgaagagttgggttcggcctgtctcaggccctgcccacatcccatcacagggccgtggacttgaagccggaacgtgaaatccccatagactgaatgcatttcctttctacctgttctctctccccttttatttttatttttatattattttatttttaatttttattttatttttttgtagagacggggatttcgctatgttgcccaagctggtctggaactccggagctcaagcagtccgcccgccttggccccccaaagctctggaattacaggcgtaatgcactgtgcctggccttttaaaaaaaaattgaggttattttggggacagtagagcgtccagacacatcctaatttgcgtagctgctcagttttaaaaaatgcaatgcatttttacctcttagggtatgtgatttctggctggtaagctacaccgaatcttggctagcacagttgaattccatgtcagatttgtaaacgcaaatttgctctctgcatttaaatatattagatatatttaggtaactacatttaaatgtattgagacatttaaatacacttgccgtctgtatctaaatatctgaagtggaccaggtgcggtggctcacacctataatcccatcactttgggaggccaaggcaagtggatcatgaggtcaggagttcacgaccagcctggccaacatggtgaaatcccatttctactaaaaatacaaaaattagctgggcgtggtggcaggcgcctgtaatcctag

SEQ ID NO: 3165 - DNA, 6000 bp, Homo sapiens
aatttcctcaactgtaaaatggaggtaataagttctatctcataaagttatttggcagattaataatttttttttaattttgtcattttcttttttttcttccctttttttttttttttttaattttttgagatggacttttgctcttgtcacccaggctggaatgcagtggcacaatcgatcttggctcactgcaacctccacctcccaggtttaagcaattctcctccctcagccttctgaggagctgagagtacagccatgcaccatcacatctggctaatttttgtatttttagtagagacagggttttaccacgttggttaggctggtcttgaactcctgacctcaaagcatcagcccccctcagcctcccaaagtgctgggattacagatgtgagccactactccaggatttattttattttattttattttatttttttgagacagagtcttgctctgtccccaggctggcgtgcagtggcacaatctcggttcactgcaacctccacctcccaaatttaaacaattctcattcctgagcctccccagtagctgggattacaggcttctgccaccaggtctggctaatttttgtatttttagtagagacagagtttcaccattttggacaggctggtctcgaattcctgacctcaggtatccacccgccttggcctcccaaagtgctgggattacaggcgtgagccaccacacccggcctgctttattttttaatagagacgaggtctccccatgttggccaggttggtcttgaactcttggcttcaagcaatccccccacctcagcctctcaaagggctaggattacaggcgtcagacaccacgcccagctattctgcaaattaaatgagatatttctgtgcaattcttagcataacacctgcctggcacaccataagaacacaagaaaagctgtcgttattattattactacctagctaagtactaggcacataataggtgctaactttaacttaaaaataatagtttattactacatcaacacttgatagtcttatttcaataacaaatgtttcttgactacaacaacattcactgatcatttcttgtggcttaaaactctcccaaacttaccaatattagtggcaccagcatccagactgtttcctactatcttcttcaccgcagtgcttagactcagtaccaccggcccagagcaaatctgatggactgacttccgatcaataggtttgatggccttagcaggttctgtactaaagaaatcagttacaagaaacaaagcaggtattcagctatatattttcatcctgattttaactgtgggaaatgactcaacactgcaaatagtttatgggtctaatctattcatttattatattaacaaatacatttattatatccagaaatggaaacattgttttacaatccttaaacaagtacccaaaatacttctggatagacacttcaaattcaacacatccttactatctagtatccacatggagaaaacatacattgtatctctcaaattaccaaaatctttggcaataatggtgtcttctttcttgaaaactgaaagcatggccggtgcggtggctcatgcctgtaatcccagcaatttgggacacagaggcaggtggatcacttgagatcaggagtttgagaccagcctggccaacgtcgtgaaaccctgtctctaccaaaaatacaaaaaattagccaggcatggtggtgggcgcctgtaatcccagctacttgggaggctgaggcagaagaatcacttaaacctgggaggcggaggttgcagtgagctgagattgcagcattgcaccctaggctgggcaatgagcaaaaaaaaaagtaaaagcaacataatttcccacataattagaaaaaccaacagtatgctgggaaatacacaatgtttaagtcaaaatcatctcagaaattggataccagttatataactattccttatacacagttgcctttgataccctactccaaattgaagctgccagctgctgtcttagcaaagaccctcaaagttcttgctgtacttgttttaagaggtttttttttttttttttttttttttgagacggattcttgctctgtcgccctgtcgcccaggctggagtgcagtggcacgatcttagctcactgcaagctctgcctcccgggttcacaccattctcctgcctcagcctcctgagtggctgggactacaggcgcccaccaccatgcccagctaattttttgtatttttagtagagacagggttccaccgttttagccaggatggtctcgatctcttgacttcgtgatccgcccgcctcagcctcccaaagtgctgggattacaggcgtgagccaccatgcccagcccactttaagagttttataacggtttcatttccccttattccctgctccaacccatcctccactctatcaccagagctatttttgaaatcacgaatctggtcaaataatttttctgcttgaaaaattactagtgccccacttcctactatatgaaacttaaaatctagtcatcactgggccccaaactaccttcttttcagaatctctctgatcctttcccttcatcaagtcccctacattattattattattattattattattattattattattattattatttgagacagagtctcaccctgtcacctgggctagagtgcaatggcatgatctcggctcactgcaacctccacctcccaagttcaagtgattctcctgtctcagcctcccaagttgctgggattataggcatccaccattacactcagctaatttttgtgtttttagtagagatggggtttcaccatgttggccaggctggtttctaactcctgacctcaggtgatctgcccgccttggccttccaaagcactaggattacaggtgtgagccaccgcaactggccgtcccctatattgcagcacagtgaacaactgtttcctgaacatcacaagctctcttagacactacagtgtataagcaggtctctgtctaaactgctctcctcttgcccctctgcccaatgtctgctcatccaaagaatgtatcccgtgtgttcattaacttagcaagttcccagtaaacagtttaattgatcactcgttaagagaaggcgggaaacctacatgaaaagagaaattagtgggtatttcctacagcatttaacacatcgtaggccttcaataaacccttgtgaaataaacaaacctctttactgttcattctatgttgctaagaatctcacctaagtctgtctaccatgtgaaactgcagatgacctcacagaaaatggaaagaagtatctctaaaaataagtttatttggcaacacactacaggctacaggttcacttctgattttttttctttttttttttgagatggagtcttgctgtgtcacccaggctagactgcagtggtgcaatctcagctcactgcaacctctgtctcctgggttccagcgattctcctgcctcagcctcccaagtagctaggattacaggcgcctgccaccacgcccagctaatttttgtatttttagtagaaatgggatttcaccatgttggccaggctggtcgtgaactcctgacctcatgatccacttgccttggcctcccaaagtgatgggattataggtgtgagccaccgcacctggtccacttcagatatttagatacagacggcaagtgtatttaaatgtctcaatacatttaaatgtagttacctaaatatatctaatatatttaaatgcagagagcaaatttgcgtttacaaatctgacatggaattcaactgtgctagccaagattcggtgtagcttaccagccagaaatcacataccctaagaggtaaaaatgcattgcattttttaaaactgagcagctacgcaaattaggatgtgtctggacgctctactgtccccaaaataacctcaatttttttttaaaaggccaggcacagtgcattacgcctgtaattccagagctttggggggccaaggcgggcggactgcttgagctccggagttccagaccagcttgggcaacatagcgaaatccccgtctctacaaaaaaataaaataaaaattaaaaataaaataatataaaaataaaaataaaaggggagagagaacaggtagaaaggaaatgcattcagtctatggggatttcacgttccggcttcaagtccacggccctgtgatgggatgtgggcagggcctgagacaggccgaacccaactcttcacagggccgaattctttgcccgcagcccagcaccccgaaggagcttgcctcggcttcaaggcgcacctaatgggcaccggatcgctggggcgctgaggatgccgctccggggcctccacgaggcggcctcccacgcgcctcggccatgttccccccatttccagggaggtcggaagccgtggttctcaaagagggcgagcgagaggggcgaccgcgagcccagctcacctcgagctctcagctctctccaaggatgcaacaccggatccgcctcggggactgggaaagtgccctcaacggctcccacaggcgccccgcctcctgggctcccattggctgctttcgacgttgtgctccaccctttccgggcggggcggaaaaaatacttcccgtctctccttttcgcctagtggctctgtcaaaggtcgagtccgtgacgtcaaagagcctggaccaatcagagcacaccggactgcgttttttttccgaacgcccgcagcagggtcagaagggaggtggtcgccctccgtcgtggtctggcgtgtattccgagccttggtgtctggcggtttccgagcgttggtgtctggcggtttccgagcgttggtgtctggcggtttccgaccgttggtgtctggcggtttccgaccgttggtgtctggcacgcgccaccctctcttgctttggttgcgccatgccgatgtaccaggtaaagccctatcaccgggtctgcgcccctctccgtgtggagcccacctgcatgtactggctccccaacatgcacggcaggagcggcggcccagcacttggcactggccacttgcaggtaggagcgcggggcaccccgcccactgcgcacgcgcggcggccgggtgctggcccgggtgcccctaggccggatagagtgcttcccaaccgattcgcggccccaccccggcatctgtgccggccggccaggggctcacccagatttttatgttttaaaagatttattcaggccgggcgccgtggctcacgcctgtaatcccggcactttgggaggccgaggcgggcggatcacctgagatcaggagttcgagaccagtctggccaacatggtgaaaccccgtgtctactaaaaatgcaaaaattagccgggcgtgtgtcgggcgcctgtaatcgcagctactcgggaggctgaggcaggagaatggtttgaaccctggaggcggagcttgcagtgagctgagatcgagccattgcactcgagcctgggcagcaagagtgaaactccgtctcaaaaaaaaaaattattatatacatatatatctttatatatattaaatatacctttattatgcgtattatacatattgtatattatgtgtaatatatgacataatatattataaaatatattgtatattatatatatatatatttttttcctggtcgagcgcggtggttcacgcctggaatctcagcgctttgggagaccgaagcgggaggattgcttgagcccggagagtttgagaccaccctgagcaacatagcaagacccttgtctctatgttttttttttttttttgagttggagtcttgctctgtcgcccaggctggaatgcagtggcctgatctcgactcactgcaagctccacctcccgggttcacgccattctcctgcctcagcctccccagtagctgggactacaggcgccc

SEQ ID NO: 3166 - DNA, 6000 bp, Homo sapiens
gcctgtaatcccagttactcgggaggctgaggcaggagaatcgcttgaacctgggagatggacgttgcagtgagctgagatcgcaccattgcactccaacctgggcaacaagagcgaaacttcatctcaaacaaaaacaaaaacaaaacaaaattatacgaagctgatgttacttgagcaatttttattttcacatttgaaggtttctttcccagtaactgagcatgtttttgccaatggcagtctatgcctggctgctacaaggccttccttctgcttcctgaggaggagagagtgggtggcagcagggcagggcaaggcagggtggagcagagctggtctgcgatgcatttccccaccaaggtttccaagttcccccaaagcttggggtaccccttgctttgccagtgtcttcctctttctggtcctggggcgccatccaactcatctccacactgctggctccttaaggtgggggtctcaactccaaggccagcctcccaggaggccctccctgcctacagccagccccagccactccgcgccttttggggatctgaaagatctcgctcccgtactagcaggtttgttgattgactgttgtctctcacaccagaatggaaccacacggggtacaacctggtctccttaccctgatcccagtgtctacagtggtaggagctcatcgaacaaggggacaaactcatgactagctgaccaagcctgtcaccgtggtaggggccagggagaaagctgggaggtccctgcctttgcccgcatgccagggcttctctgggcaggcaccacgtccatcccaccctactccgcgctgtggctgtgcctgcagccttaacccgcggcctgccagtatggtggcccgcgtgggcgactggcctgggcagctgctgggcggggctggagggtggaaggccagcaggcgggagacaccccccaccctcttccctgccaagctcaggaagaaaagtggaccctggtggctccctctaggcgtggctgctctgacccttggtggggtgggtgccttcctctggaagctctgacatattgggggaaggaagtctcaagagtccacaaaggtggaggtagcttcagagaccaactggaggccctcacctgtccccgcaccttcactccatggcacacctatggctacttcccaggggtccgcactctggacaaagtgttggtccctggctaggaccctgcaaagccagaggcacagaaggaagcagaggctctgggtgggcactgcccatgctaggggccctgcacagagcccctggtccaccagaggagccagaggaattctctgcttgattggagacacttcccagcaggcctggctgcaaccaccttctctgagttacaatttgactgagttgtatggaattcaaatccagatggaaggaagtgacaacgtcaagtgcaacactagctgtgttttgtccaaaacgtgggccaacgaaactatctccaggaaaacaaataagtcccttttctattttttttttttttttttttgagacagagtctcactccatcgcccaggctggagtgcagtggtgcagtctcagctcactgcaatctccacctgccaggttcaagcgattctcctgcctcagcctcccgagtagctgggattacaggcatgtgccaccatgcccggctgatttttgtatatttagtagagagggggtttcaccatgttggccaggctggtctccaactcctgatctcaaataatccacccgcctcagcctctcaaagtggtgggattacaggcgtgagcccctgcgtctggactgaatatcctttttttttttttagacggagtctcgctctgtcgcccaggctggggtgcagtggcgcagtctcggctcactgcaagctccgcctcccaggttcacgccattctcctgcctcagcctcctgagtagctgggactacaggcgcccaccaccacgcccagctaattttttgcatttttagtggagacggggtttcaccgttagccaggatggtctcgatctcctgacctcgtgatccgcctgcctcggcctcccaaagtgctgggattacaggcatgagccactgaggctgaccctttttttttttttgagacagggtctgtctcaaaaaaagggtgtgtccctatcacccaggatggagtgcagaggctcaagcacggctccccgcagccccaaccttctgggctcaagcaatcttcccacctcagcttctcaagtagctgagaccacaggtgcaggccaccatgcccggctaattaaaaaaaaaaattattttttgtagacagggtctcactatatcgcccaggctagtcttgaactcctgggctcaagcgatgcgcctgccttatcttcccaaagtgctgggattacaggcgtgagccaccttgccgggttaaatatcacttttaaggaaatgatcttcttacccagctttctggtgtgtgaacacacagagaaagcctggcctccaattgtgggggccaacggagtgaatgggaagagtcgggggacagtgtggagtgtgaggacaaggagacaacccccaaggcagcggagagagggagtatggagccgccctggggtcacctacaggtaggtcctggctgcctctctagacacctgccctgccgcaggtccggccaagacctgcacagggactccgggccggctcccccaggataggaactgcgcccaggagtgctggtttgaggcaggttccagcctccactggggaagtgaggggcaggaggtcccagctgaaggtcactcaggttgcagcggcgtggccctctcgcctccgcccagcacccaggccagcttgggcacccccggcccgtggggcatgtccctccgcctcaggcgagcacagaccgagccctgcccctccccaaacacaccattgcgtccctgcgcccgcaggcctcgctggaagctgcctcccctggagaccacccggccgactgtccaacttcggggccccgggcttcccgctccccgccctgccaaggcttgagtctctcccactgcgtggccaggcgtggagggccggccgatccgaccccgaaagacgtctcagcgctccacggccccggggcggaggtcaggggtctcgccggcccgaacgccgggccccgcggggccgaagtcctgataagccacctggcaggagtggctggcagaccggctgcgtctggggcaccgggcgccgcccctcccaggcccgaagcccccggcccgcgcagcagggacactccgccaggggccggcgggcggggcggggccggcgcggccgggagccgcggacactcggccaccgagccaccggccacggcgcagcgggggccgccgggctgcgccgccagggtcacgcgacgcggtgcccgtctcggcgcagggtccctgggcgtggccgctgtccccctcgtgtgtgggaccccaggtcaccgtgtggcgtcccggtagtgtgtgggaccccagaggcgtccggggcctccccgctgtgtggtgtcccaccctgggagaaccccgggtgcgtggcgtggccccccggccgcccccagctggtttgcggtcgtggcgggggcctgtgggtttctgggccccgacggcggcgagacgggcgccttcccagcggcgcaggaagcggcctcggccggaaggggggccccgggcgccaccgccgcctccgcctccgcccgcgcccagcggccctcggcgggcggggccgagcggggccgagcggagtcgagcatggccgagcgtagccgagtcccggccgagcggagccgagtcatggcagggcgggtccgagcgtggccgagtcccgggcgagcggagccgagcgcggccgagtccgggcggggagcgcgcgttcctggaagagcccggctggggagcgggtcacattcttggccagcgctagggctgaggcggacgcacggcaacaaacagcgcggggggcggggccggcgcggggcggagcgggcggcgcggggcggggcggcgcggcggcggcgtgagctcagcgccgggcgctcagtccgagccggagcgagccgccgggaggatgtgcgccgagcgccccgagccccgcgccgccgccgcgctctgagggccgcgggcgagaggcgcctccgccgccccggaagccgggcgggcgggccgcggagccggcgggcgggcgggccgggggccggcggcgggcgcgacgcggccggccagcgccgccgggacgagccgggcgggcgcctcgcggtgggaggagcggggcggcggcggcgcgccgcgcgaggacggcccggcgggccccgcgcccgcgcccccgctcctcccgggcccctcggcctcggccgccgcggcgattcgcgcctcgcggcgccggcacctgcccgcgcgccccccgcgagccccgggcccgcgagcgttggcgttggcgttggcggcgcgcgccggggcatgccccgcgcctagagcccggggggcgcgcgggggacgcgcggggggcccgggcggcggcgggcgcggcgcggggcgcgtggatgtggcgccgggcccgggcggcggcgggctccagcggcgggaccccttcgccccgcccgccttccccttcgcgcccccgggcgaggccgcggccgtgatcggccgtgagccggcggcggggggcggccggggtcggggccgcgggcgccgccggggcgcgcggggcggcggcgggggccgggggggcccgggcgcgcgggagcgggagcggccgggggagccggagcgcaccatggaggcggcggcaggcggccgcggctgtttccagccgcacccggggctgcagaagacgctggagcagttccacctgagctccatgagctcgctgggcggcccggccgctttctcggcgcgctgggcgcaggaggcctacaagaaggagagcgccaaggaggcgggcgcggccgcggtgccggcgccggtgcccgcagccaccgagccgccgcccgtgctgcacctgcccgccatccagccgccgccgcccgtgctgcccgggcccttcttcatgccgtccgaccgctccaccgagcgctgcgagaccgtactggaaggcgagaccatctcgtgcttcgtggtgggaggcgagaagcgcctgtgtctgccgcagattctcaactcggtgctgcgcgacttctcgctgcagcagatcaacgcggtgtgcgacgagctccacatctactgctcgcgctgcacggccgaccagctggagatcctcaaagtcatgggcatcctgcccttctcggcgccctcgtgcgggctcatcaccaagacggacgccgagcgcctgtgcaacgcgctgctctacggcggcgcctacccgccgccctgcaagaaggagctggccgccagcctggcgctgggcctggagctcagcgagcgcagcgtccgcgtgtaccacgagtgcttcggcaagtgtaaggggctgctggtgcccgagctctacagcagcccgagcgccgcctgcatccagtgcctggactgccgcctcatgtacccgccgcacaagttcgtggtgcactcgcacaaggccctggagaaccggacctgccactggggcttcgactcggccaactggcgggcctacatcctgctgagccaggattacacgggcaaggaggagcaggcgcgcctcggccgctgcctggacgacgtgaaggagaaattcgactatggcaacaagtacaagcggcgggtgccccgggtgagtggccccaggcctgggagctggggaggatgcgcttggggtgggggccccttctggactacaggctctggtctccgaaggctgggacctgtgcttctgccgtgccccatgtctccagtcttcgctttgttttagggaaattcagagtgttccgactggcagggccagagagtttggtaggaaggccctcctgcccgttccccagga

SEQ ID NO: 3167 - DNA, 6000 bp, Homo sapiens
ctcgatctcctgaccttgtgatccgcctgcctcagcctcccaaagtgctgggattagaggtgtgagccagcgtgcccggccaagaggttgttctttcccaaagttctctgcaaacattcaggcgccatcatcctgggccaggcctgaggatgggcactgcactagggataccaagacaaagacagcaccctgccctctaggacctaatggtctagtgagggagatcgatgtgtaaaacagcagactcatagacaggttttgaatagagaagggagtgttagagcatagtgcttgaggattaggagacaaagggaacagagagaccggggacaacaagcaaacctctcccacgacaccctttggccgaggacaggcctcgaaagcagctgtggaacttggaggcgccatgtgggagacaaaccctgcagcctcaagcccaacaatgaacaaaggctgccgggctctctggcaggagaggagatctgacaacggcctggcccgccgtttgatcagtgtagacattccttctagactttgaagcctgaagtgctctcctttagctgtctacacagatcaaataagctggatgactgccctatctccacttcgttgtgtggctccatagtcacagccagctccataacaatccaaccaaaccatctgagcagaagcaaaaataattcttatgggcaaagatagacagttccaagatgtgaacattaactccttgctgccacttcagaagagagtggatcttgaagttcgttttaggaagctttcgagaagggcgattctgcccctctccaaggtgaagtggcaaaactgttgtctctccttacagttgaaagcccttcctattccaaggcttatataggacacccacaaaagctgacaataatgagctgtgatctggctcttgggaaggcagccccaccctaaagaacaaggatcagactgggtgtggtggctcatgcctgtaatcccagcactttgggaggctgagacaagaggattgcttgaacccaggagttcgaggccaacctgggcaacatagtgagaccctgtctcaattttttttaagtcaaataataataataataataataataataataataataataataataataaaaggacaggaatcccacctcaaaagcacctttttattcaaaggctcattctaggggaaactttaacccagccctctcagtcctcaagcagctgtgaggagcttggaacattgtcacagactggcagaaccaggcatctcccaacaaacccagaagccaagtggcattgctaaaaaagattaaaaatgaacatgagttctaacatctacgttccttgctatggtttccatggaaatagacatctgctctagggagaaagaaaatgtggggggaagcagtgtaagtgctttcaaattatcagtgttttgaaagatttatttcttttttctgtcacaacattaatagtcaggaatgtgagacttttgtgtggcaatttattgtacttaaaaaaatgcattaaatgagtgggaccttcctctgtgaacctccagatcaaatacaaagacttcaagataaaaagcctgttcagtgggtaaggacctcttgggcttgggttccttgctcatttgtgttgcctgcctatctgtcgctttcctgaggggtctcatgcccatccttctccaacttttctaatgatgtctgagattctgttcagaaaaatgacagacggaagcacctagccattttgaagctaagtttggtctgagaagaagcctttcaaggctcagtatctgaattattcctggtcctgctcacaggctaagtgaaaaccacttcgattggcttgggggggaggccgaccccacacaagggcgattgttggaaaaaatgccgcaacaagcatatttcaggcaacagcgcattgctaattgtttgctttgtgtagtgtgctgctgcttgtatgatccagtttttattgtcttgggcaccccttagttgtattttatctctggcacatccctggtgactaactaggcatgagagtctttctaaattaggactgttgtttcaggaaggttggtcacatttgtttcttgatttggggagatgcagctcattaataaaataaagatatctcttctgcttagtcaagatctcaaagcaggtgtcttggtgtattgaccaccaaccgaggacacggtcttggtcagagaatgggaggaggcggggaccatgttcatttcatttatttttttcccctttttgtgagagaaagggccagttattctaaggcacggtcagaccaatttcctttgtgcctttgctgaggttctgagctatccaggtcagggagaacagtgaccttgtggctcctttttcgatttttaaaaagaacccagtgctgctctggggagcacgtgctctgagaacaaaagcaacacttaactgcaatctgtgtagtctagaacggctattgctcttcctcccctatcatccgcagaaggcttggaagaacagatggagtctgcatttaagctgagtggctttgttagaccaaaggcgatcaaattccagagccccacgctttcccgcacaggtccctggtcaccggctcgggaacctgaggatgctggcaagaacgcacacagtgagggaagggccacgcccgcgacctgtgggctgagtggattagaaattacgatgatgtcacaatatgggtgacacgccggtgtcggtgtagggtgccgggggcagggggccctgcaggggcgtggagtggcattgtgctgtcacaggggctcgggcgtcttaggcacccatgtgggtggcgcactagaaggggcactgctctgtccgagtgctgcccttggggcgaggcgggcatgtggctctacaaggtggagtccaggcggccaaagtttggaaaggtagggaaggacccccccgccctccgcctgctccgccctgcccttgttctcgagaatggggagctggttcggacctagtccggggtccactgccacgccctcttccacggcgagaccacccccctagtcccaggcccacacctggggatgctccccaggcgccctgcaacccccggcattgtcctcctgccctccgggacaggactacacttcccgaggtgcttcggggtcccggggggcggcgctccacgcgggttgtggggggcgggggcggcacgtgccgccgctctcggccaatgcggagccccgcgcggaggtcacgtgcctctgtttggcgcttttgtgcgcgcccgggtctgttggtgctcagagtgtggtcaggcggctcggactgagcaggtgggtgcggggctcggaggaggcggcggctggctgaggccagcaagagggacgcggtcggcgggaggggctgggccgtggcagcgaccccctgctgcagggcggcgggcggggctgcgggcctcggaggggttggtgggcgggggtcgctccgctttgtgtgtggctcgggcggagcctcgcctttgtccccgctctccgggggcgcggctgttcgtgggcagggggctgggcgatcaccgggcgtccgctccggggtgccgtcgaggagacaatagggggcgtgggccctcgtttacctccctccctccctcccttccctgcgggccccgccgggttccccattgtctgaagggacggggcggtgccccagggaccagcggctttaggaccaaactgcgggcagccagggccgcgaccctccctgcgaccgtcccctggcgaccgcagctggtgattgaggggcggcgctcccgggccccacgagggttcttctgtcttcgcggccggacgcgcggacagcgtgggtggcggcaggttgggcatggggacggcgggaggcggtggcgagctcaccgcgggaccacccgggggcctgttcccggggcctgccccacccgctgaactgtgaagggggtggtggcggcggcctggaggtgtttttggcgggagttggggggggcgtccgcgcagggggagtcaggcaggggcggagttacccggattggaccgttagccccgcccacccctccccttcccacgcgcgcgggctccggggtgttgagttcggggagattcgaaaaggcgcggggaggaagggggcggggccaggggccggagcgcaaggcgtgctctgattggccgggggcgaccggtcctcttttcctcgcccggaccagggccacgcccatcctgggtccggtgctgcgtctaattctctgcttttcttaaatcttgtcgctgcctctgattttaattcctagcttttgggaacctgtcatcctacgtttttggtactagctggcgtctacaaaagtcataatgttaaaaagatcaacaagagatacagcatttttcatgacataacggcagcaaatataagtcaaaatctagaggttcataaacattttgcttgctgttgggcaaggaagcttaaacctgagggacaataggagttcaacattattggttactattagcttgggcgttttcttatccaccacgtcagacacagacaaagcaggggtgggtatttcatttgcacaatgagttgtaggcagtattaagatggctccgggggcactgttgagttgaatctggaatatcttcttacagtttcggtgaaatgttaaagagtttatgggggaaaaattcttcacccttgtgactttgtctgattttaaaaatccaagagttttatgaccgagaaagctcagttaacttgattttctggaaccaatatcatattcaggtcatatttcccaatgtttatttagtagattttgataatttttttcgtggttaatttagacgtctttattccacgtatttttctgacgatgtatgtagatgtgatgtgagatttttttgggttgatgacatatagaaaggcaaagaaagtgattgcatgtttttgaaaatcattttcaggactttccttatcccagttgattgtgcagaatacactgcctgtcgcttgtcttctattcaccatggcttcttctggtaggtaatctatttggaaaatctgaaattgtaatgggcttatgattttagattgagatggctcaggtcttcgcctttgatttggcacttatgttttggtcttaccaaaacctattttatgaataggagaagaatttaaaaatgattatcacttgaatgtgccgagagctcgtaattgtttattggacagtttggcttagtctgaagcaaaattgtggagtttgcacaagtcttttgtttatgaaagcgattgtcagatactgatgtctcaaaacagtatttattaatccaaaaatgttgagctttgtttttctgggagatggtttttattttttttgagacagggtctcaccttgttgcccaggctggagtgcagtggcttaattatagctcattgcagccttgacttctggagctcaagtgggctcaagcgattctcccacctcagcctccatagcatctgggactatcgacatgggccaccacacccacctaatcaaaaaaaattttttttgtagagatgggctttccctttgttgcccaggctggtctcaaacttcagggctcaagggatcttcccatgttggcctcccacggtgctgggattataggcatgagccatggtacctggccttgggaaatggtatttagataataatatcttgcctgcaaatacatcttcccctagtgtcagtagactgataggaataaaaaggggaaaaaaaacacaactttcctcatcagccctagtttaatacattaaattgatttgggttttagaaaattatagtacagtttattagaacaggagaatcctggttttctgaattataaatataatcaattctagatatccaggtgaaagaactggagaagcgtgcctcaggccaggcttttgagctgattctcagccctcggtcaaaagaatctgttcc

SEQ ID NO: 3168 - DNA, 6000 bp, Homo sapiens
tttatgaacagaccaaccagcccaaggaacatctcactgattttaaattggatcttctcggcttagcgactgaagactgacacagcccgatcgcctcggaagccccctgggccatcatggacgccgagcttcgggtaactcttacagtggaggacaggaatgtcaggcctctgagcccaagctaagccatcatatccccagtgacctgcacgtatatatcaagatggcctgaagcaactgaagatccacagaagtgaaaatagccttaactgatgacattccaccattgtgatttgtttctgccccaccttaactgatcaatgtactttgtaatctcccccacccttaagaaggttctttataatgtcacccacccttaagaagtttctttgtaattctccccacccttgagaatgtactttgtgagatccatcccctgcccccaaaacattgctcttaactctactgcctatcccaaaacctataagaaccaatgataatcccaccaccctttgctgactctcttttcggactcagcccgcctgcatccaggtgaaataaacagccttgttgctcaaaaaaataaaaataaaaataaaaataaaaaataaagtgttaaatgaattgaatttaaccccatgggaagagttaacccagtaactacaatttccatcaaagggtgaaagtctaatagtcattcactcattcaataacctatagcaggccaggcaccgcggctcacgcctgtaatccctgcactttgggaggccgaggcaggtggatcacctgaggtcaggagtttgagaccagcctgatcaacgtgatgaaaccccatctctactaaaaatacaaaaaattagctgggcatggtggcgcacacctgtaatcccagctactcaggaggctgaggcgggagaatcgcttgaacctgggaggcggaggttgcagtgagctgagattgcaccactgcactgcagcctgggcaacaaaagcaaaactccgtctcaaaaaataaaaataaaataatctatagcaatcaggaaacatctctagcaatgatacctaacaagtgcacagcactttaaatgtgccaggcattgtgctgttttcatttacattatttcatttaatcctcaccactcccagagtgcaagtgtctaatatcacagaagagacagaagatcacagaaggatgagagaggttgttctttttttttttttttgtgagacggagtcttgctgtgtcgcccaggctggaaggcagtggcgtgaactcggctcactgcaacctccacctcccaggttcatgccattctcctgcctcagcctcgtgcgtagctgggactacaggcgcccgccaccatgcctggctaattttttgtatttttagtagagacggggtttcatcgtgttagccaggatggtctcgatctcctgaccttgtgatccgcctgcctcagcctcccaaagtgctgggattagaggtgtgagccagcgtgcccggccaagaggttgttctttcccaaagttctctgcaaacattcaggcgccatcatcctgggccaggcctgaggatgggcactgcactagggataccaagacaaagacagcaccctgccctctaggacctaatggtctagtgagggagatcgatgtgtaaaacagcagactcatagacaggttttgaatagagaagggagtgttagagcatagtgcttgaggattaggagacaaagggaacagagagaccggggacaacaagcaaacctctcccacgacaccctttggccgaggacaggcctcgaaagcagctgtggaacttggaggcgccatgtgggagacaaaccctgcagcctcaagcccaacaatgaacaaaggctgccgggctctctggcaggagaggagatctgacaacggcctggcccgccgtttgatcagtgtagacattccttctagactttgaagcctgaagtgctctcctttagctgtctacacagatcaaataagctggatgactgccctatctccacttcgttgtgtggctccatagtcacagccagctccataacaatccaaccaaaccatctgagcagaagcaaaaataattcttatgggcaaagatagacagttccaagatgtgaacattaactccttgctgccacttcagaagagagtggatcttgaagttcgttttaggaagctttcgagaagggcgattctgcccctctccaaggtgaagtggcaaaactgttgtctctccttacagttgaaagcccttcctattccaaggcttatataggacacccacaaaagctgacaataatgagctgtgatctggctcttgggaaggcagccccaccctaaagaacaaggatcagactgggtgtggtggctcatgcctgtaatcccagcactttgggaggctgagacaagaggattgcttgaacccaggagttcgaggccaacctgggcaacatagtgagaccctgtctcaattttttttaagtcaaataataataataataataataataataataataataataataataataaaaggacaggaatcccacctcaaaagcacctttttattcaaaggctcattctaggggaaactttaacccagccctctcagtcctcaagcagctgtgaggagcttggaacattgtcacagactggcagaaccaggcatctcccaacaaacccagaagccaagtggcattgctaaaaaagattaaaaatgaacatgagttctaacatctacgttccttgctatggtttccatggaaatagacatctgctctagggagaaagaaaatgtggggggaagcagtgtaagtgctttcaaattatcagtgttttgaaagatttatttcttttttctgtcacaacattaatagtcaggaatgtgagacttttgtgtggcaatttattgtacttaaaaaaatgcattaaatgagtgggaccttcctctgtgaacctccagatcaaatacaaagacttcaagataaaaagcctgttcagtgggtaaggacctcttgggcttgggttccttgctcatttgtgttgcctgcctatctgtcgctttcctgaggggtctcatgcccatccttctccaacttttctaatgatgtctgagattctgttcagaaaaatgacagacggaagcacctagccattttgaagctaagtttggtctgagaagaagcctttcaaggctcagtatctgaattattcctggtcctgctcacaggctaagtgaaaaccacttcgattggcttgggggggaggccgaccccacacaagggcgattgttggaaaaaatgccgcaacaagcatatttcaggcaacagcgcattgctaattgtttgctttgtgtagtgtgctgctgcttgtatgatccagtttttattgtcttgggcaccccttagttgtattttatctctggcacatccctggtgactaactaggcatgagagtctttctaaattaggactgttgtttcaggaaggttggtcacatttgtttcttgatttggggagatgcagctcattaataaaataaagatatctcttctgcttagtcaagatctcaaagcaggtgtcttggtgtattgaccaccaaccgaggacacggtcttggtcagagaatgggaggaggcggggaccatgttcatttcatttatttttttcccctttttgtgagagaaagggccagttattctaaggcacggtcagaccaatttcctttgtgcctttgctgaggttctgagctatccaggtcagggagaacagtgaccttgtggctcctttttcgatttttaaaaagaacccagtgctgctctggggagcacgtgctctgagaacaaaagcaacacttaactgcaatctgtgtagtctagaacggctattgctcttcctcccctatcatccgcagaaggcttggaagaacagatggagtctgcatttaagctgagtggctttgttagaccaaaggcgatcaaattccagagccccacgctttcccgcacaggtccctggtcaccggctcgggaacctgaggatgctggcaagaacgcacacagtgagggaagggccacgcccgcgacctgtgggctgagtggattagaaattacgatgatgtcacaatatgggtgacacgccggtgtcggtgtagggtgccgggggcagggggccctgcaggggcgtggagtggcattgtgctgtcacaggggctcgggcgtcttaggcacccatgtgggtggcgcactagaaggggcactgctctgtccgagtgctgcccttggggcgaggcgggcatgtggctctacaaggtggagtccaggcggccaaagtttggaaaggtagggaaggacccccccgccctccgcctgctccgccctgcccttgttctcgagaatggggagctggttcggacctagtccggggtccactgccacgccctcttccacggcgagaccacccccctagtcccaggcccacacctggggatgctccccaggcgccctgcaacccccggcattgtcctcctgccctccgggacaggactacacttcccgaggtgcttcggggtcccggggggcggcgctccacgcgggttgtggggggcgggggcggcacgtgccgccgctctcggccaatgcggagccccgcgcggaggtcacgtgcctctgtttggcgcttttgtgcgcgcccgggtctgttggtgctcagagtgtggtcaggcggctcggactgagcaggtgggtgcggggctcggaggaggcggcggctggctgaggccagcaagagggacgcggtcggcgggaggggctgggccgtggcagcgaccccctgctgcagggcggcgggcggggctgcgggcctcggaggggttggtgggcgggggtcgctccgctttgtgtgtggctcgggcggagcctcgcctttgtccccgctctccgggggcgcggctgttcgtgggcagggggctgggcgatcaccgggcgtccgctccggggtgccgtcgaggagacaatagggggcgtgggccctcgtttacctccctccctccctcccttccctgcgggccccgccgggttccccattgtctgaagggacggggcggtgccccagggaccagcggctttaggaccaaactgcgggcagccagggccgcgaccctccctgcgaccgtcccctggcgaccgcagctggtgattgaggggcggcgctcccgggccccacgagggttcttctgtcttcgcggccggacgcgcggacagcgtgggtggcggcaggttgggcatggggacggcgggaggcggtggcgagctcaccgcgggaccacccgggggcctgttcccggggcctgccccacccgctgaactgtgaagggggtggtggcggcggcctggaggtgtttttggcgggagttggggggggcgtccgcgcagggggagtcaggcaggggcggagttacccggattggaccgttagccccgcccacccctccccttcccacgcgcgcgggctccggggtgttgagttcggggagattcgaaaaggcgcggggaggaagggggcggggccaggggccggagcgcaaggcgtgctctgattggccgggggcgaccggtcctcttttcctcgcccggaccagggccacgcccatcctgggtccggtgctgcgtctaattctctgcttttcttaaatcttgtcgctgcctctgattttaattcctagcttttgggaacctgtcatcctacgtttttggtactagctggcgtctacaaaagtcataatgttaaaaagatcaacaagagatacagcatttttcatgacataacggcagcaaatataagtcaaaatctagaggttcataaacattttgcttgctgttgggcaaggaagcttaaacctgagggacaataggagttcaacattattggttactattagcttgggcgttttcttatccaccacgtcagacacaga

SEQ ID NO: 3169 - DNA, 6000 bp, Homo sapiens
gtacacatgaagaaactcctggatacacaggaaactgattaacagagattatggtgggggagtggttggtagagaacttggaagataaggagggcttcttatactttatttttaaaccatgtgaatgtgttacctatttaaagtgttacatgagagcttctgaccagaggctacatttcccagcctgtaagaatggccaccctataggctgcaaatctttatgagaaataaagctctcctttccaaatttatgaacagaccaaccagcccaaggaacatctcactgattttaaattggatcttctcggcttagcgactgaagactgacacagcccgatcgcctcggaagccccctgggccatcatggacgccgagcttcgggtaactcttacagtggaggacaggaatgtcaggcctctgagcccaagctaagccatcatatccccagtgacctgcacgtatatatcaagatggcctgaagcaactgaagatccacagaagtgaaaatagccttaactgatgacattccaccattgtgatttgtttctgccccaccttaactgatcaatgtactttgtaatctcccccacccttaagaaggttctttataatgtcacccacccttaagaagtttctttgtaattctccccacccttgagaatgtactttgtgagatccatcccctgcccccaaaacattgctcttaactctactgcctatcccaaaacctataagaaccaatgataatcccaccaccctttgctgactctcttttcggactcagcccgcctgcatccaggtgaaataaacagccttgttgctcaaaaaaataaaaataaaaataaaaataaaaaataaagtgttaaatgaattgaatttaaccccatgggaagagttaacccagtaactacaatttccatcaaagggtgaaagtctaatagtcattcactcattcaataacctatagcaggccaggcaccgcggctcacgcctgtaatccctgcactttgggaggccgaggcaggtggatcacctgaggtcaggagtttgagaccagcctgatcaacgtgatgaaaccccatctctactaaaaatacaaaaaattagctgggcatggtggcgcacacctgtaatcccagctactcaggaggctgaggcgggagaatcgcttgaacctgggaggcggaggttgcagtgagctgagattgcaccactgcactgcagcctgggcaacaaaagcaaaactccgtctcaaaaaataaaaataaaataatctatagcaatcaggaaacatctctagcaatgatacctaacaagtgcacagcactttaaatgtgccaggcattgtgctgttttcatttacattatttcatttaatcctcaccactcccagagtgcaagtgtctaatatcacagaagagacagaagatcacagaaggatgagagaggttgttctttttttttttttttgtgagacggagtcttgctgtgtcgcccaggctggaaggcagtggcgtgaactcggctcactgcaacctccacctcccaggttcatgccattctcctgcctcagcctcgtgcgtagctgggactacaggcgcccgccaccatgcctggctaattttttgtatttttagtagagacggggtttcatcgtgttagccaggatggtctcgatctcctgaccttgtgatccgcctgcctcagcctcccaaagtgctgggattagaggtgtgagccagcgtgcccggccaagaggttgttctttcccaaagttctctgcaaacattcaggcgccatcatcctgggccaggcctgaggatgggcactgcactagggataccaagacaaagacagcaccctgccctctaggacctaatggtctagtgagggagatcgatgtgtaaaacagcagactcatagacaggttttgaatagagaagggagtgttagagcatagtgcttgaggattaggagacaaagggaacagagagaccggggacaacaagcaaacctctcccacgacaccctttggccgaggacaggcctcgaaagcagctgtggaacttggaggcgccatgtgggagacaaaccctgcagcctcaagcccaacaatgaacaaaggctgccgggctctctggcaggagaggagatctgacaacggcctggcccgccgtttgatcagtgtagacattccttctagactttgaagcctgaagtgctctcctttagctgtctacacagatcaaataagctggatgactgccctatctccacttcgttgtgtggctccatagtcacagccagctccataacaatccaaccaaaccatctgagcagaagcaaaaataattcttatgggcaaagatagacagttccaagatgtgaacattaactccttgctgccacttcagaagagagtggatcttgaagttcgttttaggaagctttcgagaagggcgattctgcccctctccaaggtgaagtggcaaaactgttgtctctccttacagttgaaagcccttcctattccaaggcttatataggacacccacaaaagctgacaataatgagctgtgatctggctcttgggaaggcagccccaccctaaagaacaaggatcagactgggtgtggtggctcatgcctgtaatcccagcactttgggaggctgagacaagaggattgcttgaacccaggagttcgaggccaacctgggcaacatagtgagaccctgtctcaattttttttaagtcaaataataataataataataataataataataataataataataataataaaaggacaggaatcccacctcaaaagcacctttttattcaaaggctcattctaggggaaactttaacccagccctctcagtcctcaagcagctgtgaggagcttggaacattgtcacagactggcagaaccaggcatctcccaacaaacccagaagccaagtggcattgctaaaaaagattaaaaatgaacatgagttctaacatctacgttccttgctatggtttccatggaaatagacatctgctctagggagaaagaaaatgtggggggaagcagtgtaagtgctttcaaattatcagtgttttgaaagatttatttcttttttctgtcacaacattaatagtcaggaatgtgagacttttgtgtggcaatttattgtacttaaaaaaatgcattaaatgagtgggaccttcctctgtgaacctccagatcaaatacaaagacttcaagataaaaagcctgttcagtgggtaaggacctcttgggcttgggttccttgctcatttgtgttgcctgcctatctgtcgctttcctgaggggtctcatgcccatccttctccaacttttctaatgatgtctgagattctgttcagaaaaatgacagacggaagcacctagccattttgaagctaagtttggtctgagaagaagcctttcaaggctcagtatctgaattattcctggtcctgctcacaggctaagtgaaaaccacttcgattggcttgggggggaggccgaccccacacaagggcgattgttggaaaaaatgccgcaacaagcatatttcaggcaacagcgcattgctaattgtttgctttgtgtagtgtgctgctgcttgtatgatccagtttttattgtcttgggcaccccttagttgtattttatctctggcacatccctggtgactaactaggcatgagagtctttctaaattaggactgttgtttcaggaaggttggtcacatttgtttcttgatttggggagatgcagctcattaataaaataaagatatctcttctgcttagtcaagatctcaaagcaggtgtcttggtgtattgaccaccaaccgaggacacggtcttggtcagagaatgggaggaggcggggaccatgttcatttcatttatttttttcccctttttgtgagagaaagggccagttattctaaggcacggtcagaccaatttcctttgtgcctttgctgaggttctgagctatccaggtcagggagaacagtgaccttgtggctcctttttcgatttttaaaaagaacccagtgctgctctggggagcacgtgctctgagaacaaaagcaacacttaactgcaatctgtgtagtctagaacggctattgctcttcctcccctatcatccgcagaaggcttggaagaacagatggagtctgcatttaagctgagtggctttgttagaccaaaggcgatcaaattccagagccccacgctttcccgcacaggtccctggtcaccggctcgggaacctgaggatgctggcaagaacgcacacagtgagggaagggccacgcccgcgacctgtgggctgagtggattagaaattacgatgatgtcacaatatgggtgacacgccggtgtcggtgtagggtgccgggggcagggggccctgcaggggcgtggagtggcattgtgctgtcacaggggctcgggcgtcttaggcacccatgtgggtggcgcactagaaggggcactgctctgtccgagtgctgcccttggggcgaggcgggcatgtggctctacaaggtggagtccaggcggccaaagtttggaaaggtagggaaggacccccccgccctccgcctgctccgccctgcccttgttctcgagaatggggagctggttcggacctagtccggggtccactgccacgccctcttccacggcgagaccacccccctagtcccaggcccacacctggggatgctccccaggcgccctgcaacccccggcattgtcctcctgccctccgggacaggactacacttcccgaggtgcttcggggtcccggggggcggcgctccacgcgggttgtggggggcgggggcggcacgtgccgccgctctcggccaatgcggagccccgcgcggaggtcacgtgcctctgtttggcgcttttgtgcgcgcccgggtctgttggtgctcagagtgtggtcaggcggctcggactgagcaggtgggtgcggggctcggaggaggcggcggctggctgaggccagcaagagggacgcggtcggcgggaggggctgggccgtggcagcgaccccctgctgcagggcggcgggcggggctgcgggcctcggaggggttggtgggcgggggtcgctccgctttgtgtgtggctcgggcggagcctcgcctttgtccccgctctccgggggcgcggctgttcgtgggcagggggctgggcgatcaccgggcgtccgctccggggtgccgtcgaggagacaatagggggcgtgggccctcgtttacctccctccctccctcccttccctgcgggccccgccgggttccccattgtctgaagggacggggcggtgccccagggaccagcggctttaggaccaaactgcgggcagccagggccgcgaccctccctgcgaccgtcccctggcgaccgcagctggtgattgaggggcggcgctcccgggccccacgagggttcttctgtcttcgcggccggacgcgcggacagcgtgggtggcggcaggttgggcatggggacggcgggaggcggtggcgagctcaccgcgggaccacccgggggcctgttcccggggcctgccccacccgctgaactgtgaagggggtggtggcggcggcctggaggtgtttttggcgggagttggggggggcgtccgcgcagggggagtcaggcaggggcggagttacccggattggaccgttagccccgcccacccctccccttcccacgcgcgcgggctccggggtgttgagttcggggagattcgaaaaggcgcggggaggaagggggcggggccaggggccggagcgcaaggcgtgctctgattggccgggggcgaccggtcctcttttcctcgcccggaccagggccacgcccatcctgggtccggtgctgcgtctaattctctgcttttcttaaatcttgtcgctgcctctgattttaattcctagctttt

SEQ ID NO: 3170 - DNA, 6000 bp, Homo sapiens
gttgagattgtgccgctgcactccagcctgggtgacagagcgagatcctgtctccttcagcttgggttacagagtaagattctgactcaaaaaacaaagagacagggtctcgttctgtcacccaggctggggaacagcggcgtgatcatggctcactgcaggtggtcctcccaccttagctaggactacaggcccgtgccaccatgcccagctaattttatttatttatttgtattttttcatttatttgtagagacaggttcttgctatgtagcccagggtggtctcaaactctaagcctcaggtgattattctgccctggcttcccaaagtgctgggattacaggtgtgagctaccacacccagaccctgacatgtattgttaagtgaaaactgctaagcaaagaacagttacaggaggctatcatgtgtgtaaaaagagaggggatatgaatgcatacctacaagtttgcttgtgtacacatgaagaaactcctggatacacaggaaactgattaacagagattatggtgggggagtggttggtagagaacttggaagataaggagggcttcttatactttatttttaaaccatgtgaatgtgttacctatttaaagtgttacatgagagcttctgaccagaggctacatttcccagcctgtaagaatggccaccctataggctgcaaatctttatgagaaataaagctctcctttccaaatttatgaacagaccaaccagcccaaggaacatctcactgattttaaattggatcttctcggcttagcgactgaagactgacacagcccgatcgcctcggaagccccctgggccatcatggacgccgagcttcgggtaactcttacagtggaggacaggaatgtcaggcctctgagcccaagctaagccatcatatccccagtgacctgcacgtatatatcaagatggcctgaagcaactgaagatccacagaagtgaaaatagccttaactgatgacattccaccattgtgatttgtttctgccccaccttaactgatcaatgtactttgtaatctcccccacccttaagaaggttctttataatgtcacccacccttaagaagtttctttgtaattctccccacccttgagaatgtactttgtgagatccatcccctgcccccaaaacattgctcttaactctactgcctatcccaaaacctataagaaccaatgataatcccaccaccctttgctgactctcttttcggactcagcccgcctgcatccaggtgaaataaacagccttgttgctcaaaaaaataaaaataaaaataaaaataaaaaataaagtgttaaatgaattgaatttaaccccatgggaagagttaacccagtaactacaatttccatcaaagggtgaaagtctaatagtcattcactcattcaataacctatagcaggccaggcaccgcggctcacgcctgtaatccctgcactttgggaggccgaggcaggtggatcacctgaggtcaggagtttgagaccagcctgatcaacgtgatgaaaccccatctctactaaaaatacaaaaaattagctgggcatggtggcgcacacctgtaatcccagctactcaggaggctgaggcgggagaatcgcttgaacctgggaggcggaggttgcagtgagctgagattgcaccactgcactgcagcctgggcaacaaaagcaaaactccgtctcaaaaaataaaaataaaataatctatagcaatcaggaaacatctctagcaatgatacctaacaagtgcacagcactttaaatgtgccaggcattgtgctgttttcatttacattatttcatttaatcctcaccactcccagagtgcaagtgtctaatatcacagaagagacagaagatcacagaaggatgagagaggttgttctttttttttttttttgtgagacggagtcttgctgtgtcgcccaggctggaaggcagtggcgtgaactcggctcactgcaacctccacctcccaggttcatgccattctcctgcctcagcctcgtgcgtagctgggactacaggcgcccgccaccatgcctggctaattttttgtatttttagtagagacggggtttcatcgtgttagccaggatggtctcgatctcctgaccttgtgatccgcctgcctcagcctcccaaagtgctgggattagaggtgtgagccagcgtgcccggccaagaggttgttctttcccaaagttctctgcaaacattcaggcgccatcatcctgggccaggcctgaggatgggcactgcactagggataccaagacaaagacagcaccctgccctctaggacctaatggtctagtgagggagatcgatgtgtaaaacagcagactcatagacaggttttgaatagagaagggagtgttagagcatagtgcttgaggattaggagacaaagggaacagagagaccggggacaacaagcaaacctctcccacgacaccctttggccgaggacaggcctcgaaagcagctgtggaacttggaggcgccatgtgggagacaaaccctgcagcctcaagcccaacaatgaacaaaggctgccgggctctctggcaggagaggagatctgacaacggcctggcccgccgtttgatcagtgtagacattccttctagactttgaagcctgaagtgctctcctttagctgtctacacagatcaaataagctggatgactgccctatctccacttcgttgtgtggctccatagtcacagccagctccataacaatccaaccaaaccatctgagcagaagcaaaaataattcttatgggcaaagatagacagttccaagatgtgaacattaactccttgctgccacttcagaagagagtggatcttgaagttcgttttaggaagctttcgagaagggcgattctgcccctctccaaggtgaagtggcaaaactgttgtctctccttacagttgaaagcccttcctattccaaggcttatataggacacccacaaaagctgacaataatgagctgtgatctggctcttgggaaggcagccccaccctaaagaacaaggatcagactgggtgtggtggctcatgcctgtaatcccagcactttgggaggctgagacaagaggattgcttgaacccaggagttcgaggccaacctgggcaacatagtgagaccctgtctcaattttttttaagtcaaataataataataataataataataataataataataataataataataaaaggacaggaatcccacctcaaaagcacctttttattcaaaggctcattctaggggaaactttaacccagccctctcagtcctcaagcagctgtgaggagcttggaacattgtcacagactggcagaaccaggcatctcccaacaaacccagaagccaagtggcattgctaaaaaagattaaaaatgaacatgagttctaacatctacgttccttgctatggtttccatggaaatagacatctgctctagggagaaagaaaatgtggggggaagcagtgtaagtgctttcaaattatcagtgttttgaaagatttatttcttttttctgtcacaacattaatagtcaggaatgtgagacttttgtgtggcaatttattgtacttaaaaaaatgcattaaatgagtgggaccttcctctgtgaacctccagatcaaatacaaagacttcaagataaaaagcctgttcagtgggtaaggacctcttgggcttgggttccttgctcatttgtgttgcctgcctatctgtcgctttcctgaggggtctcatgcccatccttctccaacttttctaatgatgtctgagattctgttcagaaaaatgacagacggaagcacctagccattttgaagctaagtttggtctgagaagaagcctttcaaggctcagtatctgaattattcctggtcctgctcacaggctaagtgaaaaccacttcgattggcttgggggggaggccgaccccacacaagggcgattgttggaaaaaatgccgcaacaagcatatttcaggcaacagcgcattgctaattgtttgctttgtgtagtgtgctgctgcttgtatgatccagtttttattgtcttgggcaccccttagttgtattttatctctggcacatccctggtgactaactaggcatgagagtctttctaaattaggactgttgtttcaggaaggttggtcacatttgtttcttgatttggggagatgcagctcattaataaaataaagatatctcttctgcttagtcaagatctcaaagcaggtgtcttggtgtattgaccaccaaccgaggacacggtcttggtcagagaatgggaggaggcggggaccatgttcatttcatttatttttttcccctttttgtgagagaaagggccagttattctaaggcacggtcagaccaatttcctttgtgcctttgctgaggttctgagctatccaggtcagggagaacagtgaccttgtggctcctttttcgatttttaaaaagaacccagtgctgctctggggagcacgtgctctgagaacaaaagcaacacttaactgcaatctgtgtagtctagaacggctattgctcttcctcccctatcatccgcagaaggcttggaagaacagatggagtctgcatttaagctgagtggctttgttagaccaaaggcgatcaaattccagagccccacgctttcccgcacaggtccctggtcaccggctcgggaacctgaggatgctggcaagaacgcacacagtgagggaagggccacgcccgcgacctgtgggctgagtggattagaaattacgatgatgtcacaatatgggtgacacgccggtgtcggtgtagggtgccgggggcagggggccctgcaggggcgtggagtggcattgtgctgtcacaggggctcgggcgtcttaggcacccatgtgggtggcgcactagaaggggcactgctctgtccgagtgctgcccttggggcgaggcgggcatgtggctctacaaggtggagtccaggcggccaaagtttggaaaggtagggaaggacccccccgccctccgcctgctccgccctgcccttgttctcgagaatggggagctggttcggacctagtccggggtccactgccacgccctcttccacggcgagaccacccccctagtcccaggcccacacctggggatgctccccaggcgccctgcaacccccggcattgtcctcctgccctccgggacaggactacacttcccgaggtgcttcggggtcccggggggcggcgctccacgcgggttgtggggggcgggggcggcacgtgccgccgctctcggccaatgcggagccccgcgcggaggtcacgtgcctctgtttggcgcttttgtgcgcgcccgggtctgttggtgctcagagtgtggtcaggcggctcggactgagcaggtgggtgcggggctcggaggaggcggcggctggctgaggccagcaagagggacgcggtcggcgggaggggctgggccgtggcagcgaccccctgctgcagggcggcgggcggggctgcgggcctcggaggggttggtgggcgggggtcgctccgctttgtgtgtggctcgggcggagcctcgcctttgtccccgctctccgggggcgcggctgttcgtgggcagggggctgggcgatcaccgggcgtccgctccggggtgccgtcgaggagacaatagggggcgtgggccctcgtttacctccctccctccctcccttccctgcgggccccgccgggttccccattgtctgaagggacggggcggtgccccagggaccagcggctttaggaccaaactgcgggcagccagggccgcgaccctccctgcgaccgtcccctggcgaccgcagctggtgattgaggggcggcgctcccgggccccacgagggttcttctgtcttcgcggccgga

SEQ ID NO: 3171 - DNA, 6000 bp, Homo sapiens
cccagagagccaggcctggccagggctttggtctgcatcaagtttggaagtgataagacccaagagctgcctacctctgcctgctgacgacacggtcagtcctgccagggctcttcctgagcccacagagcttccttctcagatgctgatagtctctcccttccagccatactgggcatgcagaattcagggatcccctccatctgatatagatatgttgtggcaatatatacgtgggtattattggaagtggcaatattgtatctgtgtgtgaacatgagagattgtataagtctatgttctcctatagaggagagctctatgtgggtccatgtcaccggagagggctgtgtatatctgtgtgtgtgtgtgtgtgtgtgtgtgtgtgtgtgtgtgtgtatccctacatggggggtggggggacagtgtgggggcatccgcatttgtgcatgctagcaggaatggctgcatctgtctgtatctgtgataggcaatggagagaaatgcttgaaagctcagattctggagccaaacaccaggatacatcatgtctgtggccttcttttttgagacagagtttcactatgctgcccaggctggagtacagtggcatgatcatagctcactgcagcctctatctcctggtcttgagtggtcctcctgcctcagcctctcgaggcacgtgccaccatgccaagctaatttttggagtttttttggtttttttttgttttttttttttttgagacagagcttcactgtcactcaggctggagtgcagtgacaggcgtaagccaccgtgcctggccaatttttgtattttttgtagagatgggatttgccatattgcccaggttggtctcgaattcctggacccaagcaatcctcttgccttggcttcccaaagttctgggattacagatatgagccactgtgactggccaaccctgggcaggtttccaaacctctctgtgcttcagttgcctcatcagtaataataatacttaggccaggtgcagtggctcacccctgtaatcccaacactttgggaggccaaggcaggtggatcacttgaggtcaggaattcaagaccagcctggccaacatagtgaaaacccatcgctactaaaaatacagaaattagcctggcatggtgttgggtgcctgtaatcccagctactcaggaggctgaggcaagagaatggcttgaacccaggaggcggaggttgcagtgagctgagatcatgccattgcactccagcctgggtgacaagagtgaaactccctctcaaaataaataaattaataataataatactacttaaatcatagggttgtgtggataaaatgagataatataggtaaagtgcttaatgcagtggccagcgcatatagtaagcgctataaattttgtatttgctattcttttatagaggatgtgtgtgtgtgtgtgtgtgtgtgtgtgtgttcatgtgcatgcacatctatgtgcagacggatgagggctggaggtgtgtgtatatggggtgtgtgtacactagaagatgtttgtgctaggaatctgtgcagaggagcctggagcctgtgcatgaggcagctgaggtaatgtgccaactgagaaggggtctgaagggctgtgtggatctgggtatcagcatggtgcgccatttgaggtgtgtatgtgtgtcttcctgtgagaaggctttattctcacccttggtttttctgttttctttttaaaatagagacagggtcttactctgtctcccaggctggagtgcagcggtgcaatcacagctcctgcagcctcgaactcccaggcttaagcaatcctcccacctcagcctcccgagtagctgggactacaggtgggtgccatcaggactggctaattaaaaaaagatttttttttatagagacggggtgtccctatgttgctcaggctggtctcaagctcctgggctcaagcaatcatcctgcctcggcctaccaaagtcctgggatagcaggtgtgaaccactgtgcccggcctcacccttgtttttgtatcagccccatctctcttttcaccagttcctgaaatccctcccgctgggccctggatggcttccagtcctccacctctattttctgccctggctctaactagccctgtagcatcctggggcgttttagacacagtggtttcatcccagggaggggtcccggggcaaaggtctcaggcagggcccagtgaacaggggctattttagggcaggcttctcaccacagcccgccccacagttcaccacatgggtgtgatgcccccacccccacccaatacacacatgagagatcacttagagcaaagggtgagaggggcaggtggggctagggtggagaccaaagcactgatgtgacggaaccatcagccaggcaactggacctggtggatccaggaagactttctggaagaggtgagtggtgctaggtagaaaggataggacccagagagaagaggaagagaatatctgtaaggatgactggactggggatcgagagagagaagctgggggccctttcttctaggaccttggggcccctctggggcaaatcagggttcacaaggttggccccaccctaaactctccattctcacatcttaggaaaccaagccctctcaccagtcggttcctctctgagtgttgcaatggcaatgtttctggcagggtgtgggggacccttgctcaatgacctcctgccctgttgctcagaggataccgctgccagaaaagggttggctcattgtggggcttcccaaggtactctggtagccccagcttctgacctggtcctttctctggtatggggataggaggagagctccggaggtaggtatccactctcactcagccaccacatggaaccctagggtggctgggagcacagcagggttcagaggaaggactgttttttgtttgtttgtttgtttgtttttgagatggagtcttgctctgtcacccgggctggagtgcagtggtgcgatctcggctcactgcaagctccacctcccaggttcaagtgattctgctgcctcggcctcccaagtagctgggactacaggcgcccacctccacgtctggctaatttttgtatttttagtagagacggggtttcaccatattggccaggctggtctcgaactcctgaccttgtgatccactcacctcggtctcccaaagtgctgggattataggcgtgagccactgcgcctggccggaagaactggtttttaggagatggtgactggggactgtgagggagctgagcatggcttgatagaaatcctgttagagagatgattataatgttcaaaatcatgtgtgtctgagtgtgttcgtctgttaacctggcaggcaccccatgtatatgtgcatgtgtatgtgtgtgtgctattgtgagcttgggcttgttagagcctgtattggcgtgtgatggggttggcacgcacactcatgcaaatatatgctgtgagtgttattgtgtgactgtgctggtgggtcaggtgagtatgagtgtgaaagagagctggtgtgggtggtttgccctatgtgacgggggttgtgtaagtgtgccaggggtgataggaaggaaagtgaaggcagaagtcatgctggggcagagcccaggccttctggcttcctgaagagggcaggagctgggcagctgctgacagaaacattggcagagacttcatcttccttgtccttctgtctcaccctcaggtctctgacccctcccaaggatcatgccgcagccccactgacccaggagtaggggcctaaggggtgagtggggtagactgagggctttcagggtcaggaaacagggtgggggtggccttcctgaaccccacaactcctcacagcctcctcctcctacaaggaccctgttgctaggtaacggatgggggagccagaatgaggcagcttgagaggctgaaggctggacccacgacaggaaatggccttgatccccctctgcagtgactctccaggtgcagacacacagcctcacacacactcacacacaaacatgcgcagatatatagacatacatgcagagatacacacatccagagacaggcacactgctcccacacagagataggtgcacattcatagacacacagacacagagacacccactcacacagacaggcacacacatactcacacagaaacacatgcacacaaacacggtcttacagacatatacacatgcagccaaacacatacacagagacttttatacactctcgtatacacacaaacctgcacacacagacagacatccacaaagagctgcacacacatgcatacccacacaggcaaactcacccatacttagagacacacaaagacgcacatgtacaagcacactgaaagagtcacagaaacacaacatatcaaagcaataggacccaacctgagcaatatagcaagaccttgtctctactaaaaatcaaacaaattagccaggggtactggcacgcacctgtatagtcccagttcttgggaggctgagaccagaggatcacttgagcccaggagatcaaggctgcagcaagctatgattgtgccactgcactccagcctgggcaacagagtgagatcttgtctcaaaacaaaacaaaaaaagcaaagcaataggaggcaaaaatatgcaaataagcatagcaatatcccaatgtagaaagccagccccagagatatagacatgagccaatgggaagagaagcactgaggggggacatactgtgaggcagactgaacggtacagtaggtggcccagttccgcctttatcccttacagggaggaccccaatctaggcccaagagggaaagccacgtgcctgtatgagcgtatgagcatgtgcatgcgcgtgtgtgcacagggtggtgcacctggcaggggtccttgagtgaggcatgccccattctgtagcagggaacctggaatgggctgtgtgttctgcaagaaattggagccggtggccacggccaaggaggatgctggcctggaaggggacttcagaagctacggggcagcagaccactatgggcctgaccccactaaggcccggcctgcatcctcatttgcccacatccccaactacagcaacttctcctctcaggccatcaaccctggcttccttgatagtggcaccatcaggggtgtgtcaggtgagtccaaggggtcggaggcaggagctgcctggatcctgggagaaactgagggaagaagaagagatgcgaacttgcccttaggagcctccaggaggatgtggcagatacaaccccgctttcaagatcacatgggctgagggagtctgtacagccctcccatcagaaaccacagtctgcaggggagggtcaagaagctctactcccagtctgagaggggcaggatcctgtgacagatgcaagtgacaaagagaaacttcttgcccttttaggtgccacttcccagatgggaagtcttcttggtggggaagaggaggagtgggcaacaaggggatcctccatggtgggaggaatgggcttgaagttgtgtgtcctaagctgtggagaccaaatcagaaattccttggaccccaaaggcctttgggaaccagagcactaaaggagtggggaggtgcagcacctggctggggaacaggaatttggggtgcagcccccttggtgcttctgccccatgccctaccctgctgagtagccctgactctgcagggattggggtgaccctgttcattgccctgtatgactatgaggctcgaactgaggatgacctcaccttcaccaagggcgagaagttccacatcctgaacaatacgtaagtgaccaggccacctagtcagaacattgcctgggctgggagcaggacacagacaggaatcccacctggtccctagcctcagaatgctccagcctagttgggaacacatatacataacaataa

SEQ ID NO: 3172 - DNA, 6000 bp, Homo sapiens
taaatggtccctgggggccattctggttttggttattggtcacacttggccactgcacatcgggcaagagccacatgtcatgaagccctcacaacaactactcagaaggtgcagatgcaacaactaaggctcagaggcttatgtcaaagatccaaggtcatagagctactgaagaatggagctggggagggccacagggcagatgttgaagtgaggagcactgcggtccagggttggacctcagtttgatacttgtaacctgattttgaccctgatggggatctcggaggcgactcctgtaaaccagatgttcaagagacatatttataaacagaaccaagtgcccagaatgatgctgtggctactctctgagctgccccctttctggtattagcaggcagcgaagttcagtgctgagaaaagagagacctggcttcttcagattcagcgactgcctgagaaaatctgggcagatatggctctctctctctctctcctgcgcccctccctccccccacctgcgccctgcctgctgtatcaaggatttagagcatgaggcacagggctgagaacactaggtgctccttaagagacacacgttattgcaggggtgtccaatcttttggcttccctgggccgcattggaagaagaaaaattgtcttgagccacacataaaatacactaacactaatgatagctgatgagctttaaaaaattgcaaaaaaggccgggtgcagtggctcatgcctgtaatcccagcactttgggaggccgaggcgggcagatcacgaggtcaggagatcgagaccatccgggctaacacggtgaaaccccgtctctactcaaaatacaaaaaattagccaggcgtgttggcagcgcgcctgtagtcccagctactcaggaggctgaggcagaagaatcacttgaacccaggaggcggaggttgcagtgagccaagattgtgccactttactccagcctgggcaacagagtgagaccccgtctcaaaaaaaatcacaaaaaaaatctcataatgttttcagaaagtttactaatatgtgttgggccacattcaaagctgtcctgggctgcatatggcccatggaccatgggatggacaagcttgcattattgcttctactaggattacagaatggactagtggttacagtggtttttggcaacaagttgatcagcattgcattttagcatcctttactcacaatgtaatcttgggcaagttacttaacatctctgtgcctcagtttcttcatctgtaaaataagggtagtcataaacccacctcataggttcaccaaataagaccatgactgggagttacttggcaagatgctagtcactgtgtaactgtttaataaattagctcatttttactgccacctggatttctaggaagtcaaattactctccaaagaattggtggcacatagagatcagagcaagaggaggatgaagagtcctagggctattttcatgcagatgtctgagcagagtgaacccaatctgctctccctccgtctttttccctccttgtctctttagctctctctctctctttctcttcatctctgcctctctctgtttctatctctttctgtctcttgattactctttctccttaattctcatttctgcctctgtctctttgtctctgtttctttctggcagtgtgtgctggagccagctacttactggctcaggggagttcattctgtgtgtctcttccaccccagctttcaggaagtcactttggtagctttaaatcagccattgtgggaatatttacaccatggaaatcagaaaatgtgacaaatcagggctttttcttttcttttcttttctttttttgagagtcagtttaccagcataccacgctgtgtttctctgtctctgtctcttccttctatctctctgtctttctgtctctctggctctttctctttatctccctgtatctctcaaactctgcctctctctctctttctttctgcctctcctttttctgtctttccccatctctttctttcctctgacaaaacagcatgaacatggctacatgcagtgtggcccctccctgccttgggccatgcagatgtcataccctgtgccctacatcccctgacgcctcagcatactggtccccagagagccaggcctggccagggctttggtctgcatcaagtttggaagtgataagacccaagagctgcctacctctgcctgctgacgacacggtcagtcctgccagggctcttcctgagcccacagagcttccttctcagatgctgatagtctctcccttccagccatactgggcatgcagaattcagggatcccctccatctgatatagatatgttgtggcaatatatacgtgggtattattggaagtggcaatattgtatctgtgtgtgaacatgagagattgtataagtctatgttctcctatagaggagagctctatgtgggtccatgtcaccggagagggctgtgtatatctgtgtgtgtgtgtgtgtgtgtgtgtgtgtgtgtgtgtgtgtatccctacatggggggtggggggacagtgtgggggcatccgcatttgtgcatgctagcaggaatggctgcatctgtctgtatctgtgataggcaatggagagaaatgcttgaaagctcagattctggagccaaacaccaggatacatcatgtctgtggccttcttttttgagacagagtttcactatgctgcccaggctggagtacagtggcatgatcatagctcactgcagcctctatctcctggtcttgagtggtcctcctgcctcagcctctcgaggcacgtgccaccatgccaagctaatttttggagtttttttggtttttttttgttttttttttttttgagacagagcttcactgtcactcaggctggagtgcagtgacaggcgtaagccaccgtgcctggccaatttttgtattttttgtagagatgggatttgccatattgcccaggttggtctcgaattcctggacccaagcaatcctcttgccttggcttcccaaagttctgggattacagatatgagccactgtgactggccaaccctgggcaggtttccaaacctctctgtgcttcagttgcctcatcagtaataataatacttaggccaggtgcagtggctcacccctgtaatcccaacactttgggaggccaaggcaggtggatcacttgaggtcaggaattcaagaccagcctggccaacatagtgaaaacccatcgctactaaaaatacagaaattagcctggcatggtgttgggtgcctgtaatcccagctactcaggaggctgaggcaagagaatggcttgaacccaggaggcggaggttgcagtgagctgagatcatgccattgcactccagcctgggtgacaagagtgaaactccctctcaaaataaataaattaataataataatactacttaaatcatagggttgtgtggataaaatgagataatataggtaaagtgcttaatgcagtggccagcgcatatagtaagcgctataaattttgtatttgctattcttttatagaggatgtgtgtgtgtgtgtgtgtgtgtgtgtgtgttcatgtgcatgcacatctatgtgcagacggatgagggctggaggtgtgtgtatatggggtgtgtgtacactagaagatgtttgtgctaggaatctgtgcagaggagcctggagcctgtgcatgaggcagctgaggtaatgtgccaactgagaaggggtctgaagggctgtgtggatctgggtatcagcatggtgcgccatttgaggtgtgtatgtgtgtcttcctgtgagaaggctttattctcacccttggtttttctgttttctttttaaaatagagacagggtcttactctgtctcccaggctggagtgcagcggtgcaatcacagctcctgcagcctcgaactcccaggcttaagcaatcctcccacctcagcctcccgagtagctgggactacaggtgggtgccatcaggactggctaattaaaaaaagatttttttttatagagacggggtgtccctatgttgctcaggctggtctcaagctcctgggctcaagcaatcatcctgcctcggcctaccaaagtcctgggatagcaggtgtgaaccactgtgcccggcctcacccttgtttttgtatcagccccatctctcttttcaccagttcctgaaatccctcccgctgggccctggatggcttccagtcctccacctctattttctgccctggctctaactagccctgtagcatcctggggcgttttagacacagtggtttcatcccagggaggggtcccggggcaaaggtctcaggcagggcccagtgaacaggggctattttagggcaggcttctcaccacagcccgccccacagttcaccacatgggtgtgatgcccccacccccacccaatacacacatgagagatcacttagagcaaagggtgagaggggcaggtggggctagggtggagaccaaagcactgatgtgacggaaccatcagccaggcaactggacctggtggatccaggaagactttctggaagaggtgagtggtgctaggtagaaaggataggacccagagagaagaggaagagaatatctgtaaggatgactggactggggatcgagagagagaagctgggggccctttcttctaggaccttggggcccctctggggcaaatcagggttcacaaggttggccccaccctaaactctccattctcacatcttaggaaaccaagccctctcaccagtcggttcctctctgagtgttgcaatggcaatgtttctggcagggtgtgggggacccttgctcaatgacctcctgccctgttgctcagaggataccgctgccagaaaagggttggctcattgtggggcttcccaaggtactctggtagccccagcttctgacctggtcctttctctggtatggggataggaggagagctccggaggtaggtatccactctcactcagccaccacatggaaccctagggtggctgggagcacagcagggttcagaggaaggactgttttttgtttgtttgtttgtttgtttttgagatggagtcttgctctgtcacccgggctggagtgcagtggtgcgatctcggctcactgcaagctccacctcccaggttcaagtgattctgctgcctcggcctcccaagtagctgggactacaggcgcccacctccacgtctggctaatttttgtatttttagtagagacggggtttcaccatattggccaggctggtctcgaactcctgaccttgtgatccactcacctcggtctcccaaagtgctgggattataggcgtgagccactgcgcctggccggaagaactggtttttaggagatggtgactggggactgtgagggagctgagcatggcttgatagaaatcctgttagagagatgattataatgttcaaaatcatgtgtgtctgagtgtgttcgtctgttaacctggcaggcaccccatgtatatgtgcatgtgtatgtgtgtgtgctattgtgagcttgggcttgttagagcctgtattggcgtgtgatggggttggcacgcacactcatgcaaatatatgctgtgagtgttattgtgtgactgtgctggtgggtcaggtgagtatgagtgtgaaagagagctggtgtgggtggtttgccctatgtgacgggggttgtgtaagtgtgccaggggtgataggaaggaaagtgaaggcagaagtcatgctggggcagagcccaggccttctggcttcctgaagagggcaggagctgggcagctgctgacagaaacattggcagagacttcatcttccttgtccttctgtctcaccctcaggtctctgacccctcccaaggatcatgccgcagccccactgacccaggagtaggggcctaaggggtgagtgggg

SEQ ID NO: 3173 - DNA, 6000 bp, Homo sapiens
atgaactgacttgcccaatgccttaagctagttgtcaggcaggctagaatttgagcctaaatctgcctctagatcccacagatacttggtgagggttgcgggggcaggacatcctgtgtctacatcaaagaactggcatagctttgggaagtgtgggcctcgaaaaaggatgggtggacctggggttcctatgtccagcagtaggggtgagtgggaggcagggtccctccctgctgggtgaccagctgccatatgacaggggtggtgtgttcgaccggaagtatgacattcactagttaggaacagcatgatctcctgctcaggctttggagaacacagcagtgggggagggaacagaactctggacttgaattaatagtcctgactttgaatcccttgtctggctgtgtgatcctgggaaagtaacttccccctatgcaaaagagaaggtggagtggtaaatggtccctgggggccattctggttttggttattggtcacacttggccactgcacatcgggcaagagccacatgtcatgaagccctcacaacaactactcagaaggtgcagatgcaacaactaaggctcagaggcttatgtcaaagatccaaggtcatagagctactgaagaatggagctggggagggccacagggcagatgttgaagtgaggagcactgcggtccagggttggacctcagtttgatacttgtaacctgattttgaccctgatggggatctcggaggcgactcctgtaaaccagatgttcaagagacatatttataaacagaaccaagtgcccagaatgatgctgtggctactctctgagctgccccctttctggtattagcaggcagcgaagttcagtgctgagaaaagagagacctggcttcttcagattcagcgactgcctgagaaaatctgggcagatatggctctctctctctctctcctgcgcccctccctccccccacctgcgccctgcctgctgtatcaaggatttagagcatgaggcacagggctgagaacactaggtgctccttaagagacacacgttattgcaggggtgtccaatcttttggcttccctgggccgcattggaagaagaaaaattgtcttgagccacacataaaatacactaacactaatgatagctgatgagctttaaaaaattgcaaaaaaggccgggtgcagtggctcatgcctgtaatcccagcactttgggaggccgaggcgggcagatcacgaggtcaggagatcgagaccatccgggctaacacggtgaaaccccgtctctactcaaaatacaaaaaattagccaggcgtgttggcagcgcgcctgtagtcccagctactcaggaggctgaggcagaagaatcacttgaacccaggaggcggaggttgcagtgagccaagattgtgccactttactccagcctgggcaacagagtgagaccccgtctcaaaaaaaatcacaaaaaaaatctcataatgttttcagaaagtttactaatatgtgttgggccacattcaaagctgtcctgggctgcatatggcccatggaccatgggatggacaagcttgcattattgcttctactaggattacagaatggactagtggttacagtggtttttggcaacaagttgatcagcattgcattttagcatcctttactcacaatgtaatcttgggcaagttacttaacatctctgtgcctcagtttcttcatctgtaaaataagggtagtcataaacccacctcataggttcaccaaataagaccatgactgggagttacttggcaagatgctagtcactgtgtaactgtttaataaattagctcatttttactgccacctggatttctaggaagtcaaattactctccaaagaattggtggcacatagagatcagagcaagaggaggatgaagagtcctagggctattttcatgcagatgtctgagcagagtgaacccaatctgctctccctccgtctttttccctccttgtctctttagctctctctctctctttctcttcatctctgcctctctctgtttctatctctttctgtctcttgattactctttctccttaattctcatttctgcctctgtctctttgtctctgtttctttctggcagtgtgtgctggagccagctacttactggctcaggggagttcattctgtgtgtctcttccaccccagctttcaggaagtcactttggtagctttaaatcagccattgtgggaatatttacaccatggaaatcagaaaatgtgacaaatcagggctttttcttttcttttcttttctttttttgagagtcagtttaccagcataccacgctgtgtttctctgtctctgtctcttccttctatctctctgtctttctgtctctctggctctttctctttatctccctgtatctctcaaactctgcctctctctctctttctttctgcctctcctttttctgtctttccccatctctttctttcctctgacaaaacagcatgaacatggctacatgcagtgtggcccctccctgccttgggccatgcagatgtcataccctgtgccctacatcccctgacgcctcagcatactggtccccagagagccaggcctggccagggctttggtctgcatcaagtttggaagtgataagacccaagagctgcctacctctgcctgctgacgacacggtcagtcctgccagggctcttcctgagcccacagagcttccttctcagatgctgatagtctctcccttccagccatactgggcatgcagaattcagggatcccctccatctgatatagatatgttgtggcaatatatacgtgggtattattggaagtggcaatattgtatctgtgtgtgaacatgagagattgtataagtctatgttctcctatagaggagagctctatgtgggtccatgtcaccggagagggctgtgtatatctgtgtgtgtgtgtgtgtgtgtgtgtgtgtgtgtgtgtgtgtatccctacatggggggtggggggacagtgtgggggcatccgcatttgtgcatgctagcaggaatggctgcatctgtctgtatctgtgataggcaatggagagaaatgcttgaaagctcagattctggagccaaacaccaggatacatcatgtctgtggccttcttttttgagacagagtttcactatgctgcccaggctggagtacagtggcatgatcatagctcactgcagcctctatctcctggtcttgagtggtcctcctgcctcagcctctcgaggcacgtgccaccatgccaagctaatttttggagtttttttggtttttttttgttttttttttttttgagacagagcttcactgtcactcaggctggagtgcagtgacaggcgtaagccaccgtgcctggccaatttttgtattttttgtagagatgggatttgccatattgcccaggttggtctcgaattcctggacccaagcaatcctcttgccttggcttcccaaagttctgggattacagatatgagccactgtgactggccaaccctgggcaggtttccaaacctctctgtgcttcagttgcctcatcagtaataataatacttaggccaggtgcagtggctcacccctgtaatcccaacactttgggaggccaaggcaggtggatcacttgaggtcaggaattcaagaccagcctggccaacatagtgaaaacccatcgctactaaaaatacagaaattagcctggcatggtgttgggtgcctgtaatcccagctactcaggaggctgaggcaagagaatggcttgaacccaggaggcggaggttgcagtgagctgagatcatgccattgcactccagcctgggtgacaagagtgaaactccctctcaaaataaataaattaataataataatactacttaaatcatagggttgtgtggataaaatgagataatataggtaaagtgcttaatgcagtggccagcgcatatagtaagcgctataaattttgtatttgctattcttttatagaggatgtgtgtgtgtgtgtgtgtgtgtgtgtgtgttcatgtgcatgcacatctatgtgcagacggatgagggctggaggtgtgtgtatatggggtgtgtgtacactagaagatgtttgtgctaggaatctgtgcagaggagcctggagcctgtgcatgaggcagctgaggtaatgtgccaactgagaaggggtctgaagggctgtgtggatctgggtatcagcatggtgcgccatttgaggtgtgtatgtgtgtcttcctgtgagaaggctttattctcacccttggtttttctgttttctttttaaaatagagacagggtcttactctgtctcccaggctggagtgcagcggtgcaatcacagctcctgcagcctcgaactcccaggcttaagcaatcctcccacctcagcctcccgagtagctgggactacaggtgggtgccatcaggactggctaattaaaaaaagatttttttttatagagacggggtgtccctatgttgctcaggctggtctcaagctcctgggctcaagcaatcatcctgcctcggcctaccaaagtcctgggatagcaggtgtgaaccactgtgcccggcctcacccttgtttttgtatcagccccatctctcttttcaccagttcctgaaatccctcccgctgggccctggatggcttccagtcctccacctctattttctgccctggctctaactagccctgtagcatcctggggcgttttagacacagtggtttcatcccagggaggggtcccggggcaaaggtctcaggcagggcccagtgaacaggggctattttagggcaggcttctcaccacagcccgccccacagttcaccacatgggtgtgatgcccccacccccacccaatacacacatgagagatcacttagagcaaagggtgagaggggcaggtggggctagggtggagaccaaagcactgatgtgacggaaccatcagccaggcaactggacctggtggatccaggaagactttctggaagaggtgagtggtgctaggtagaaaggataggacccagagagaagaggaagagaatatctgtaaggatgactggactggggatcgagagagagaagctgggggccctttcttctaggaccttggggcccctctggggcaaatcagggttcacaaggttggccccaccctaaactctccattctcacatcttaggaaaccaagccctctcaccagtcggttcctctctgagtgttgcaatggcaatgtttctggcagggtgtgggggacccttgctcaatgacctcctgccctgttgctcagaggataccgctgccagaaaagggttggctcattgtggggcttcccaaggtactctggtagccccagcttctgacctggtcctttctctggtatggggataggaggagagctccggaggtaggtatccactctcactcagccaccacatggaaccctagggtggctgggagcacagcagggttcagaggaaggactgttttttgtttgtttgtttgtttgtttttgagatggagtcttgctctgtcacccgggctggagtgcagtggtgcgatctcggctcactgcaagctccacctcccaggttcaagtgattctgctgcctcggcctcccaagtagctgggactacaggcgcccacctccacgtctggctaatttttgtatttttagtagagacggggtttcaccatattggccaggctggtctcgaactcctgaccttgtgatccactcacctcggtctcccaaagtgctgggattataggcgtgagccactgcgcctggccggaagaactggtttttaggagatggtgactggggactgtgagggagctgagcatggcttgatagaaatcctgttagagagatgattataatgttcaaaatcatgtgtgtctgagtgtgttcg

SEQ ID NO: 3174 - DNA, 6000 bp, Homo sapiens
aagacaaaagaaaaagtgtgagctgctcatctgggcagagtgatagggcctgcttagtgagaaatgcaccagaggattgctgggcctggttagtgtcctattgaggctgggagttgcgaccctgtctgcatagcaagcagttttctcctccacatttagaaggtaagggaggtcgggcgcagtggctcacgcctataatcccaacactttgggaggccgaggcaggtggatcacctaaggttgggacttcgagaccagcctgaccaacatggagaaaccctgtctctactaaaaatacaaaattactgcactccagcctgggcgacagagtgagactccatctcaaaaaaaaaaaaaatacaaaattaggcaggcgtggtggcgcatgcctgtaatcccagctactcgggaggctgaggcaggagaatcgcttgaatctgggaggaggagattgcggtgagctgagatcgtgccattgcactccagcctaggcaacaagagcgaaactctgtctcaaaaaaaaaaaaaaaaaaaaaagaaggtaatggttagattcctgcaggcctgggttttccaggcaggtacactggagggagagggagggagagggaggccggacagtgccaggtctttgcaacgaatgaccataaggactgacagcagaatctaggctggttgaaagcaggagtgagaagaggaggagagtgatggctagctgggaaatggatgagagaggtctcattgggcttgctgggctttgatttttgattttggtatcagtttttagaattgttttatttatttatttagagacagggtcttgctctgtcacccagcctagagtgcagtggtacaaccatggctcactgcagcctcgaactcctgggctgcccaggctggtctcgaactcctggcttcaagtgatcctcctgtctcagcctcccaaagttctgggattacaggtgtgagccaccatacctgacttagaattgttttcaaggagcttgtgaatacatgggctgaaaggataggaaactgtggtcagagagttgaggtttaattgaatgaatgaatgaatgaatgaatgatagtgaacacttatgtggtatttactatgtgccaaacactcctctaacagctcactgatttctctcaagacttctgtgaggtgaggtctactaaatttccattttacatatgaggaaactgaggtacagaaaggtgaaataacttgggcagggcgcggtggcccacacctataatcccagcactttgggaggccaaggcaggtggatcagttgaggtcaggagtttgagaccagcctggccaacagagcgaaaccctgtctctactaaaaatacaaaaattagctgggtgtggtggctcacgcctgtaatcccagacactcaagaggctgaggcaggagaatcgcttgaacctgggagttacagtgagccaagatcacatcactgcactccagcctgggagacagagcaagactctgtctaaaaaaaaaaaaaaaaaaaaaaggtgaaataacttgtccaaggtcagagttggtctgcaaaccaggcagcctgggcccagagtctgtgttcctaatcaaggttattctgaaaggatgaatgagggcatagaatccactttgctcgtcctaagaagtgccagctgtctcctgacctcagattgggtcagagccctaatctggtttagagaggtccagagacaaaaaacaatgaacacagaaatatataattccagattgtgatagccatagaggagacaaactggatgctgagaccgagaataaggagaccttcttagatgtggcagtcaggggaggcttccctgaggagacggcacttcaattgaagaataaaaaggaagcagtactgtgaagagcaagaagaagagcatcctaggaagagggaacaccatgtaaaaagactgtgagacaaaaattcagtgtattctaggaactgaaaaagatccaaatgtgggtaaagggaaagatggctaaagctgggactggagaggaggcaggggccaagcacacagggcctcagaggacaagacaaagctgctggattttattattctttattattatggtatcgtatgtattgtatttttatttttccaagcaaaatgaaaggtaaggcactgggagattttaagcaagggactaatgtggcccaacacatattttaaaaagtagaagcaatttttttttttgagacggagtcttgctttgtcgcccaggctgaagtccagtgccgtgatctccgctcactgcaacctccgcctcctgggttcaaacgattctcctgcctcagcctcctgagtagctgggattacaggcaccggcaccacacccagctaattttggtatttttagtagaggcggggcttcaccaaattggccaggctggtctcgatctcctgacctcaagtgattcgcccgcctcagcctcccaaaacaatgggattacaggcgtcagccaccgagcccggcctgagaagcaatgttgtcattttgttcttccattcatttgcttattcagtcatcaattcttgaatttcttcattcattctttcttaccttccattatttagtttttcactgggctttcctttgttcatctgttaattcctttgtcctttggttgattcacgtgttcctatacacagaaagcctgctactgtgtgctgggccttgtgtgggtactggaggcatctacaagagccagacccctgcccttgaggaaaacatatcccacacacccatcccccaggaaccagtggtgccccaggcagaagatgctgaggttctgctgggggtgtggagtgggtagaggcagcaatcagggaaggcctctagagcagatgcttgtgagtcagaccttgaaggatgacagagcgagcatgatagattggggggatcccccaagagcagggaccagtctctcatctctgtgttccctaaggctggcacctaagacacaattataaacgtttgcttgtttgctaattgaacatgtgggccgatggccaggcagggagcatttgatggcggaggtgatgctgcccggctagggtgaagccactcttccagagaccctgcactgccactggctcctctgtcttcctcctcatccctcctcccatttcctaagagaaaagcattcttatctccatcccaccactctgttaccccaggcacattgggccacacttgagcatgtgtacgcatgcacacacacatccccacatgcccctgcccatacaaagaaacacacttgcctgcacaccatggcctagttgttgattccaaaagcaaagtcatcatgtcattgctttctctctctctctctctctcacacacacacacacacacacacacttctgtgtttacgcacactctccctgcctctcaccacatcccaacagacacatccttctccaccaaacagccctccccaccacacctcttcctctcctggacaggagggatattccgggttcttgctttaaggctgaagtaacagtggtgggagtggggactgaaccccagattgaggaggggtcagggatccctatcagacagagagactggaactgatagaggatgctaccgtttctctttttgtttttaaaaatctttttccacatgttctaagatactcagtttttcttcctttttttttttttttttttttttcttgagacggagtctcgctctgtcgcccaggctggagtgcagtggcgccatctcggctcactgcaagctccgcctcccgggttcacaccattctcctgcctcagcctcctgagtagctgagactacaggcgcccgccaccacgcccggctaattttttgatttttagtagagatgggctttcactgtgttagccaggacggtcttgatctcctaacatcgtgatccacccgcctcggcctcccaaagtgctgggattacaggcgtgagccgctgcacccggccttttctttcttttttttaaaaaaagtcattttctgcaacaaaacccacattctttttttgtgttttttttttttaaggcagggtcttgctctgtcacccaaggtagagtgcagtagctcaatcacagctcactgcagcctcgacctgcctgactcgagggatccttccacctctgcctctgcagtagctgggaccacaggtgcacaccaccacaccgagctaacttaagaaaaattttttttggtagagatggtgtctccctatgctgcctaggctggtctggaattcctgggctcaagcaatcctcccacccaacctcccaaagtgctgggattacaggctgagccactgcccccagccagttactcagtttttctaaaacttgggtgcctgggggaggctgacacccttcccactcctctgaaaggcagtttcctaagggaagggtcttctgctgctcaccacccttaacagccctgtgtccccagtgctcagcccctgaggaagggaaggcgtgctgacagggtccatgtgatccatgtccagtggctctggtgacagcagtctgaagtcaactggctgtgagaactcgagtaaggccagtcccgatctggtcctcagtgatggagaaaagcccctcttaacctccaattcaatgatcctaaaagagcaggtgcttcgggggtgctgaaactgcgcttttggagggggcttttgggaaggccgggctggggactcaggtctggagggtgacagagccgacctcccgtaaaccagggaggaggaaggtgggggcgggtgggcctaggatctgggggcgcctcctcgctgcggggagctggcttggggctagggcgtgactgtctccctgccaccatcaccgcccgccggccgtgactgcaataagagaagtccgaggcggcttcctcctccctgcccagcaggggcggcggtcagaggcgggcagcaccccagttctccccgcacgccggcactcgcggctgctggagccccggctggctcaccccggggccgggcagaattgggctccaggtaagcgacagcgtcgggtggggactgggcaggtcaagcagtgccctccccctcgaggctctggagagaggactgggggtacacgggaagagaagcctgaacctgggggtcgggggacacatgagcaaggtgacagccaaagggaccccagcccgaaaaggcctaaggaggaaaacgggcgacctgaaaagcaaggctgataaacctggaggagagggcggaggggagcacgggggaagccgaccaaagggacccccaaaaaggtctagtgggtaaaatggaggggactgataagagtttaggaagggggctgaggtgggggagaaggattaaggggaatccccaggacggtctgggggagaaactgaagggatcgtgagagtgggactttggggagaagccgacgggtctgatgggtccaggagaggggaaatgggtgggggtgctggagggaacaggagagggagctggcgggaagggggttgaggagaacgacttctggaggacggagaacctggggtgcaattgcgggtccaggaagttcccctcttccgagccggccgaagtcggggtgaagcccacagcccgcagggtaacgttagcggccgcgaccgcggccccgcgaccctctcggcccgcccttgcggtaggttccgggctgcaggggactcctgccgggcgcgcgaggcgtgggtccccgcttcctggggaagtccccgccctcggcagggacaggcctctccgggcgccccctccgcgcccgcggcggtctcggcccgcgctccccgctggatccgggaattgctgccgccccgacggaaatcctgcctttgaccgcgagtgcccgcaggggctgcctccaaggcaacgagagggcgggccgcgctgggccgccgcggggctccgggtgggcgcagccccctttgctctccgccttcgccc

SEQ ID NO: 3175 - DNA, 6000 bp, Homo sapiens
tgaactaaggtagcaatgaagctttttatcatttaaagaagtacaggtagcaaacaagggagcagtaagcaggtttttattgctattataactcctattataagagttttaaatcttcctagtgctgggaaccaccttctaaacatggcttcagggttgaatccgtgctacacttgcacgggtacatgtgccagttttgttatgtctttaactatgtcctcaactacttgcccctgatcatctatgtgtagacaacaattagtaaagttaaattttctttttttttttttttttttaagagacggggtttcactgtgttagccaggatggtcttgatctcctgacctcgtgatctgcccacctcggcctcccaaagtgctgggattacaggcgtgagccaccgcgcccagccaataaggttaaattttctacaaattcctccttcagctgctagcaagtagtcaagagctagtctattttgatagatcgcatttctcatcagagtctcttgccaggcaagaacagtcaaggcttgactggttttattagtaataatttctaaaacagcttgcaaccgtgtgattcggttgagcatgcagatgggggttcgatatcctcatgagccatcttgtgcctaagtggcgggtctatagtattgtacgattctttcagggggccattcattatttttctaatcacctatggctatgcttcgtttttcgtgggaagcatagactgggaagcctagaagttcacctgtttttatgggcagtaagaagaaagatggcttaatggtgctaattacacagctacctgtccactgatcaggcagcttagcataagctctgtgtccacatatccagtataacctggtgggggccatccagtcccagtggaattctgggtgggcccaaacagtctgcaactttggaaatttactgaatggatttctttctgtgtaattggaattccaccatgtaactgtttttgtggtaccattatacagcttttgcctaagacaactaagccgtcttacaggatgagtgaatccttttccttctctagctatgcaatactgtccaataattgagactttcagaacctaaaaattgtcagggtggttcttttgggctgggaattcatcaggaactgggcctgtgggaactaattctcgggcttcccatggccattgatctcctgttacggttcttctacaaacataacatgaagtgacatttagagactgggctacatgctcggctaatttcaaaaacaaatttttagtttttcctggaatctcagatactggcacatttaatttatcatagaaagtctgaaatactggttctggagagcgtctttgaacctctccttttattaggatgcttacactaggatctagtccttttccatcaatgcctaatgttacatattttcctttattctactttgggtctgaggggtttgtgattatcaattctaaagggttgcagctcccactcatgcaggaggggctgatttttcctttttggagccaaacaggatctttttaaatcttctttccaagtagcccaaatgacacaagaccagtattgacacatctcacataaatatgatttttgacaaatgtacttattttctgctgtgtaacttttttcccaatctagagaaccgcatcctatcccatgctgtttactattaatagcggcacaggcgtcaaattttaaggttacatttttggggacccctctttcttctgtcctagctattacttcacttgtgtcacctagaaaaggaccagtccttagtcttacttcaaagactgtgatcatgggaggttcagaggggtcatagcacacatcggactggtcacttcctggattacatactttgtactgaatgttattgtacgaacaggttccttttggagttcctaggcattcataaaaactataaaataatagggctgtagcactcttttgtcctacctcagtgacctgatgtatatactgggaacagccctcagtctgaagaaggtcagttgaagtccttactgtacaagtccagattttaaggaaaatgagtcccgcgatgagtttcctcatgctttggccgcgcgtggaccagtcagcttccgggtgtgactggaacagggcttgccatcttcttcagagtcactttgcaggggttggcgaagctgcttccatccacgtacagctcccagtctactgatgtttaagggtggtctcggaggttgggcctactagaataaactgagtccaacacctctacacagggtctctctcttcccagtaagtggccgttggaactacaacccaggtctgttttttgtgtgtgtgtgatggagtatccgaagtgtaatggtgcaatctaggctcactgcaacctctgcctcccggattcaagtgattctcctgcctcagcctcccaagtagctgggactacaggcgcgtgccatcacgcccagttaatttttatatttttagtagagacggggtttcaccatgttggccaggatagtcgtgacctcctgatctgcctacctcagcctcccaaagtgctgggattacaggcgtgagccaccgcgcccaacccaacccagatatgttctaatgcaagtgcagataaccttaactgctgtgtcacgcggctcctccagaactaccctgtgagattaggtaccgtgatttgcctgacttagcagaagaggaagcagggatcagggaagggaaataacttaccccaggttacacagtgaatctgtggcagaagtcatggcagaagtcagctgacatctggatttaactgcagtcagaggcagacacatgatcccagcccacagcaggagcatctgggaaagggaggaagttcaagaagccagatgctgacagtgcattgcccacgtgggctgactggaaaggcctcagggagggctggggtcagactgcatttccagctgcttcatgcctctctggattctcctttctccttgaccttcccagatcccacttatccttggagactcagcttcaacatcagctgggatgggcttctctgaccctttggcttcccaagtccagctctatcatggtgtttgacggaatgaatggatgggtgaatgaacagcacttacccactttcattaattcatctagctataaatatttactgagcttctactttgtttattattatttttttttgagacggagtctcgttctgtcacccaggctggagtgcggtggcgcaatcttggctcactgcatcctccacctcccgggttcaagcgattctcctgcctcagcctcccaagtagctgggattataagcacgtgccaccatgcccgactaatttttgtatttttagtaaaaacggggtttcaccatgttggccagctggtctcgaactcctgacctgaagtgatccaccctcagcctccaaatgtgctgggatcacaggtgtgagccactgcgccttgagtttctactttatgccaagcgctgagttaggccctgaggatacaatcatcagcccctgccctcaaggagcctgcagcctgggagagagactgacatcagagatggtcagaagtgcatgtgggccagacgtggtacaggttcacacctgtaatcccagcatcccagcactttgggagatggaggcgggcggatcacttgaggtcaggagtttgagaccaccttggctaacatggtgaaaccccgtctctactaaaaatacaaaaattagctgggcgtggtggtaggtgcctataatcccagctacttgggaggctgagttgggaggatggcttggacccaggaggtggaggttgcagtgagccgagattgtgccactgcactctagcctgggcgacagagtgagactccatctcaaaaataagtaaataaataaaaacgagactagagagactagagttggctggagcaactggaactccagcctcagtgccctgggtttccagaaggccagcctggaaagggtggagtaaaccttggaggctcatgtgctgcctcaccctagcccctcacccaagcaaaactcaaccagtgtcttagtgcttgtgggacctgctttgtccccttttgtggcatcgaaggggtgatgaaggatgagacaaacctggatgtgagtcccaactctgctgtgtgacctgagacaagccgtgcctctgagcctcagtctcctcagctctaagaggggcactcccatggccctgtcaaagggttgctgtccacaaaacatgaactgaccgttggcctcatacatgttagttgtcgaatccacaggccaactgcactccctttagaactgcagttgtctgtgtctgtcctgcctcctcaaccagactgtgcccaagttccttctggggccctggtgtccaactcagacaggcattagaggaagccgtgggggctgttgaacgttgaacctgaacactgaactagaggccccaggccggggctaatgagggctccaggaaagggcttctgggtggagagggagcatctactaaccactcacttccagagtggccttcccgggtccagcagagggttgggcgccaactagggaacccacagaggaggcggggggtggggcgggggagcggtgtggagcgggtaagggggtggggctggagattaagaaatgagtgaggtggatgcttcagcgctgttagtctcctccccatgcccctcctcacttcatctagtttagtccctttatcctgtgaagtaggggtcatcattagcccccttttacagaggagagaattgaggcttcgagagagagaaacttggccaggagtttccactcggtccgacgccctcggtgccccgccgggtacggtggctgggcgcggggagcggggggcggcgccggcggggccccgggcaggggcggggtcggggcgcggacaaaaccgccgcggggcggcggggtggcggacgcggccatggaggccgagggctgccgctaccaatttcgggtcgcgctgctgggggacgcggcggtgggcaagacgtcgctgctgcggagctacgtggcaggcgcgcctggcgccccggagccggagcccgagcccgagcccacggtgggcgccgagtgctaccgccgcgcgctgcagctgcgggccgggccgcgggtcaagctgcaactctgggacaccgcgggccacgagcgcttcaggtgcgggtagccggggcgcgggagggacttctggtggggggctcggtgagcgtgctttaggccacggcaactcccgagaggccaactcagaggtcaggcggagggcgaggtccctgccctgggtcccgcccggtccactggggccagaacctcccctgctcggagtcatttttcccacgaacactgcggggtgggtcgagtcccagagaccaggaacatccctggctttgagctctggactctggagagatgctgagtgatactggccccgggtgctgagagctcaggggaacagagcgggaagtgtcgaggagatgtggaagggagagaggatcagcaggagtttgccaggaagagaacagaggaacgaagacctaggtcagggcagcaccaggccttctccaagaatgagggattcaagtcacgcttgctccctaactggagcacccagacttttttcttttcttttttttttttgagacggagtctctctctgtcgcccaggctggggtgcagtggtgcgatcttggctcactgcaagctccgcctcctgggttcacgccattctcctgcctcagcctcccaagtagctgggactacaggcgcccgccaccacgcccggctaatttttttgtattttcagtagagacacggggtttcaccgtgttagtcaggatggtctggatctcctgatctcgtgatccacatccacccgcctcggcctcccaaagtgctgggattacaggcgtgagccaccgcacccggccagc

SEQ ID NO: 3176 - DNA, 6000 bp, Homo sapiens
attagccaggcatggtggcgcacacctgtagtctcagctactcaggaggctgaggcagaagaattgcttgaactcaggaggtagaggttgcagtaagcagagatcatgccattgcactctagcctgggcaacagagcaagactccatctcaaaaaaataaagaaaaagaaagaaatttaaaaatcaggaaaaagtagatctctgtattggtcaaaatatggaaagaaatatgagggacagtcctggcatggtggctgaggcagccagatcgcaaggtcaggagtttgagacctgcctgaccaacatggtgaaaccctgtctctactaaaaatataaaaattagccgggcatggtggcacacaccacacacacacactcagtgatgtgagctgagatcacatcactgcattccatccggggcgacagagtgagactttgtttcaaaaaacaaaaacaaaaacaaaaaacaaaaagctaaaacaatagctgcctttggggagtgggaatcagttgatggcaagacagaagatggccttttttttttaactttgccatatgcctaattgattttttaaaaaattattacatgtattttgattaaaaacatattttagaaaaaataaaggaaataaaatattgcagaaaaatggaaggtccctggggtagcatttgttaccttggtaaattcatcagcatcctgggtccagcttagaaaccagagttgttagccctaaaagcagcagcatctctacagaacagacacacattaaccaggttcatgagactgatattgcaaatcagatgccaattcattaatttataagaggaagcagggctttgaagcagactggatcttcctgttcaatgatgagtgcattctctccctgtggactgatctacataggaaacagaatggtttttagagggttgcttggtgatccagagcatgagtgaggtagggggtgaattgagtggctccaaagaatggtacttccatctccctttttcctggaccagcatctttgtccccagagaagggacactgctggtgattgtcttggcaactctccctgatctctggcttccttggctgcccagaccctcctaactggcaccctctttctttagctgcattaatacttttaaccaggttgtagtctagactgggcctgagagttcttctgtctctataaggtatagtttggctctgcgtctgcaaccaaatctcatctcgaattgtaatccccatgtgtccagagagaaacctggtaggaggtgatggatcatgggggcagtttcccccatactgttcttgtgatagtgagtgaattctcacgagactcgatggttttataaatggcagtttttcctgcactcacaccctttcctgctgctttgtgaagaagatgcttgcttctccttccccttctgccataattgtaagtttcctgaggcctcccaagccatgcggaactatgagtcaattaaacctcttttgtttataaattactcaatctcaggtgtttctttacagcagtgtcaaaacaaactaatacaattggcatatctctactttaaagcattagaggtgagatgtggtggctcacatatgtaatccccgcactttgagaggccaaggtgagaggatcacttgggcccaggagtttgagaccagcctgggcagcatagggagaccccatctctacaaaaaattagccaagtgtggtggtgcatgcctcctatggtcccagctactcaggaggctgacgtagcaggatccctggagcccaggaagtcaaggctgcagtgagccatgattgcaccaccgcactccagtctgggcaacagaatgagaccctgtctcaaaaaaacacaacaaaaaaattcggaggccaagacaggtggatcacttgaggtcaggagttcaagaccagcctggccaacatggtgaaaccccatctctagtaaaaatacaaaaaattagggggaggggggagggatagcattatgagaaatacctaaagtaaatgacgagttaatgggtacaccaacatggcacatgtatacatatgtaacaaacctgcacattgtgcacatgtaccctagaacttaaagtataataataataaaaaaaaagggacagaagcagtatgatctttaaaaaaaaaaaattagctaggcgtggtgacaggtgcctgtaatcccagctactcgggaggctgaggcaggagaatcacttgaaccggggaggcggaggttacagtgagccgagattgcgccactgcactctagcctgggcaacagagtgagacttgtcttaaaggaaaaaaaaaaaaaacgcaaaaactaaaacattagagttttgtgttcagtcatatactcagcacccatgatgtgccaggctttgttctaaagccctggggtacagccatgaataaggctgacatttgtctgccctcattcagtttacagtctgacgaggaagacattaaacaaacaaaagtatgcaaagtgaagaagcagtgttaactctcagaagacaacttaatttcctttttcctacttcttgaggaggggcagcacctcctggttgcccccatatatcatctacaatgaaaccatgggaagagctgcagggtgggggctgtagtctaggtaaagaaggcccattctccaaacataaatttccagcctcccttgaggtctataccaccaattattccaataaagtcattttctgcttacatttgtctaaggttggttttttgtttgtttgttttgttttgtttttttgttttgagacagagtctcgctctgtcgcccaggctggagtgcaatggcgcaatctcggctcactgtgagctccgcctcccgggttcacgccattctcctgcctcagcctcctgagtagctgggactacaggtgcccaccacgacacccggctaattttcttgtatttttagtagagatggggtttcaccgtgttagccaggatggtctcgatctcctgaccttgtgatctgcccgcctcagcctcccaaagtgctgggattacaggcgtgagccactgtgccctgcctaaggttggtttttgttatttgtaaccaataacccagactagtacagcaaccatctcagacatctgtggaccagagaaaagtcactaaaggacaatccaatgcctgtgccttggggctgcaaccaaacctggaacccttctgatttgtgtcttccgtttagcacaaagcagggcacacaagctgtctcagtgaaatctggttagctgagtccctcagtaagtcagttagttcacaaatgtctgccagaagctgttctaggtgcagaaatcacaaagcaagtaggagcaggtttctgccttcaagatgtcccacatgcagcacagacccaacgtatctaaaacggaaggctgtcattttccctgccttcccaacccatataacaacacacatccgtgtcccatgctccaaccacactgaattgcttgcccttctcacttccgtctgccaacagtgagtagtttggtgttcttagaccacaggggtgggagggaaagagagagacagcagacaatcaggctggggtagacagacaccagaccttgatgccaggtggaggaatctagatgtattggctgctgtcccaagttactctcctctggcctaaatctcagactggccgtatagtttaattttttctcttccaccaaaggtcatctgtgtagaagatgacacaaagggggacccagcacggtgacccgtgcctgtaatccctgcactttcggaggctaaggagggaggatcatttgagcccaggagttcgaggctgcagcgagtcatgatcgagccactgcactccagccttgacgctgagtgagaccctgtctcttaacaaaatatatttaaaatttaaaaagaagattatacaaaggggttatctatcatcttggccagcaatgcagggcaaaacttgaaacaacttggtcctgcagtattttccagatgccaaatcctcattctctactgtacagctcctacagtgttttgtgtgagatgagagggagcatggcgggtctcagctggctttgccctgggaaaaattcctcatttctgcaccgcctccccaaagcgggggctaagccagcgccgtctgcctctccacctagaccagaccccttccctagatgctcttatttccctgaagcctcacaacaaccctgtgaggtaagcattaccatcccttcattttacagatgaaactgaagctcaggaaggttacgtttcgggctctaaatcccggaatcttcgcttcgatgccatccaggcttgggccactgagctcaagaaacgggccgacgggtgaccagacggacgccgggaccagcccaagttcagggctgagggccgccaggtggcgcgtttccctccccctacccctcgcggcggctcgggcgcacctgaacccagcggggtgcgccggggaaagtaggcgcgcagggtggggcggggagtagccctaattccccagctcggagtgggcaaggagcacggtttagctcagccggctggcaccgccaagcggccgccgggccgcatcagccctcctcctgtttgcgctccccagcgtgcaatttatttggggggctaccggggattgaacggagcgggcgagcgctgccaggaggtggggccggccccacctgtcgactgcccgtagtaggcagggagagggcggggtttgtcccatagggcccgccccccagtccctgggtcccgggcgcgcgacgagatataaggcagtcaggaaacaatgcgcctgcagctcgcgctcccgcgccgatcccgagagcgtccgggccgccgtgcgcgagcgagggagggcgcgcgcgcggggggggcgcgcttgtgagtgcgggccgcgctctcggcggcgcgcatgtgcgtgtgtgctggctgccgggctgccccgagccggcggggagccggtccgctccaggtggcgggcggctggagcgaggtgaggctgcgggtggccagggcacgggcgcgggtcccgcggtgcgggctggctgcaggctgccttctgggcacggcgcgcccccgcccggccccgccgggccctgggagctgcgctccgggcggcgctggcaaagtttgctttgaactcgctgcccacagtcgggtccgcgcgctgcgattggcttcccctaccactctgacccggggcccggcttcccgggacgcgaggactgggcgcaggctgcaagctggtggggttggggaggaacgagagcccggcagccgactgtgccgagggacccggggacacctccttcgcccggccggcacccggtcagcacgtccccccttccctcccgcagggagcggacatggactacgactcgtaccagcactatttctacgactatgactgcggggaggatttctaccgctccacggcgcccagcgaggacatctggaagaaattcgagctggtgccatcgccccccacgtcgccgccctggggcttgggtcccggcgcaggggacccggcccccgggattggtcccccggagccgtggcccggagggtgcaccggagacgaagcggaatcccggggccactcgaaaggctggggcaggaactacgcctccatcatacgccgtgactgcatgtggagcggcttctcggcccgggaacggctggagagagctgtgagcgaccggctcgctcctggcgcgccccgggggaacccgcccaaggcgtccgccgccccggactgcactcccagcctcgaagccggcaacccggcgcccgccgccccctgtccgctgggcgaacccaagacccaggcctgctccgggtccgagagcccaagcgactcgggtaaggacctccccgagccatccaagagggggccaccccatgggtggccaaagctctgcccctgcctgaggtcaggcattggctcttctcaagctc

SEQ ID NO: 3177 - DNA, 6000 bp, Homo sapiens
aaaaacaaaaaacaaacaaaaaaagttgacaaagatgtgggggaaatacagcaccctaacacgctgctaagtgtataaacggaaccattatatttatttatttatttatttatttatttatttatttatttagagatggagtttcactcctgttgcccaggctggagtgcaatggcacaaactcggctcaccgcaacctccacctcccggatttaagcaatgctcctgcctcagcctcccgagtagctgggattacaggcatgtgccaccttgcccggctaatgttgtatttttagtagagacggggtttctccatgttggtcggactggtctcgaactcccaacctcaggtgatccgcccgcctctgcctcccaaagtgctgggattacaggtgtcagccaccgcgcccggccggaaccatcattttagagagacaactagcaatgttgagaaagagatgaagcgatagagaatcctagtgcctaaagctacctgtcccaaactttctaactggaaaaaactgtcagttgttgggaaatctgaaaacatggggagataaagggcaagtgcacaggtacgggctcacgagagccaaaagccagttatcttcccagctcactgcttagtgacatcatgttagtagcttgaaacaggccatgacggaagtatttacaccacaaaaagcagcaaatgctaccaaacagaacaccctacctcaccccggccagtttgtcagcacactacagcctgagccaatcctcatccagcaacctcttgagttctctgaacaatcgctacccagagatcaagtaccagttttataagccaggtctttggccttacatcccaaaaggaaagcctaggcctgctgagcagcactggactttcaagagcctgccggactccttcaccaaagcaggcagacctatatggcctcctttctcctagatatcccagttcctgcttgattttctaaagaaatcaaggcctgggccaagtgtggtggctcacgcctataatcccagcactttgggaggccaaggcaggtggatcacgaggtcagcagctcgagaccagcctggccaacatggtgaaaccccgtctctactaaaaatacaaaaattagccagacgtggtggcaggcgcctgtaatcccagctacttgggaggctgagacaggagaattgcttgaacctgggaggcggagtttgcagtaagctgagaccatgctattgcactccagtctgggtgagagagcgagactccatctttaaaaaagaaagaaagaaagaaagaaatcaaggcctggagaagacagcttttttcagctgtgtggaagcaaaagaaaatgggaaaatgacagggacagagagtggaccgcctcccatgcagaagcagaaagcccctgtctcaactctcttgacagtcatacacaagccccttgcagtctctgcacctttaaccgctattatactgcctccctgtagaagacacaggacttagacgtaggtgtagagggagaaggaaggtttgaggataactctcaggttccaggcttaggagcctaggtagcccatgagagatgcagaacagagcttgaagagagggcctaaagggtgtatgggagttagttatatttggggcttggtgaatttgaagtgcctatgggacaacaaatagagatgtctgattgagaatctgaagtttgagagactgatgagatcttgcaagttaccagtgcgtagatagagttgaagccatgagatcactctggcaacagaaaaggctgagcagggacacctggaggcagcaagatttaagagaaagagcaaccacagaaggaaactgagtggggacatgataggaggtaggaggaaatcaggagaatgtgacattggaaggatgaagattatcaagtgttgcagaaaggttgaatacgaagaggattaagatgagtgacacagtgagacgattttggctggctgagagggaagaaagaaagcaggagataagattcaagtaggcaggggccaggtcaggcagagccagacatggcatcagaaggcgtttgagtggtattctaagtgggaaatctttggaggattttaagaggggagtgaagaaatctgatgtgcattttaaacataccatgctgttgtgcggaggacaggctggggggcgagggtgggaatggaggtggggacaccagttaggaagctattacagtaacccagacttggattaggacggtaagggtggaggtggttaaatgtgttcagattcagtgtacattttgaaggaaggtctgacaggacttgctaattaattggatgtagaatgcagagtaagagaaagacagggatcaacaagtatggaaggtgttggttcgagcaactgagtaggtggtaatgctatttacagaggtaggcaaggctagaggaaaacaaaataaacagggttaggggtgggaatgagaatccagagttttattttgaccaccttaagtataagatgcttgccgggtgtggtggctcacacccgtaatcccagcactttgggaggccaaggcaggtggatcacctgaggtcaggagttcgagaccagcctggccaacgtggcgaaaccccgcctctactaaaaatacacatacaaatacacgccaggcatgatggcaggtgcttgtaatcccagctactcgggaggctgaggcaagagaattgcttgaacctgggaggcagaggttgcagtgagctgagattgcaccactgcactccagcctgggcaacaagagcaaaactccgtctaaaaagaaaaaaaaaaaaaagtataagatgcttttatatatgcaagtggagaagtcaagtaggcagttggctatccaaatctggagcccagggaagaagtcacagctagagataccatttgaagtcatcagcatacacagagcatcaaagccatgggactgcatgaacactgaagttgtgttttccctctcacttgatctcacagaagtttgggtagcccttgcctggggactggggaaggcatccaaagtcattaccatcagtcctcgtaatgtgagagccaggtacagctaaagacaaatctgagtcagggactgcttgcagagaaatggtgccagagaaactaagacttcacaggagagctgaaggtgttccatctcctccttgatactgaggatacttagtctgtacagccagcaatgggagccctagctgaggcctgaggggctaaaaatgggagttgatgtggctatgcaccctccccacaactcacctcctgtccccacctccacccacacaagagtcaagcctcctagaattggcataaaatccacatacagagcagtcccaggaggaggcttggggttcagtgacaggagatgagcacaggctgaagagctgagaccagccatccactgaatttttttttttttttttttgagacagagtcttgccctgtcacccaggctggcgtaccgtggtgcaatcttgggtcactgcaacctctgccccctgggtttaagagattctcatgcctcagccttctgagtcgctgggactacaggcaagcactaccacgcctagctaatttttttgtatttttagtagagacagggtttcaccatactggccaggctggtctcaaactcctgacctcagatgatccacccagctcggcctcccaaagtgctggtattataggtgtgagccactgcacccagccccatccactgattcagagcaaacaggataaaagtactgaagaccattgcttctccaactttaagttacattcaaaccatctagggattttggtaaaatgcaggttctatttttgtaggggccagctccacagggtcagtgggtttttctccctgtgtgcaaagacgagagatcatagaaataaagacacaagacaaagagataaaagaaaagacagctgggtccaggggaccactaccaccaagacgcggaaaccagtagtggccccgaatgccaggctgcgcagttatttattggatacaagacaagggggcagggtaaggagtgtgagccatctccaatctgagcaaacaggataaaagtactgaagaccattgcttctccaactttaagttacattcaaaccatctggggattttggcaaaatgcaggttcaactttaataggcctggggtggggcctaagattctgcatttctaataagtgcccacctaatgctgttgctcctggtctacagaccacattttgagtagcaagggattagaggcagccgtggaggccacccataatggagagggcatttccagttccagggagaatgtgtttattcatgcgcaaagtcacagaactattaaagtggaaatacccaccatttggcatggttgtggggcagagagttatttctcagcagattagcctcccaagagcatagcacagcatggctgttatgcaggtgggttctgaaggttgacctcctgagctttatgtcttagtatgtaatcttgggcaaatctttaacttctctgtatctccgtttcctcatctctataatggaaataacaagactattgtgcggattgtctaagtgaatggatataaagtgcttaacacacggcagcatagtaagtgctcagtaaaagttgctattctgatgctattataccattctataatcgttagcacagatacagaggctgagttgccttttggtacacggtcaaatatacaacccccatctccctcacaccaaaaggcctgtgtcctctctttcaaattcctccttccctcctgcccactccccctcccctggcccctggccccagtgtggtctggatgggccccagaggggcagggacagggacaggacgtggggctgtatctgacaggaacctgaggggctggcctgggaggggattggggcccagcttcctgaagggaggatgggctaaggcaggcacacagtggcggagaagatgccctcctgggccctcttcatggtcacctcctgcctcctcctggcccctcaaaacctggcccaagtcagcagccaaggtgaggtgcacagagggtggagatcacctatgcccaggaagagggagccctgggaggtgatgcagggccccgggaggggaggtagagtaagaggctctcctgctggtcccctccccttccacataaacatgcctgggaggacccagggccaactcaccagctgttccttagatgtctccttgctggcatcagactcagagcccctgaagtgtttctcccgaacatttgaggacctcacttgcttctgggatgaggaagaggcagcgcccagtgggacataccagctgctgtatgcctacccgcggtaggtgctggactgtgccccactccccatgtatctgtccctgcacttagctgagtcccactccagcagctttcctgcctgtccgaggaccactctgaatacaagccctaagtacctactttttgaacagatgtgctttggatgtatgtgggccccagctccagccctacataacccctaatcccacctatcccaggcagtgagaagaaaaatggcagtactagagacagaagttgggcatgggcccaggtctgggtcctcagggctccgcatggtggctgtgtaggagggacctcttctatgccaacagggagaagccccgtgcttgccccctgagttcccagagcatgccccactttggaacccgatacgtgtgccagtttccagaccaggaggaagtgcgtctcttctttccgctgcacctctgggtgaagaatgtgttcctaaaccagactcggactcagcgagtcctctttgtggacagtgtaggtaagagccatcctcctgtcaccctgccccctccacttgctgcccccagtccagctcccggaatcagacttgcctgtgcccttccagctcagcacggatacccctattaccagaccccctgaggcacc

SEQ ID NO: 3178 - DNA, 6000 bp, Homo sapiens
ccttgggcaagtcacttaaactttctcaattctctttccttgtctataaaaaagggatgataatctataacttgcataattatattgaggattaaatgagataaaagatgtgaataatcttagtgtaatttaaagattcaatgaatataattgttaactaatctgagccaagacaaaaggtagaattttgtcttcattcaggggccaggttcagtggctcatgcctgtaattccagcactttgggaggctgaggcggggcagatcacctgaggtcaggagtttgagaccagcctgaccaacatggagaaaccccgtctctactaaaaatacaaaattagctgggcgtggtggtacatgcctgtaatcccagcaactcaggaggctgaggcagccaaatcatttgaacccgggaggcgtaggttgcagtgagccaagatcacgccattgcactccagcctgggcaacaagagcaaaactctatctcaaaaaaaaaaaaaaaagaattttgttttccttcccattcttccttgggcatttggatctggaagtgaagacagtccagtataatttgatttgtgttgttcttccctcaggtggttaccttagtcaataagaaggtagcttatgagggcataaatgatgcaacccaaatgtcagatgtggcctctctgcctcctttttttttttttttttttttgagatggagtctcgctctgtcgccgaggctggagtgcagtggcgcgatctcaactcactgcaagctccgcctccagggttcacgccattctcctgcctcagcctcccgagtacctgggactaaaggcgcccaccacgacgcccggctaattttttgtgtttttagtagagacagggtttcaccacgttagccaggatggtcttgatctcctgacttcgtgatccgcccgcctcggcctcccaaagtgctgggattacaggcatgagccaccgcccccggcttttttttttttttatttgagaccaagtctgactctgtcacccaggcaagagtgcagtggtgcgatcttggttcactgcaacctccgcctcccgggttcaagcgattctcctgcctcagcctcccaagtagctgggattacagtcacctgccaccatgctggctaatttttttgtatttttagtagagatggggtttcacaatgttggccaggctggtcttgaactcctcacctcaggtgatctgccgaccttggcctcccaaagtgctgggattacaggtgtgagccgctgtctggctgcctctctgcctcttcaagatccaaatgcaatgggcttgaacctcaatattcacatttcccaactcatgtaagtgcaaagtcctacacaagtttttgcaagttccacaagggcttgtggtctcacagttacctctgcttccagtctcctttttcaactgagacctaacaaagcacattgctcaactccctactcatgtactctcacaattcccctctctcaaaaagcgttcctgggtgtaatagcccttcctgaagtcttgagagtcacataggatggtcacgtcctagtgtaacaaacaacttatcccattttaggtatcccactgctgaaacactcttgtcaactaccatgggagagtttcttctgactctttacctatgtagcacctatccttacattgattttcttactcatctttttccttttcccctccgatctctattaacttgccctcccattttgtcaagtgaattccaaatttgccttcccccaaccctcccacccccaccttttttttttttttttttttgagatggagtttcactcttgtttcccaggctggagtgcaacggcgcaatctcggctcatcgcaacctctgcctcctgctacccctaattttgtttagatggagtctcactctgttgcccatgctggagtgcagtagcacaatctcggctcactgcaacctccgcctcccaggttcaagtgattctcccgcctcagcctcccgagtaggtgggagtacaggcgcccaccaccacgcccggctaatttttgtatttttagtggagacagagttttaccatgttggccaggctggtctcgaactcctggcctcaggtggtcccaaagtgctgggattgcagacgtgggccatcatgccccacctacccctactccctttttaaacatagagagcaatttcttctcccaaagttacgtattcactctcatcaattgaggccccaagcaggacaaaaggactttctgtgcattgggatctgtcattcctggaaggcagttgtggtttaaaaatagcacttttttttttctgttatacgaagcacagtgtttcctatttgttgaatgcttactgtatgcctaccactctatcaagtcctctccagtagcttgtgttctcatttgatcttcccaacaactctgagaagcagctcttattattgctctttctacaaataaggaaggggtgtgcgtgcgagagaaattaggtaattggcataagatcacacagcaagcaaggactgaagaccaggtctgcctggccccaagcctgtgtgtgccctttctaatttactataccgcctttcagaggagggagaaggagaaagcaaccagaagaactgaggctacataaaagcaataccatctgttctcatattgtctcacaactttaaaaggatggctctatatgctgtctcattattcctaggaagaaagaataatcattatcatctcgtctattttgaaatgagggaagtagggccttgtgagagaaagagagtgagggagcagttcagcgtagcatgtttgattttgctattacagaggtaccagcagtgggtgattaagagctcaagagtgaccatgggagctggtggccaaggtgatgtggaggacaaggactgagggaccaggaaatctcatagctactgaagtcaccaggaggatggcaggacaggggctagtgaggatgaccatgagccaggggctgcaatctgtaatgcataaggagcaattggggggtcagtgatgaggaggggttgaggggggtatggctggagagcacagaagaaagaatttttgcacaagggtggaaatggccatgccatccccacatcctagttttatagtatatggggagtggaaaaatgagaagccttctagcagagggcagcaaaggaggcagtacctggaggaggctcaggcaaagaagtcacctgagtactctgaagaagcagagggtatagcagagtttgttgacaaaagaacaggattctagaaggcacagaggaaagagctgccagtgtgatgggcagtgtgagtgaaagggctgggcaagaagctcagaagagtaagcgtctgaggcagaggccagacaagcagaggagctgtcagcttgggtggttcctaggctggagatgtacactgtagacagggtcataatggaacttggggggaaaatggttttggtatttgactcagacctctaagatctgagatgggggagaagtgtggggaaagacaatgattctagagcaagccttcagctggctcctgtgacctcaggaagactggaagtccatatcaggatttgagggtggggtatttattgcctcctctatctgcctcctctagtggaagtgggacttcctagggccaggccaggcaagaacatttttctactcctgttgacagcctcctggtaatgggaaaccattgagaggtttttgtttgtttgtttgtttggtttttgatggagtctggctttgttgcccaggctggagtgcactgctggagtgcagtgatctcggctcactgcaacctctgcctcctgggtgcaagcaattctgcctcagcctcccaagtagctgggactacaggcatgcaccaccatgcccggctaatttttgtatttttagtagagacagggtttcaccatgttggccaggttggtctcgaactcctgacctcaagtgatctgcccactttggccttccaaagtgctgggattacaggcgtcagccactgtgcctggccgagagttttcttaaacaaggttgatggtaacatggtgacattttttaaagggttgctcgggcttgtgtcaaaatgattttggtatctgactcagaatgaatgggaccaggaagtctcacagctaccgaagtcaccaggagtatggcagaacaggggctagttaggatgaccatgggccaggggctgcaatctttaatgcataaggaacaattgggtgtcagtgatgaggaggggtggagggtggtatgactggagaccacaggagaaagaatttttgtacaagggtggaaatggccatgctgacaccacgtcctggttttatagggtgaattggagagtgaaggcaggaattaggaagctgttgcattagtccaagcaagaagtgatgatgctggagtcagaacaagggcaatggagacacagaggaagggcagggatatgttaaggcggtgggatgtggggtgtgaaggaaacacagatagggtagaggacagcgtccaggtttctggcttggtttccgcttgtagtcagcctccctctctgggcttttgtgaagacggagccatagaacggaccggaccagaaagcagtttggaaatggcaaaactgctacccatcatcagctacattatcatcaaagctctctaattaccctagtaagttcagtcaatggaacgaggcatgacaattaagataaatcacgagagtcacccagacatgggggacctggaggtcctgagtcacctcggattacacctgctaggagttgagggccggggcggggcgaacacagactccgcccttgggcggggcctggatgcggccggagcggagcagtgctggagcgggagcctcagccctcaggcgccactgtgaggacctgaccggaccagaccatcccgcagcgccccgccccggccccctccgcgccctcccgacgccaggtcctgccgtcccgccgaccgtccgggagcgaacccgtcgtcccgcactcggagtccgcggtaaggggcgcggccccggcagcccgcccgcggaggatcagggaccgatccccggcgcggggcgctgggcaccgagagcgggcgccgagaaggagcgcggggcagcggaaggaagccgggggaggagcgagggagggggctccgcggcggcagaggtggggctcacctagggagggggcgccgagggggtctcccagacgttgggggcagccgggggagctccaagggcgggaggggagcaagaaagacggcgctggggctgggaggagagatggggggcaactggagggcagtgagggatcgctgggggaaacgggggcgtggggggcgggggagctgcgaggagggcggagtggggctgtgcggaaaggtggtaccgggcagccgaggggcagcgaagggggcggtgaagggagcggactgaggggagctagagcgggggtgcggggggaggcatggaggtgaggagctgaggggaggggactggctgggcgggggtcgtttggagctggaggggactgaggtgccgagggcaaggggcgctgggcagctggggagtgtctggttgggagagggtcgggggtggggatgtgggtatggatagctgggaaggagaaaggcagcagggcagtgtctggtcgaaagagggtcatttatgggggatgtgggtatggatagctggggtcggaggttgagcccggctggggaccggcgtgggggtaactgtagatggaagacgaggggtggggcttgggggcgggaagcttgggagaatggaagggtgagaggccaggttgggtctaccctgctgcagaggaagggggcagggagccggtggagacacagggaagtggccttggaaatggacacaggggcctacattctggtcaggagtggagaggaggctctggaatagagtagggtctggcggctgcaag

SEQ ID NO: 3179 - DNA, 6000 bp, Homo sapiens
tcaacataaggagaagatcagcctactaaaccacatgaggcagagaggaacacacagaaccttaggcaaaagatatatatttatgcaaagtcctaagtcttgaaatttctaaatacaagagctctgaacggagttacagtcagaggatcaggcaagaaaatttcttctatgccacaagcgctatttcctctgcagataactaatactccacaagaaagtttgccagagtagagaaaatacaaaggaatgtaacacagacctgaggtcaatttccagctgcctgtgtgacctcaacaaagatacttaacctctctgggcctatttcctcacatgttaaatctggataataatatatgtctctcaagacagttgtggggagaaaacagcgtatttaaattgcttaggagaatgcctggcagataataagtgtttaatacatgaaactgatttttattactgttattaaaaaatatttagaacaccaactccctgaatacaacagaaaatgattcagggcaacagacagaggagaatgttctctccttgaggaagcaactggatcttgtcatcactgtatacctacctaccccaccccctccccagctcagtgcctggctcacagtaggctttcagttaccctctgcagatcagtgaaagctaggtgagtgcccggagtgaagaaaagttggcaggtttcccactgataccagctgctgttggtttctgaacactcaaagccgcaaataccttagggctgggggcaatgaacccaaggctgaattccaagttcagaagcagcgaagtctgaatttagaacctaggaacttaaactgctgcaggtccaacttcaagccccagttttagacagaggcttgggaaagatctgacttctaacccggttccccctcccctcctcccctcgatgcttctcacaggaaagtacacctggtcctgccaaatcgcactcttatatcctggcatcctatccaggctctgcgaggatggaaactgcgaggcaggggagggaagcgggctgtttggccaccacctccctagtgctgcaggcgaccctgtcacactaactcctggcagcccagtgaggtggacggcaccggccccacctgcagatgagggaaatgaagctcggaggagttccgtgatttgcttgcttcacactgtggtagcctggccacgaaagaaccaggattcccgacttcgggattctttccaccacacactttcgtccctaaggggtggggggcggggggagaataaaataaccgcggaaaaggaaccacttacatgtgtctagcgcttcctagaggctacccaggatatgcgcccaccacccggccgggagtgcagagatttgaagtccaggttctaccccgggctccgagtactactgcgtgactttatgcgagtgtccgccgccttctgggcttgttttcccggaagcaactcggcgcggatggagtgtgtgtgtgcgcgcgcgcgcgcgttatgttgtgcgtgttgtgttaagcgtgtgcgtgttgtccgggggcgggagggggagtagactaacaccggggttccccgagtttcggatcgcctacacgcttgttcccatctggaccctgttacccaccaattgcgcccactataaaaactgcccctccgaggcaaagctgtgaacccccgcgccctttcccccacggtcccggaggatgaagtggggtgcaacggagactcagctgagcgtccagtttcgggcaatacaaatctctcggcttctacgagcagccagacgaccccgcggaccgtcgctcctgaacttgaccgagatgcaaacttcggagtgttctcaacgtggggggccgactctcgggagaccgcccctaaacttaagtccccttaggctcgcccccacctgggacttcacagagccaccttaagggcggtattcccgcccccccggaagtgcgggggggtggcagcgtacttggattctcagcctccagccccgcgcggtggcggccgccggtggatgacttcgggccccacaagtggggaaacaacaaccacccctcgcccgcacccctggcccaaaacaactggccaggttccctggcctcccgggtccctgcatcccccgcatccccgtccgcagccgtgaacttgagcccccctccatcagaggttgcgagcgtccgcccgctcgcggcagccaccgtcactagacagtcaaaccccaagacgtcagcccacaatgcaccgggcgggccgggaaaaacggcccggggaggggaccggggaagagagggccgagaggcgtgcggcaggggggagggtaggagaaagaagggcccgactgtaggagggcagcggagcattacctcatcccgtgagcctccgcgggcccagagaagaatcttctagggtggagtctccatggtgacgggcgggcccgcccccctgagagcgacgcgagccaatgggaaggccttggggtgacatcatgggctatttttaggggttgactggtagcagataagtgttgagctcgggctggataagggctcagagttgcactgagtgtggctgaagcagcgaggcgggagtggaggtgcgcggagtcaggcagacagacagacacagccagccagccaggtcggcagtatagtccgaactgcaaatcttattttcttttcaccttctctctaactgcccagagctagcgcctgtggctcccgggctggtgtttcgggagtgtccagagagcctggtctccagccgcccccgggaggagagccctgctgcccaggcgctgttgacagcggcggaaagcagcggtacccacgcgcccgccgggggaagtcggcgagcggctgcagcagcaaagaactttcccggctgggaggaccggagacaagtggcagagtcccggagccaacttttgcaagcctttcctgcgtcttaggcttctccacggcggtaaagaccagaaggcggcggagagccacgcaagagaagaaggacgtgcgctcagcttcgctcgcaccggttgttgaacttgggcgagcgcgagccgcggctgccgggcgccccctccccctagcagcggaggaggggacaagtcgtcggagtccgggcggccaagacccgccgccggccggccactgcagggtccgcactgatccgctccgcggggagagccgctgctctgggaagtgagttcgcctgcggactccgaggaaccgctgcgcacgaagagcgctcagtgagtgaccgcgacttttcaaagccgggtagcgcgcgcgagtcgacaagtaagagtgcgggaggcatcttaattaaccctgcgctccctggagcgagctggtgaggagggcgcagcggggacgacagccagcgggtgcgtgcgctcttagagaaactttccctgtcaaaggctccggggggcgcgggtgtcccccgcttgccacagccctgttgcggccccgaaacttgtgcgcgcagcccaaactaacctcacgtgaagtgacggactgttctatgactgcaaagatggaaacgaccttctatgacgatgccctcaacgcctcgttcctcccgtccgagagcggaccttatggctacagtaaccccaagatcctgaaacagagcatgaccctgaacctggccgacccagtggggagcctgaagccgcacctccgcgccaagaactcggacctcctcacctcgcccgacgtggggctgctcaagctggcgtcgcccgagctggagcgcctgataatccagtccagcaacgggcacatcaccaccacgccgacccccacccagttcctgtgccccaagaacgtgacagatgagcaggagggcttcgccgagggcttcgtgcgcgccctggccgaactgcacagccagaacacgctgcccagcgtcacgtcggcggcgcagccggtcaacggggcaggcatggtggctcccgcggtagcctcggtggcagggggcagcggcagcggcggcttcagcgccagcctgcacagcgagccgccggtctacgcaaacctcagcaacttcaacccaggcgcgctgagcagcggcggcggggcgccctcctacggcgcggccggcctggcctttcccgcgcaaccccagcagcagcagcagccgccgcaccacctgccccagcagatgcccgtgcagcacccgcggctgcaggccctgaaggaggagcctcagacagtgcccgagatgcccggcgagacaccgcccctgtcccccatcgacatggagtcccaggagcggatcaaggcggagaggaagcgcatgaggaaccgcatcgctgcctccaagtgccgaaaaaggaagctggagagaatcgcccggctggaggaaaaagtgaaaaccttgaaagctcagaactcggagctggcgtccacggccaacatgctcagggaacaggtggcacagcttaaacagaaagtcatgaaccacgttaacagtgggtgccaactcatgctaacgcagcagttgcaaacattttgaagagagaccgtcgggggctgaggggcaacgaagaaaaaaaataacacagagagacagacttgagaacttgacaagttgcgacggagagaaaaaagaagtgtccgagaactaaagccaagggtatccaagttggactgggttgcgtcctgacggcgcccccagtgtgcacgagtgggaaggacttggcgcgccctcccttggcgtggagccagggagcggccgcctgcgggctgccccgctttgcggacgggctgtccccgcgcgaacggaacgttggacttttcgttaacattgaccaagaactgcatggacctaacattcgatctcattcagtattaaaggggggagggggagggggttacaaactgcaatagagactgtagattgcttctgtagtactccttaagaacacaaagcggggggagggttggggaggggcggcaggagggaggtttgtgagagcgaggctgagcctacagatgaactctttctggcctgccttcgttaactgtgtatgtacatatatatattttttaatttgatgaaagctgattactgtcaataaacagcttcatgcctttgtaagttatttcttgtttgtttgtttgggtatcctgcccagtgttgtttgtaaataagagatttggagcactctgagtttaccatttgtaataaagtatataatttttttatgttttgtttctgaaaattccagaaaggatatttaagaaaatacaataaactattggaaagtactcccctaacctcttttctgcatcatctgtagatactagctatctaggtggagttgaaagagttaagaatgtcgattaaaatcactctcagtgcttcttactattaagcagtaaaaactgttctctattagactttagaaataaatgtacctgatgtacctgatgctatggtcaggttatactcctcctcccccagctatctatatggaattgcttaccaaaggatagtgcgatgtttcaggaggctggaggaaggggggttgcagtggagagggacagcccactgagaagtcaaacatttcaaagtttggattgtatcaagtggcatgtgctgtgaccatttataatgttagtagaaattttacaataggtgcttattctcaaagcaggaattggtggcagattttacaaaagatgtatccttccaatttggaatcttctctttgacaattcctagataaaaagatggcctttgcttatgaatatttataacagcattcttgtcacaataaatgtattcaaataccaataacagatcttgaattgcttccctttactacttttttcttcccaagttatatactgaagtttttatttttagttgctgaggttaacattgctgcaatctgaagtgatttgaaaattaagaagcaaagaatttaggaagagtcaaactagaagttgtgatctgaatgaaacagtctcccaattt

SEQ ID NO: 3180 - DNA, 6000 bp, Homo sapiens
caggagagcaggaaagcaaagagatatggcaaaccaaagaagtatgtctggaaaagaactttgtggctattgtcacatggaacacctcatatcagatagataagaagcctacctacacatattcaagacttaatgtcactctgcatctccccaacttttaaaagcttatttaaaagcatattttccaatgcctgctttagctgtggaaaaggaagactctccgagggcaaatccaggagtcatggaaaacaatgggcagggcagcttggtgctgtgactggatgggtctttaaggttgtttcccttgaataaagaatgagggaattccaccaggggaaggagagtagaccaaacatttggtgaacagaaagggagacagagtctttagtgttattccccaaatattcctggagagccctttgagacacctggtaggattatagtgatctaaagaggcatggccatgtgactgctttggccaatgatgtatgggcagaagtgatgtgtgccataagtggatgctctgacagccatgatgttccgagttccttccccacagtcaggatagctgtgaaaaggggtatcaacacgaggcctccttcagcctgagccctttagtgactacaatgagcagagctaccctgccaacctacaacggtcatgtagcagaaatgaccaactttcactggaataagccactgatatgttagggttgtttgttagggcagcataacactgcctttcctgacagaactgggagtgagagataaggctggagagagaaggagttggattgtgaaaagccccttctccaaggcataggaatcggaactctcctgattgtaaggaaaagccaatgaaggcttccaagcaggggcgttaacatgaacagatttgttatttttttggatgaaatatgctatttctcaacataaggagaagatcagcctactaaaccacatgaggcagagaggaacacacagaaccttaggcaaaagatatatatttatgcaaagtcctaagtcttgaaatttctaaatacaagagctctgaacggagttacagtcagaggatcaggcaagaaaatttcttctatgccacaagcgctatttcctctgcagataactaatactccacaagaaagtttgccagagtagagaaaatacaaaggaatgtaacacagacctgaggtcaatttccagctgcctgtgtgacctcaacaaagatacttaacctctctgggcctatttcctcacatgttaaatctggataataatatatgtctctcaagacagttgtggggagaaaacagcgtatttaaattgcttaggagaatgcctggcagataataagtgtttaatacatgaaactgatttttattactgttattaaaaaatatttagaacaccaactccctgaatacaacagaaaatgattcagggcaacagacagaggagaatgttctctccttgaggaagcaactggatcttgtcatcactgtatacctacctaccccaccccctccccagctcagtgcctggctcacagtaggctttcagttaccctctgcagatcagtgaaagctaggtgagtgcccggagtgaagaaaagttggcaggtttcccactgataccagctgctgttggtttctgaacactcaaagccgcaaataccttagggctgggggcaatgaacccaaggctgaattccaagttcagaagcagcgaagtctgaatttagaacctaggaacttaaactgctgcaggtccaacttcaagccccagttttagacagaggcttgggaaagatctgacttctaacccggttccccctcccctcctcccctcgatgcttctcacaggaaagtacacctggtcctgccaaatcgcactcttatatcctggcatcctatccaggctctgcgaggatggaaactgcgaggcaggggagggaagcgggctgtttggccaccacctccctagtgctgcaggcgaccctgtcacactaactcctggcagcccagtgaggtggacggcaccggccccacctgcagatgagggaaatgaagctcggaggagttccgtgatttgcttgcttcacactgtggtagcctggccacgaaagaaccaggattcccgacttcgggattctttccaccacacactttcgtccctaaggggtggggggcggggggagaataaaataaccgcggaaaaggaaccacttacatgtgtctagcgcttcctagaggctacccaggatatgcgcccaccacccggccgggagtgcagagatttgaagtccaggttctaccccgggctccgagtactactgcgtgactttatgcgagtgtccgccgccttctgggcttgttttcccggaagcaactcggcgcggatggagtgtgtgtgtgcgcgcgcgcgcgcgttatgttgtgcgtgttgtgttaagcgtgtgcgtgttgtccgggggcgggagggggagtagactaacaccggggttccccgagtttcggatcgcctacacgcttgttcccatctggaccctgttacccaccaattgcgcccactataaaaactgcccctccgaggcaaagctgtgaacccccgcgccctttcccccacggtcccggaggatgaagtggggtgcaacggagactcagctgagcgtccagtttcgggcaatacaaatctctcggcttctacgagcagccagacgaccccgcggaccgtcgctcctgaacttgaccgagatgcaaacttcggagtgttctcaacgtggggggccgactctcgggagaccgcccctaaacttaagtccccttaggctcgcccccacctgggacttcacagagccaccttaagggcggtattcccgcccccccggaagtgcgggggggtggcagcgtacttggattctcagcctccagccccgcgcggtggcggccgccggtggatgacttcgggccccacaagtggggaaacaacaaccacccctcgcccgcacccctggcccaaaacaactggccaggttccctggcctcccgggtccctgcatcccccgcatccccgtccgcagccgtgaacttgagcccccctccatcagaggttgcgagcgtccgcccgctcgcggcagccaccgtcactagacagtcaaaccccaagacgtcagcccacaatgcaccgggcgggccgggaaaaacggcccggggaggggaccggggaagagagggccgagaggcgtgcggcaggggggagggtaggagaaagaagggcccgactgtaggagggcagcggagcattacctcatcccgtgagcctccgcgggcccagagaagaatcttctagggtggagtctccatggtgacgggcgggcccgcccccctgagagcgacgcgagccaatgggaaggccttggggtgacatcatgggctatttttaggggttgactggtagcagataagtgttgagctcgggctggataagggctcagagttgcactgagtgtggctgaagcagcgaggcgggagtggaggtgcgcggagtcaggcagacagacagacacagccagccagccaggtcggcagtatagtccgaactgcaaatcttattttcttttcaccttctctctaactgcccagagctagcgcctgtggctcccgggctggtgtttcgggagtgtccagagagcctggtctccagccgcccccgggaggagagccctgctgcccaggcgctgttgacagcggcggaaagcagcggtacccacgcgcccgccgggggaagtcggcgagcggctgcagcagcaaagaactttcccggctgggaggaccggagacaagtggcagagtcccggagccaacttttgcaagcctttcctgcgtcttaggcttctccacggcggtaaagaccagaaggcggcggagagccacgcaagagaagaaggacgtgcgctcagcttcgctcgcaccggttgttgaacttgggcgagcgcgagccgcggctgccgggcgccccctccccctagcagcggaggaggggacaagtcgtcggagtccgggcggccaagacccgccgccggccggccactgcagggtccgcactgatccgctccgcggggagagccgctgctctgggaagtgagttcgcctgcggactccgaggaaccgctgcgcacgaagagcgctcagtgagtgaccgcgacttttcaaagccgggtagcgcgcgcgagtcgacaagtaagagtgcgggaggcatcttaattaaccctgcgctccctggagcgagctggtgaggagggcgcagcggggacgacagccagcgggtgcgtgcgctcttagagaaactttccctgtcaaaggctccggggggcgcgggtgtcccccgcttgccacagccctgttgcggccccgaaacttgtgcgcgcagcccaaactaacctcacgtgaagtgacggactgttctatgactgcaaagatggaaacgaccttctatgacgatgccctcaacgcctcgttcctcccgtccgagagcggaccttatggctacagtaaccccaagatcctgaaacagagcatgaccctgaacctggccgacccagtggggagcctgaagccgcacctccgcgccaagaactcggacctcctcacctcgcccgacgtggggctgctcaagctggcgtcgcccgagctggagcgcctgataatccagtccagcaacgggcacatcaccaccacgccgacccccacccagttcctgtgccccaagaacgtgacagatgagcaggagggcttcgccgagggcttcgtgcgcgccctggccgaactgcacagccagaacacgctgcccagcgtcacgtcggcggcgcagccggtcaacggggcaggcatggtggctcccgcggtagcctcggtggcagggggcagcggcagcggcggcttcagcgccagcctgcacagcgagccgccggtctacgcaaacctcagcaacttcaacccaggcgcgctgagcagcggcggcggggcgccctcctacggcgcggccggcctggcctttcccgcgcaaccccagcagcagcagcagccgccgcaccacctgccccagcagatgcccgtgcagcacccgcggctgcaggccctgaaggaggagcctcagacagtgcccgagatgcccggcgagacaccgcccctgtcccccatcgacatggagtcccaggagcggatcaaggcggagaggaagcgcatgaggaaccgcatcgctgcctccaagtgccgaaaaaggaagctggagagaatcgcccggctggaggaaaaagtgaaaaccttgaaagctcagaactcggagctggcgtccacggccaacatgctcagggaacaggtggcacagcttaaacagaaagtcatgaaccacgttaacagtgggtgccaactcatgctaacgcagcagttgcaaacattttgaagagagaccgtcgggggctgaggggcaacgaagaaaaaaaataacacagagagacagacttgagaacttgacaagttgcgacggagagaaaaaagaagtgtccgagaactaaagccaagggtatccaagttggactgggttgcgtcctgacggcgcccccagtgtgcacgagtgggaaggacttggcgcgccctcccttggcgtggagccagggagcggccgcctgcgggctgccccgctttgcggacgggctgtccccgcgcgaacggaacgttggacttttcgttaacattgaccaagaactgcatggacctaacattcgatctcattcagtattaaaggggggagggggagggggttacaaactgcaatagagactgtagattgcttctgtagtactccttaagaacacaaagcggggggagggttggggaggggcggcaggagggaggtttgtgagagcgaggctgagcctacagatgaactctttctggcctgccttcgttaactgtgtatgtacatatatatattttttaatttg

SEQ ID NO: 3181 - DNA, 6000 bp, Homo sapiens
tcaattatctccacctgaccccacctttgacatgtgaggattattacaattcaaggtgagatttgagtggggacacaaccaaaccatatgagtggacatgcaatatgagtgagaaacaattctgtgattgtaacccagtaagatttttggatggctaacacagcataacctagagtatatggaggtgtgcatttccagctctttgacttccgggtacctagtaggattgcactttcctgcaccctttaagtaaggcatggccatgtgactaattttagccaataatatgtaaatacaataaaaagtgtcattcctaggagggagcttttaaagccaatgtgagttcaccatgctttctttcccctgccaaactgatgcgatgattgttgaagcatgtatcaagatgaaaccttcttcagactaggtttctaaatgagcacattaagcagagccccgtgaagttgaacatgtagtatgagcaaaatataaaatttatttttaagccactgaaattttaggattgtttgttatggcagcataacctaaaccatcctgactcatataaaaattggctcctagatatgggttagtgtaataacaacaataagcataacaacaataaaactaaacaatcatttagagggcgataactaagaacactgctatcagaagctgaagggatggtgatctgtttggtaaacatatcacctgtgataatgtagaaggcagatcatgaacctgatgaactaaagaaaaggattgtaaaacagagagtgagtagtgtgtgttggtggctgttggatgcattctgaaagttactacaagctattcaaagatgaactcagaaaaatttggcctgtttgcaatcaggaatgaaatggaatagagaaaacctataaatccagggatttacatcgttagaagaggcaattgtttcccagtcccgactggtaaaatataaaatcaagaaatacttttagcaagaaaggacctggaagaaactaagctttgaagtaaggatcaagtcacaaagtatgaacctactattaaaacctcaggataggaggccgaggaggacggatcacctgaggtcgggagttcgagacaagcctgaccaatatggagaaatcctgtcgctcctaaaaatacaaaattagccgggcgtggtggcgcatgcctgtaatcccagctactcaggaggctgaggcaggagaatcgcttgaacccgggaggtagaggttgcagtgagccgagactgtgccattgcactccaaccagggcaacaagagtgaaactccgtctcagaaaaaaaaaaaaaaggatcaattaagatcttacccagtatatactttcaactggacaaaatggctctgggaaaaggaagaaaggtctaactctcccatcaaaacccaataagcccaaagtgctcaaaatcaagtgaagagcaagagagtgagacggcaaaagagagacagaggagtcaacaggcaggagagcaggaaagcaaagagatatggcaaaccaaagaagtatgtctggaaaagaactttgtggctattgtcacatggaacacctcatatcagatagataagaagcctacctacacatattcaagacttaatgtcactctgcatctccccaacttttaaaagcttatttaaaagcatattttccaatgcctgctttagctgtggaaaaggaagactctccgagggcaaatccaggagtcatggaaaacaatgggcagggcagcttggtgctgtgactggatgggtctttaaggttgtttcccttgaataaagaatgagggaattccaccaggggaaggagagtagaccaaacatttggtgaacagaaagggagacagagtctttagtgttattccccaaatattcctggagagccctttgagacacctggtaggattatagtgatctaaagaggcatggccatgtgactgctttggccaatgatgtatgggcagaagtgatgtgtgccataagtggatgctctgacagccatgatgttccgagttccttccccacagtcaggatagctgtgaaaaggggtatcaacacgaggcctccttcagcctgagccctttagtgactacaatgagcagagctaccctgccaacctacaacggtcatgtagcagaaatgaccaactttcactggaataagccactgatatgttagggttgtttgttagggcagcataacactgcctttcctgacagaactgggagtgagagataaggctggagagagaaggagttggattgtgaaaagccccttctccaaggcataggaatcggaactctcctgattgtaaggaaaagccaatgaaggcttccaagcaggggcgttaacatgaacagatttgttatttttttggatgaaatatgctatttctcaacataaggagaagatcagcctactaaaccacatgaggcagagaggaacacacagaaccttaggcaaaagatatatatttatgcaaagtcctaagtcttgaaatttctaaatacaagagctctgaacggagttacagtcagaggatcaggcaagaaaatttcttctatgccacaagcgctatttcctctgcagataactaatactccacaagaaagtttgccagagtagagaaaatacaaaggaatgtaacacagacctgaggtcaatttccagctgcctgtgtgacctcaacaaagatacttaacctctctgggcctatttcctcacatgttaaatctggataataatatatgtctctcaagacagttgtggggagaaaacagcgtatttaaattgcttaggagaatgcctggcagataataagtgtttaatacatgaaactgatttttattactgttattaaaaaatatttagaacaccaactccctgaatacaacagaaaatgattcagggcaacagacagaggagaatgttctctccttgaggaagcaactggatcttgtcatcactgtatacctacctaccccaccccctccccagctcagtgcctggctcacagtaggctttcagttaccctctgcagatcagtgaaagctaggtgagtgcccggagtgaagaaaagttggcaggtttcccactgataccagctgctgttggtttctgaacactcaaagccgcaaataccttagggctgggggcaatgaacccaaggctgaattccaagttcagaagcagcgaagtctgaatttagaacctaggaacttaaactgctgcaggtccaacttcaagccccagttttagacagaggcttgggaaagatctgacttctaacccggttccccctcccctcctcccctcgatgcttctcacaggaaagtacacctggtcctgccaaatcgcactcttatatcctggcatcctatccaggctctgcgaggatggaaactgcgaggcaggggagggaagcgggctgtttggccaccacctccctagtgctgcaggcgaccctgtcacactaactcctggcagcccagtgaggtggacggcaccggccccacctgcagatgagggaaatgaagctcggaggagttccgtgatttgcttgcttcacactgtggtagcctggccacgaaagaaccaggattcccgacttcgggattctttccaccacacactttcgtccctaaggggtggggggcggggggagaataaaataaccgcggaaaaggaaccacttacatgtgtctagcgcttcctagaggctacccaggatatgcgcccaccacccggccgggagtgcagagatttgaagtccaggttctaccccgggctccgagtactactgcgtgactttatgcgagtgtccgccgccttctgggcttgttttcccggaagcaactcggcgcggatggagtgtgtgtgtgcgcgcgcgcgcgcgttatgttgtgcgtgttgtgttaagcgtgtgcgtgttgtccgggggcgggagggggagtagactaacaccggggttccccgagtttcggatcgcctacacgcttgttcccatctggaccctgttacccaccaattgcgcccactataaaaactgcccctccgaggcaaagctgtgaacccccgcgccctttcccccacggtcccggaggatgaagtggggtgcaacggagactcagctgagcgtccagtttcgggcaatacaaatctctcggcttctacgagcagccagacgaccccgcggaccgtcgctcctgaacttgaccgagatgcaaacttcggagtgttctcaacgtggggggccgactctcgggagaccgcccctaaacttaagtccccttaggctcgcccccacctgggacttcacagagccaccttaagggcggtattcccgcccccccggaagtgcgggggggtggcagcgtacttggattctcagcctccagccccgcgcggtggcggccgccggtggatgacttcgggccccacaagtggggaaacaacaaccacccctcgcccgcacccctggcccaaaacaactggccaggttccctggcctcccgggtccctgcatcccccgcatccccgtccgcagccgtgaacttgagcccccctccatcagaggttgcgagcgtccgcccgctcgcggcagccaccgtcactagacagtcaaaccccaagacgtcagcccacaatgcaccgggcgggccgggaaaaacggcccggggaggggaccggggaagagagggccgagaggcgtgcggcaggggggagggtaggagaaagaagggcccgactgtaggagggcagcggagcattacctcatcccgtgagcctccgcgggcccagagaagaatcttctagggtggagtctccatggtgacgggcgggcccgcccccctgagagcgacgcgagccaatgggaaggccttggggtgacatcatgggctatttttaggggttgactggtagcagataagtgttgagctcgggctggataagggctcagagttgcactgagtgtggctgaagcagcgaggcgggagtggaggtgcgcggagtcaggcagacagacagacacagccagccagccaggtcggcagtatagtccgaactgcaaatcttattttcttttcaccttctctctaactgcccagagctagcgcctgtggctcccgggctggtgtttcgggagtgtccagagagcctggtctccagccgcccccgggaggagagccctgctgcccaggcgctgttgacagcggcggaaagcagcggtacccacgcgcccgccgggggaagtcggcgagcggctgcagcagcaaagaactttcccggctgggaggaccggagacaagtggcagagtcccggagccaacttttgcaagcctttcctgcgtcttaggcttctccacggcggtaaagaccagaaggcggcggagagccacgcaagagaagaaggacgtgcgctcagcttcgctcgcaccggttgttgaacttgggcgagcgcgagccgcggctgccgggcgccccctccccctagcagcggaggaggggacaagtcgtcggagtccgggcggccaagacccgccgccggccggccactgcagggtccgcactgatccgctccgcggggagagccgctgctctgggaagtgagttcgcctgcggactccgaggaaccgctgcgcacgaagagcgctcagtgagtgaccgcgacttttcaaagccgggtagcgcgcgcgagtcgacaagtaagagtgcgggaggcatcttaattaaccctgcgctccctggagcgagctggtgaggagggcgcagcggggacgacagccagcgggtgcgtgcgctcttagagaaactttccctgtcaaaggctccggggggcgcgggtgtcccccgcttgccacagccctgttgcggccccgaaacttgtgcgcgcagcccaaactaacctcacgtgaagtgacggactgttctatgactgcaaagatggaaacgaccttctatgacgatgccctcaacgcct

SEQ ID NO: 3182 - DNA, 6000 bp, Homo sapiens
accctggaaatgataattacttgacaaaaatgcagtgcatttctgaatgaagcacctcatttgtattaatatgtgattatgacagattattaactcaagtgcatttgaagtatgaaaaaaagatgtgttaagtttattttgttaataagacaaactatgcaacttggaaacaaatttgaatgttggatgattagtttatgtcttaacatttgaggatgtgcatggatataaagggcaggcagttccactctccttttccctgaacttgagttgacttcttcacattcactatggcaacctcaatgatcaacacatacaggagctctgaagtgcatgccaaaactttccaacgttaataatgaataggtatgaactccactatgcaagcttctctgaacgagtcactgcaaagctaatgtaattttagggtgtcgtttccttctcacagtacaccaccgcgaaggtctaatcccagacagcaatctttatggacatttgcttttccccccactacactacatgactaagcccctttggtctccacttcttactctgacattgaccagtatagcttgctttgcatcctctcagtttaaacaaagtaacattggaagggaaatactgttggagcaaacgactttggtataatgcatcttttcctttagtgagaatgcaagcctcagctgccctaatatttaactgaagcagatccccatttgcttatctgtttaattgcacttttatctaggccagctgctgctcctgctgctgctatagccactcctaattggaaggacgttgctgtggtatcctagtggtttaaaactgagagactgctacctagaacctgcacccacattggtatctgaaccgggctcctttataaatcatattttacattttaacataaaagataagctttcaggatacaattttatttcagccttctactgctaggcattttatcacagtacttttacgtgagctgaagattgaccattgatttcataaccaaaaatgactttagttctgcataatattacttaaaactcataaagacaattttatacttgagtagttattattccttccatctatttgggtcagtttaatggtacattaataattattaatgtgaattggaatctattatatggttgtattcctattagagcccctgaaaagacttgaaatcaaagcctctttctaagtattatttatagtttatggtttgctttattttctttttaaaacattgctgtatatctgagtagtgaacatagcatttgtgaaagtgaactttctccaaaatttgatcagtccaagcattttttagttgtaatgtctcacagaaatagcactttagtcacgatgatagggtaccttcaaaaactgtactggtaattacttttctgtggcccctgttgagataggcagtcttactggacattgatgtgtttagtctgaatagaacttcagataagagacaaagcaaattgtgcaataatgtatgaattgagagccacttgtattgaaaaacaaaataggacagaattttatatttaaacaagtaaaaattatttaaattttcacttgaaatttaaagcttccatgaaaattgtttctcttgcaccaataatgcacattgaactctgtgctggcattaaagatggagttctgcaaaggctccaagcacctcagcaacaccacttctcagaattatattaagccagttgggacatgatgaaagaatgcaaggtataaaccccttgagggcccatgagtcaccatctagaaaggttcttgaaaggggaagaatgttttatagtttgatcaataggaatctgagaagtaggctgcagggtaaatataagttgaggattaaaaacttttggaaacttgaagaattgaattacaatcctaagaaagttcccaggagaaaaagagagatacagaaagagagactttttcatcccatctcaaccagcagccaacctttcttctaggtcagagtacagccaaaatagatttgatgataatcagccctaattatctcagctctattgcagaactaaggcatgaacagagttttctagagatccaagtgcccaccatagtagtttcaggtggataccaaaaggaagtaaaaatggggttgcaggcttcaaaacttagagcaacttttccatagaatactccatacaaaaaggtttcttattccattttttcagccagaatgaaactttactttgaaaaatatatgtattttcagtgttgcagttgggttttcctttctctccttaccattattttagtgtcagtgaacaggctattgcattagtgtgggtatgacagtttagattgtgtttataaaggaggcagtctgtttaatggtatagtcactgtcacaagcacaaaagcataaatacaggagcctggctaagaatttctgaactcagcagattctaagagttactgatactcctttgggttttgccttattcttagaaaatttacagaatcctaccatgaaacatgattaaataaaaacagacttctaggagctgctatttatgtggcacactcagcatgatcagatcagagtgcaaacagctctatgccgtatccatgaatgcagcaggcctctccttggcagagggtgaatgtggtggccatgaggacaggaagggatagcaaggagaaaggcaaaggggaagccctactaaaggactcatgcccttggagttgcatccagcacaaagccccttttcaatttttcctatctgggttacacagagaaggctttgtgtagagcatttcttaaagcacccaatcagaaatgtgaggaaagttgcttctcttgatgagacaccagaggaaggaagcaggagacaatgacaagggaggaaataaaggagggatagctaagtaaggtagacagctaagtctagtttgttcccagtgttgtaccagtctcatcagtgccgtgtctgggtctcacagcctctggtgttctatgatggatcctctcttctgccaagagctggccacctggcagccaaaccctgcacaagatatgaagagcctgtaaatgcaggacttctgttcctggatctgctcctctgatgaagaggtgcaagtgtctccgtagctacttgaccaccgtaaataccattgtttcctcttcctgggggtcacccagagaaccctcatggaacatggtgtgacaactactgacacatggggttatcataggttttatgccatgaataatacatttaaagtatgttgtaaaagacttactttgcaaggacctaaaaacacttctatgggaagaatcagaaaaaaataattatttttgaattgaaattcaggtgcacactcatttatgaacactgaacccaaaagagctgaggtttccccaattttggagctcgtgtagaaagctttcctcaatctccttggatggaaaacttaaactgctcccactgtttagcacttcctgcagtttatgactctcagttcaggctctaactcaccagtaggggaatagggatattctggtgtatatgggtctttctgggcaaaccagtgaagcaagtctcacagctgttctgtcaagaacccaaattcccctaacctgggttctaagactgggccagccaaatggcacttttatagaacctcttcccaaaccagcgctcttgggcgatctttcttctgaaacgttatgtgtttccaatagggaggaaaagaagaaatgaagtaactttttgtccaggaatactcctttgtaaaggttgatttcagggctagcaaagatgccttcatagaaggcagttatttgtgaaagccaaggtgatggggtttgaaattgacaaagggatgaggacttagcttttcttctgaaggtgactttctgcccatggatcttccatttccattaatcagaagtattcgttaaaaaaagaaaaaaaagaaaaaaaaaagctagagagaaaagaaaaaacaaaccaacctcctgttccatgccccaggcaatcttcttgtgtaaagcaatctgtggcagctagtcaggtggcctggcaggagttttccccttcaactctggctgggagcttcttagaatctcttaaagaaacatcctgcagagctcccacttaggcctgctctttctgtcctgatgtctctctgtggcatcttttcagatgcttctttagaggatcattttggatggggaaggtataggcctgggcttatgatgatgagggatttcctgtctgtctggagaagttagaacatgtataagtgctcctgggtatggggaaaggaggcaaagatgctgcccaccagttttccaagtgccgtgtgcgcccttatccccagaacgatcctttgctcttctactatagtacgcatttgaagatctcagggcccttataaccattaggcatttgcagggcctgaaatgtaatgaaggaattgttcttcctatttctggaggtaaactaaatatgaaaagaaaattagcattaaaatcaatcctgactcagtttttttttaagttccatctttaactcaaactgtatttctgccaaaattaaaaataaaagttatagccacttaacaaaaaacaattcacacgaaatgttgtactatgtataatttgctattgttacaaatcgtcaatgcagtacctttgttagcttagtgtttttagattcttaaaacgaggcatgttgaaagaaaggttgcatttagctttctcttatgcctataaatttagtgtaagcccctgttttaaggagctttatgtggtaggactgacattgcttaataaacaatggaaaaagttaagcataacctagaagtcatttaaaactgtgagtcactttcctgacaagccaatagggtaagagaaccaaggttgcaaaataattactagcccagcctgagggaccgtggaaatatattacaggtatcagttaagaaaacaaagcagtggtgttttaccactctgcagagaaagctaaggttgctaaccaaacaaaataactttacactgacaatgccaatttttacatttctttcagaacaagggacactcaaactaccagaggtaagattaacattttaaatattttttataacctttgcatttcaagttgtttgctaacttaaccaggcttgggcttttacactgttaaatgtgccttttaaaataaatagaaataaacagaaacagagggaacaaccaagtgattgtgaacaaaatgcaaaagttaaatccaaggaatgttcactgtcactgtccgaaggtcttaggtagagaaaaaatgtgaatatttaatcaaagactgtgtatgaaatgggactgtaagtacagagggaagggtggcccttatcgccagaagttggtagatgcgtccccgtcatgaaatgttgtgtcactgcccgacatttgccgaattactgaaattccgtagaattagtgcaaattctaacgttgttcatctaagattatggttccatgtttctagtacttttccattagagcagaaagatgatgattatcacatcctattgatcaaatgaagatctagtaacatttccttttggtttaacatagagtctcctaatggcttagaagtatgtaatccatgttacctctcagaataaagttactttaaaaatccaaaaaaaagttatttaaaaaaatacagaagatgatgggatatgtaggaagtaaacagcaagttgcccatcattaaatactttcctgttgaaaatactgtcaatggtgttgtttgatgttgtttatatagagttccccaaaattataaaatttcagacagaaaagattttaatggttcccagacaatcattgccttgaccttcaaccaaaaataacagatttcttacctgactgcccctccccacaaatggccatagcaaaacatttttagaaatcatagaaaaataaaatacaaactatgtgtg

SEQ ID NO: 3183 - DNA, 6000 bp, Homo sapiens
tatgaaaatgctgtagcagaaggcttaatcaccccatttgtcattcagacctcaattcccctgtccctcagagaacttacctggaacccttagatggagacatattccttcttctcctctcctctggcactgtgtgccattcctctgtaacccttctcacctgtgtaaacacgtatgtgcatttttgtgactatttgcttgtctgattcccaactctgccatgaatactttgcaggcaaggtcttgtccagttttctcagtgcatgtctacagggctgggcctggcatgtggtaggtgatgaatttccaggtgggtgaccattgggttgactgactgagaaaataatcaaacagttgatgtgtgtaggcagtggggaaatgggaagcacataaggcctgtgtggaaggatattttcctcttccctccagggctggccaccttttcagggtccctttacctttcttctggttccactgaagaggccatgggcttctagaagtgtaggcttttctctgctttgcccatatcaagctgggggggctttgggatggcatgtcacgctatgctaccacctgcgtctgtggagtcttctagccagtgtgcatctgttttgtttcccattgtgttctgggtgctctgaagggttttgtgtagacttgtaccactcagtatggttgctattaaccacatgtggctactgagcactcaggttgtggctagtctgtattgacatgagctgtaactgcaatagacacatgggattttgaagagttaatataaaaaatactaaaacatcttgattttatattggttacatgttgaaatgataatattctaggtatcttgaattaaataaaatatatgattaaaattatttttacctggttgtatatttttctaacatggcttttaaaatattaagttatgtatgtgacttacacatttctgttgactagctctggtccagaaactacatttcttacatcatgaattcatttatctgcatttcatttgttcaggcacatatgaaaatgaacactttcaagcagtgtatgaaatgaccactgttaccaaaccagcgagaacacagactttaaggactgtcattttattctcctagtctggtaggcagtcataacttctgttagatggtttgaaacgtttacagatgcttcatgattttctttgagcagtcctgaggctgggacaaaagatggagcatctttgggctggaaatccatggcatgttccccacgacgagatcctatcgttctggccttttctttctgagactttctgcatttcatcctttgaagtggtaatagctacggacaacattcaggaagcagtgatctttgccagtgagttgtgtgactttgacagcgagctgagtttggaaaatgtgttgactttgtcccagctgtgtgattgtgggcagctctgagcattcgttaaactttctaagtcctttaggtcatatggaactctccaagtctatttcagatcacatcaacagtttctcctctggcctgacatgagcacatggggcatgtccattcaaagggagttcatgtgaaagttacagtggctttccaatcagctggtgatgatgctgtctgctgtatccccagccactctgctggagttgctactgtaatggttcagtgactaattggtgtttacctacagagtctgtaaatacattcccattcttggtattgaacatattaaaattgccatgtaatctttgtagcttattctctctactatctgcttaaaggcagagaaggatttgcaaatatgattacattttcaaaatgaaagtgtttcttttacggttgtgtactaacaattctttatcatttgcgtactaagtttaacacactctaacagaccagcataaatttaggcagagcagggaatatttctatctagaaaactgtgctttcaggcagctaactgcatggatgagttccaggttttatctactttgctatttggaccgggggatggtaaaacagtgtatgaggaaagtttcttactgtctttcacttggtgagagaaaattagtattgctggtcccagtttgcttttttctgcttgctctttagtgggaaagtgttaattttgaaattgcatctgtaaattatagtcatgtgaattttgtgctctgctggaatttctatgtgttggcctggagtctgtctggagcacagcaggcaaagcagttgggtgtggctgaacatgggagtgtgtggagagtgggcagagtgagggtggaaggggcagggcagcagctcctggggacttctctgagtgtactgctaagtaactggcactctgcatttaagaattttggggctggcatggtggtaatggtggtatgatcacattaatagttttgaaatgtcatacaacctctatggtagccaagtagaggatgaaattgaagggagtgaaattgtaggcctggagacatattggaagctattccaataattgaggcaagaaatagagagggccgagacatagcagaggcatgggaggagagaagggattggatctgagagagtctgaaaaggatgaattgactgataggatttagacctggcacttacttccagaaagtttccccaatgtctggccaggtgaaggagaggagtgggattgtggggtcattgggaatggggaggaaaagcaggctaggaggaaaagatgctctgtttggggtcttcagaggcagagtgttgaggtcaagaaggcagagacggcaggaccatagtggtgcggaaatgcctaatgaggcaagtgcagtcctgtttgctttagaaaaaatttgctcaatgaccttctttctctcagaatctgaaaaatatccacttttaatcaaataagaaatatatcattcagaaaatggcaaccacaaaaagcttctcagagaataaggtgcaagtgaatctacttagaatacacaagtattctcactggagtacgatgtgatgatgagaggggtgggccagagactggtcattcttgcccatcaaacctgtatcaacctgaagaaagagagtctggcaaatgtccaggtgcccatcaagatgcagactaggatcacctcttttaaagatgcctttgaacccctctagctccctctgcccacgaaggggtgcaactggccttgctgtctcccctgggcttcagatgttgcttgtcatactagtctgtgttttccctcagtacccttcattgttatggtctttcctaatagactgttggttttttgagagcaggaagcattgtatcctcattttgctccctgaagcttttggagtgtgtgtctggtgtatctagcacagaatgaagtgttcagtaaatacaagaaacttatagaaagggtagtgaagtggaaagagcaataaccaggacagaagaaaagggacctggtactaaccctgctactattagttgtttaacctggagcaagccagtttttctgggccatggtattctgataggcaaaggaagagatttagtgagaatctggaaagtccataaatggtccttcagaggtccctggatttcttgatattagatgcagactttatatgtgtttttgtgtgtgtatgtgtgtatgtgtgtgtgtagataggtgggtttaattttttgagtaaatgagtgatagctttcatcatactctcaaagggatctataacaaaataataaccactgaataaaacatgatatctctagaatttgtaagatagagttgtggggcctgggtataggcattcagctaaaggacttgtctggaaattgctatgaacaaacacaccctagttacacagatttttgtgtttatttggagtagagaggtgtggcttctctgagcccatcctgtgtactatcctttcttagaactctttcagttctatgtgaggtcacactcacattttgttttctgaagtactttacaaagaccaaatctgactttaccgatgatgatgaggatgatgacaatgacaacaaaggtgatgatgacgttagaaatagcagcagaagtataggacattcttctatgtgcatatatctgtctgtctgtcacctctttaacgctgaaagtaaacttgtttgataagtgatgttttaattgtaatttcgtaggtaagggaactaaggcacagagccttgatcatcttgactcccgtccttaccttgctagtaagagatggagctggtctttgaacccagaaaatctgacttctgagcctgcacttctaatcagcccagtatatggctttttttttaaaggaagttcttgttctctgtagtttcacttttgaagattcaaaaaatagtaagtatagaatacttcttaaatttatgattgttaccaaggacagcacaaactataatttggatccatttaacctatatagatactctactctcttgaacaatggaaatgtatttcccatagtttacagtcttcctgacatagaaatgttttgttgatcttatctggctgtactgctttgctttgcccatagaggaggtgctaaggacatttttcaacagcatcccacagatcaaagcaacaagcaggtgcttcaggaaatccctaagatgtgttgctggaagtgacactaagctgtagtgtatcctaatgggggtaatttactgtgtgaaattagagtttcgaagaaaattatgataatgagttctgttgatttcctgggagagttaaggtgaaacatgttgttagtctgaaatttaccatctggtctggtttagaattagacctaattgtcagataacctggtgtctgggatgcctggatagtatcaggtctctggggtgcctctagcttgcagttgacctggtctacagactatgcttctgtctgaatttctccacccagcactcatgcccacactcccagttccctcttctggggcccaagtttttctccacaaccccacagggcacttgctctgatccttcagaaaccaggatgcaacatctgtgccttgagcctctgctgctagatagcaacctaatgttgtaggggtgtgatgccgtggaccccttcttgaacccccaagctcgtcttgcatttggggctctagcatgcagctgcctgattgcccttgcagagcccacctccctgtaagtaccctttccctcggaattccttttgaacccaggttgttgttactgaacccggcctttccttttgggtctggtatgggttaagtggtgagatttcagaatagagaactcaagaagataaatccataattaattagcaactttttggcagacctacatgttggtctcatggcttcctctggttactgtggctgtgcctttcttaactcaggaccttaaaggtagccataacatactgctcctgcttagatgacttgttttaattacaaataacatcaacagcactaatgtgctagagaagcaaagagtggacatttgcccgaatgtctcatgaagagaatagtttaaaatgggtagttttatcagtgtacaatatcaccagtctgttttcaaaagctgttttattttgtggtttttaaattaactaagggatgaaaaaaataaagagctaaaacaaaataaaaatcatcattggttgaaaatgtttcataggggaacatgtcagtatgtttgttggctctaggtttgagtaaatagacaacactgtctcatatttaatgtttaattttcacaatggattcttcaactattcattctccacttgtgccaggttgagccctttacatatctggacacctattatccctaatctttaaaacaatttagcaaggtattactcttttatttgtttaagccagaaatatttttgtgttaagtggttgctgtgagcctgtctgtgaactaggtgatggaaatacaacagtgaagaatcactttgattctactgcccttaagaaattttccgttgtcagattgaaagaccaatgaac

SEQ ID NO: 3184 - DNA, 6000 bp, Homo sapiens
accaaggtgggcggatcacttgagttcaggagttcgagaccagcctggccaacatggtgaaacccccatctctactaaaaatacaaaaattagccgggtgtgatggtgcatgcctgtagtcccagctactcgggaggctgaggcaggagaatcgcttgaacccagcaggtggaggttgcagtgagcggagatcgtgccactgcactccagcctgggtgacagggccctgttccctgcactggaccccactccctctcccttgtcctccccagcctctgcctcctgctctcacttactgctctgatgaccagccagggcaggcctggaggccgaggtcagtggtttgttgggacaagggctggttcccaaaaagccccacaaaaattaaccaggtgtggtggtttgtgcctgtagtcccagctactcaggaggctgaggccggagaatagcttgaacccgggaggcggatgttgaagtgagtcgagatctgctgcactccagcctggctgacagagtgagactctgtctcaaaaaaaaaaaaaaaaaaattgtaaagggaaaagactgtaattttttcctttagtaaggataactcaggtgagaagcccattgcatttttattgcaccaatttctgacacttaaatgtctttcacgagtcacctattggcacttagctccttgtttacgtgaagaatcccgtgtctccactaaactccttcccttctaggccttccatatattttcctgttgcctttctatcaactctgtggtttactatatttgagaagcattatgttttgaagtcatatattatatacagagaagtgaaatagaatatttggtcgttgttgccacttgttaatgaaaagtggctactattgggtaatatttattgagctctaattatcaggcaccacacattctatgcattgtatcagtgcttcttggcttttgatggaaatacatgggatatggagatcttaaaattcaggttctggttcattcagtatgagagtagaggccaaacgtctacagtgctgacaagttcaagggtgatgctgctgtccacaggctgcattttgaatagcaagacattgtaccatttgatcctgacaacaaccctattagttagaaattacttcttatggccaggcacggcggctaacgcctgtaatcctagcattttgggaggccgaggcgggcggatcacgaggtcagaagatctagaccattctggctaacacggtgaaaccctgtctgtactaaaaatacaaaaaaaattagccgggcgtggcggccggcgcctgtagtcctagctacttgggaggctgaggtaggagaatggcgtgaacccgggaagtggagcttgcagtgagctgagatcgcgccactgcactccagcctgagcgacagagcgagactccgtccaccccccacaaaaaaaaaaaaaaatttcttatttcgtatctatggaaactgaactgtagagaatttatccaaggtcatgttgctagaaagcagtacagctcgggctctaaatccagatttgcgtcctgggatagtgtatataatgtggattttggaaatattctccaacatccaaaggtgatctgatgctacctgaaaaaaattcatagttttagtttaaattttgacccgtttaatgaaatttctttttaatttctctttatgaaagactgtgttaaatggtgattcaaatgtgttggattttgcttctaaaggtatgtagagattagtatgatttatttgccaaaattatggcctagaaaatgtcgtgctattgatggaatccgcattgaacacaagaggaaattgctagggaaggatgcgtgtgaggaaaggaaatcctcaggctgatttattgttcagcgctgagtgtaaacagtgtgctatccttgtcacagccaaacgaaaaaggacgcaatcactatcctgaacagatcattcttttaaaaataatattttggcctgcttataaagcatggttcgtaataaaaaatttgggctacagaaatataatacaattaaattatccaaactcccatctttttgtttgtttgtttgtttgttttttgagacagagtctggctctgtcgtccaggctggagtgcagtggctggatctcagctcaccgcaacctccgcctcatgggttcaagcgattctcctacctcagcctcccgagcagctgggactacaggtgcgtgccaccacgcccggccaattttttgtatttttagtagagacgggttttcaccgtgttagccaggatggtctcgatctcctgacctcgtgatccgcccgcctcggcctcccaaagtgctgggattacaggcgtgagccaccgcgcccggcctattttctaattttaagtgaatgcatctcaaaagggtgacgaaggaccacattcctatcgaacagcaataattcactgtggcaatatcttgccacaaataatttaaacattaattgtggttttgaggggcagtgtgcagtgggagtaaaaggggtagggtttagagtctccaaaagatttacttaagaaacacgaatgcactgcttgtgcactgcgcaaaagttctggggtcaagttccaactttcactaaggatcccagaacagcccggcaggagctgcccagggctaacgcgctttgctctcaaacccggccgccagtcgccgacgcatgcgcagtctagcaccgtggcacaggcctttctcaagcaggtttttgtggggtcagcaaaagggccagaacagcaacggcaaacagttccgagcctgacagtgcaggggcaaaccagctccaagtgaaaatcacctcgcgaggaaataggctcagggatcggggcggtttccgcaggcgtctccacacacgcactctcactcactttgagggtgccaaaacaccactaggggcaactaggaggaataggctgaggaatcagctatagagaatggaggggatagagctgcaaggggcgagggggcgacgatctctaaaactttcagcgccgtgctctactgatgctctaggcacttttttcattgctctggggagtctgggtgccccaattaatccgtcgctcctttgagcatttgttgtttagggggtcctgggggaccccatcgtattacagtattcagccacactccccgcaaagccgggaagccgccccgagagaagaccccaggacgccgggggctgcgtgagccccgcaaggctgcaggcgggggcgcgggatcccctttctggccgccgcccccctccgccggcccctcccccgcgccccgccctcggccacagaccccagccccggccgccggcgcgctcccacccgcgcgtctggggacttgcggaccgcagcgagaccggccggcgtgctgggcatgctcagtggcgggccgggcgctggagtcggaagcctgtgcgcggcagccgccgccgagccggccggggcgcacggagagcgcgcgggactcgctgcagcggcggccgggtcgcggcgcacccgggccgggaccggagccgagcctagcgcggcgcccgcgacccgtcagccgcggctcctgctccctcgatcccgcgcggggaaagggccggcggctgttggcgtcggcggggcgcggaggaaccgcggcggcggcggcggcggccgcatccttgccgcccgccccggcccagccgcgtcccggagccgtcgggcatggagccgtggaagcagtgcgcgcagtggctcatccattgcaaggtgctgcccaccaaccaccgggtgacctgggactcggctcaggtgttcgaccttgcgcagaccctccgcgatggagtcctgctctgccagctgcttaacaacctccgggcgcactccatcaacctgaaggagatcaacctgaggccgcagatgtcccaggtgaggaggccggcacgggcgccccgcctccagccggcagctcccattaatcatgcggctaatttctttgtgtaaatgcaaacgtctaggtgcgctgagcttgccctgcttcccagccttctgctttgggaccacttcggcaccactttggcgtttcctaccttggcttgaaatggtttagctcctcaagctgaatgcgaaagctttgcgtccggagatggtgtgaggatttcgtaaaggctttctgtgaggcgggaaagaaataagttgtcttagggtgcccttcacctactctgcgtgtgtgtggcgcgacaaagggaatttgatcaagctcttctataataacgaaggggagggacgaaacgaggtgatggggtaatttgcctttagtctcttcttttgctttgcgtcttgtactcatgttttcctaaaagaggaaccatgacatacatgaggactcgaggaagtgaagggcgtttggtcccgttatctgtccaggagtgacattggtcaaagggaagaacagggagcagaacccggaggccgcccccagggcccctgagctggtggccagccggcaagctcccgtttacagctcttcctaagccatgtgagaaggagcgagtccagcctctctcagcagcgacaggaaatgagaagtttcactagagattccgctttccttcctgcagtgccctgctcaggtgctgtggtgccggtcggctcctggggctggagctgcctctttgagggttaagccagacacctctggaaggttgggtgcaccctagagtcagctcaaaagtcacagttcagtggaagagtagtttatttgtcctgtcggaaaatttttgtacagaaggatgttaaactcggttcagagcctctttctctttcagaatgttaaaacaaaacaaaaaaccaaactgctttcaacttaaaagggagaggacagagccctctccctgacacatttcagcactaatcctctatgacgcagagcctcagctacttagcaaccagagcagcgccttttaagaaggaacggactttatatgatttaataagtatgtatttaaagttagagcacacacagtcatctgtgattcttggtgtcagtgtttcatcagggtcccctgcacttcagattctgcattccttgcctgtttgccttcaacctgctggtgggcagtccctaagaaagaacaggcatggaagtggggagagccatacgtatttaaaagtgaggtaaattattttatacccccataaacatgcatggtgattgctacctctcggtaccccttcagagttgtctcaactctggaaattcctttgaggggtttggcagacttttctattatggtgggagctgcagttagctactctcacacatccccattttccactttgcctgtagcctcaggaggcagcgtgggtcaggatgccttggcccaccagtagggagtacagtactgtgcacatttcctggaacttgtttcctggaactctcagcagttgctctcaataatcacgttttctggacagctgaagacctttttaaacctcgaagcctttatttgaatgctaacaatggatgagaatcgttttgaatgtgtttcactcttctcctcttatgttagatgtaatttaatctttctgatgaccaaagattgtcattataagcatcattaatgaaaattgagcacatacaatgctctaagagttctgttccctagtgggggtagcaaaatgagcacaccaggatacttgccctaaaggaattattacactatgctatcagatggtaaatcactgggttataataaggtaagtaggacagctaatgaccttctttgtgccgttgcacttttgagttcttaagtctgttcaaccttgaggtttctggttccaaattaagtacagtttctcctgtaatgtcctatgagagggtgcttccctcaaatgtgaatcctagaaggctagtacctgagcctggtgatgtctgtttttgctttcctcatggttcttggcctcattgcagagaggcaaggctgctgaacaagtgg

SEQ ID NO: 3185 - DNA, 6000 bp, Homo sapiens
tgcagttcaggatgccacttatcccatttcctgttttcatacagtgtagggctgaagcaagatccaaacaacactgtgatacaaaagagaaacagagggcagcctgctcatcttggagggcacggaaagactagcgagacacacacaaaaaaagcaggccaggcgcggtggctcacgcctgtcatcccagcattttggtagactcttgtgggcggatcacctgaggtcaggagtttgagaccagcctggccaacatagagaaaccctgtctctactaaaagtacaaaaattagccaggtatgatggtgggcgcctgtaatcccagctattcgggaggccgaggcaggagaatcgcttgaacccgggaggcggaggttgcagtgagccaagatcgcaccattgcactccagcctaggtgacaagagtaagactctggctcaaaaaaaaaaaaaaaaaaaaaaaaagaaaaaagcagatcttttttcatgtgactcttatgcctgttacaagtaatgctggcaaatccttcctgatcttttcaccaccagaaagacaggatagaaaggcagagagggatggagggagagcaagagggttaacatagcttgttcatttatttactcaccaaactaatatttattgtttgtcatgtgacaggcaccaaggttggttctgggaatttgaagatgaatgagttaccacccttgccttcaaggtgtttcagtctagcagggagaacgatgtttaaaccagtaattaagcttgatacagcaattattttaatgctgagccacagctctgaacagaaggggcgcagatgtggagacacaagctcatccttttattgagttccctaataaagagcaagatgcttaactctgttgatctctagcttcttcattaaaatgggtgggagagcatcttctcacttgcagacagtgcatgtaaagtgcccagaagagtgcttgacacatagtgggcattcagcaaatggtagagtgtggatgtactacaggggctatgaaggactcaagggcagtaggaccataggaggggtcctgaagtcacacgtcagatatgcaagaaagaacttcttgcacaccgcaagaacactaggtaccaggattagcaaggagttgccactgatgagttggtccctatttcccaacttgccttcactaggtggaacatttcctttaaggttgcaaagggaggtcagtgcgatagctcacacctgtaatccctgcactttcagagaccaaggtgggcggatcacttgagttcaggagttcgagaccagcctggccaacatggtgaaacccccatctctactaaaaatacaaaaattagccgggtgtgatggtgcatgcctgtagtcccagctactcgggaggctgaggcaggagaatcgcttgaacccagcaggtggaggttgcagtgagcggagatcgtgccactgcactccagcctgggtgacagggccctgttccctgcactggaccccactccctctcccttgtcctccccagcctctgcctcctgctctcacttactgctctgatgaccagccagggcaggcctggaggccgaggtcagtggtttgttgggacaagggctggttcccaaaaagccccacaaaaattaaccaggtgtggtggtttgtgcctgtagtcccagctactcaggaggctgaggccggagaatagcttgaacccgggaggcggatgttgaagtgagtcgagatctgctgcactccagcctggctgacagagtgagactctgtctcaaaaaaaaaaaaaaaaaaattgtaaagggaaaagactgtaattttttcctttagtaaggataactcaggtgagaagcccattgcatttttattgcaccaatttctgacacttaaatgtctttcacgagtcacctattggcacttagctccttgtttacgtgaagaatcccgtgtctccactaaactccttcccttctaggccttccatatattttcctgttgcctttctatcaactctgtggtttactatatttgagaagcattatgttttgaagtcatatattatatacagagaagtgaaatagaatatttggtcgttgttgccacttgttaatgaaaagtggctactattgggtaatatttattgagctctaattatcaggcaccacacattctatgcattgtatcagtgcttcttggcttttgatggaaatacatgggatatggagatcttaaaattcaggttctggttcattcagtatgagagtagaggccaaacgtctacagtgctgacaagttcaagggtgatgctgctgtccacaggctgcattttgaatagcaagacattgtaccatttgatcctgacaacaaccctattagttagaaattacttcttatggccaggcacggcggctaacgcctgtaatcctagcattttgggaggccgaggcgggcggatcacgaggtcagaagatctagaccattctggctaacacggtgaaaccctgtctgtactaaaaatacaaaaaaaattagccgggcgtggcggccggcgcctgtagtcctagctacttgggaggctgaggtaggagaatggcgtgaacccgggaagtggagcttgcagtgagctgagatcgcgccactgcactccagcctgagcgacagagcgagactccgtccaccccccacaaaaaaaaaaaaaaatttcttatttcgtatctatggaaactgaactgtagagaatttatccaaggtcatgttgctagaaagcagtacagctcgggctctaaatccagatttgcgtcctgggatagtgtatataatgtggattttggaaatattctccaacatccaaaggtgatctgatgctacctgaaaaaaattcatagttttagtttaaattttgacccgtttaatgaaatttctttttaatttctctttatgaaagactgtgttaaatggtgattcaaatgtgttggattttgcttctaaaggtatgtagagattagtatgatttatttgccaaaattatggcctagaaaatgtcgtgctattgatggaatccgcattgaacacaagaggaaattgctagggaaggatgcgtgtgaggaaaggaaatcctcaggctgatttattgttcagcgctgagtgtaaacagtgtgctatccttgtcacagccaaacgaaaaaggacgcaatcactatcctgaacagatcattcttttaaaaataatattttggcctgcttataaagcatggttcgtaataaaaaatttgggctacagaaatataatacaattaaattatccaaactcccatctttttgtttgtttgtttgtttgttttttgagacagagtctggctctgtcgtccaggctggagtgcagtggctggatctcagctcaccgcaacctccgcctcatgggttcaagcgattctcctacctcagcctcccgagcagctgggactacaggtgcgtgccaccacgcccggccaattttttgtatttttagtagagacgggttttcaccgtgttagccaggatggtctcgatctcctgacctcgtgatccgcccgcctcggcctcccaaagtgctgggattacaggcgtgagccaccgcgcccggcctattttctaattttaagtgaatgcatctcaaaagggtgacgaaggaccacattcctatcgaacagcaataattcactgtggcaatatcttgccacaaataatttaaacattaattgtggttttgaggggcagtgtgcagtgggagtaaaaggggtagggtttagagtctccaaaagatttacttaagaaacacgaatgcactgcttgtgcactgcgcaaaagttctggggtcaagttccaactttcactaaggatcccagaacagcccggcaggagctgcccagggctaacgcgctttgctctcaaacccggccgccagtcgccgacgcatgcgcagtctagcaccgtggcacaggcctttctcaagcaggtttttgtggggtcagcaaaagggccagaacagcaacggcaaacagttccgagcctgacagtgcaggggcaaaccagctccaagtgaaaatcacctcgcgaggaaataggctcagggatcggggcggtttccgcaggcgtctccacacacgcactctcactcactttgagggtgccaaaacaccactaggggcaactaggaggaataggctgaggaatcagctatagagaatggaggggatagagctgcaaggggcgagggggcgacgatctctaaaactttcagcgccgtgctctactgatgctctaggcacttttttcattgctctggggagtctgggtgccccaattaatccgtcgctcctttgagcatttgttgtttagggggtcctgggggaccccatcgtattacagtattcagccacactccccgcaaagccgggaagccgccccgagagaagaccccaggacgccgggggctgcgtgagccccgcaaggctgcaggcgggggcgcgggatcccctttctggccgccgcccccctccgccggcccctcccccgcgccccgccctcggccacagaccccagccccggccgccggcgcgctcccacccgcgcgtctggggacttgcggaccgcagcgagaccggccggcgtgctgggcatgctcagtggcgggccgggcgctggagtcggaagcctgtgcgcggcagccgccgccgagccggccggggcgcacggagagcgcgcgggactcgctgcagcggcggccgggtcgcggcgcacccgggccgggaccggagccgagcctagcgcggcgcccgcgacccgtcagccgcggctcctgctccctcgatcccgcgcggggaaagggccggcggctgttggcgtcggcggggcgcggaggaaccgcggcggcggcggcggcggccgcatccttgccgcccgccccggcccagccgcgtcccggagccgtcgggcatggagccgtggaagcagtgcgcgcagtggctcatccattgcaaggtgctgcccaccaaccaccgggtgacctgggactcggctcaggtgttcgaccttgcgcagaccctccgcgatggagtcctgctctgccagctgcttaacaacctccgggcgcactccatcaacctgaaggagatcaacctgaggccgcagatgtcccaggtgaggaggccggcacgggcgccccgcctccagccggcagctcccattaatcatgcggctaatttctttgtgtaaatgcaaacgtctaggtgcgctgagcttgccctgcttcccagccttctgctttgggaccacttcggcaccactttggcgtttcctaccttggcttgaaatggtttagctcctcaagctgaatgcgaaagctttgcgtccggagatggtgtgaggatttcgtaaaggctttctgtgaggcgggaaagaaataagttgtcttagggtgcccttcacctactctgcgtgtgtgtggcgcgacaaagggaatttgatcaagctcttctataataacgaaggggagggacgaaacgaggtgatggggtaatttgcctttagtctcttcttttgctttgcgtcttgtactcatgttttcctaaaagaggaaccatgacatacatgaggactcgaggaagtgaagggcgtttggtcccgttatctgtccaggagtgacattggtcaaagggaagaacagggagcagaacccggaggccgcccccagggcccctgagctggtggccagccggcaagctcccgtttacagctcttcctaagccatgtgagaaggagcgagtccagcctctctcagcagcgacaggaaatgagaagtttcactagagattccgctttccttcctgcagtgccctgctcaggtgctgtggtgccggtcggctcctggggctggagctgcctctttgagggttaagccagacacctctggaaggttgggtgcaccctagagtcagctcaaaagtcacagt

SEQ ID NO: 3186 - DNA, 6000 bp, Homo sapiens
gcatttcacatccatgaagtaggaattggggctctgcaccaggcgtttcttcttgtgtttcctcttctcctcttctggagagggatgaaggagatcctttgcgagctaagagggacagaaatgcagagatttagaaaccaacagcgaaaatgggatggtcgaaaatagcccccactgtcacacaccggggagagctcgcccctcgccgcccctggtgtctgcgcagctgggccgccatcttatctcctctccgctcccgtctatgcgggtggcccgtgggccgctgcggtccctggagttaatgtcctaagaagtgcagagggtaaatgaggaccctctacgatccgaaatcagcgtgaggggagagttcggacagaacagcgagatctccgccgaaacctggaccaaagcactcacaggcatgttctcgtgtgcgtaggtcgtcaccgccggaaaggagcgaaagcggaaatcctgccccttatatagagcacactacaggaaatgacgcaaggatcttgtgccaccatgtttggaacgtcttactttgatccgccgcagtggggagacaagggagctgccattttcggaaggtctttaactgttagttgtgacacatatgcgtcaccatgttgagagggttaccttgctaatttgaggtcagcgtttgatcactatccagggataaatggacacttttaaaattttgtgccataccttgacagttggagcctaataaataggaaaggttgaggaaaacaccagggagaaggagccatatccaggacttccgtcctattttttaaatacctatattcttaactctttttctattggtttaatttaacagtttaggccgggcgcagtggctcatgcctgtaatcccagcacttagggaggccaaggcgggtggatcacctgaggtcagcagttcaagaccagcctggccaacatagtgaaaccccgtctctactaaaaatacgaaaattagccaggcgtggtggcgtgtgcctgtaatcccagctactctggaggctgaggcaggagaatcgcatgaacctgggaggcggaagtacagtgagccgagatccactccagcctgggtgacagaacaagactctgtcttaaataaataaataaacaggggagacatggtttggtcagtgaaaagaaatagggaagactcaaggagataatgagaggtgagagaatggacaaaaagagattgaatagtttagcttgagaagggacaagcatggacacggaaggtgatggggataagtgaaagatgccttctttttttttatttttatttttattttttttttagacacagttttgctcttgttgcccaggctgtagtgtgatggcgccatctcggctcaccacaacctccgcctcccgcgttcaagcgattctcctgcctcagcctcccgagtagctgggattacaggcatgcggcaccatgcccggctaattttgtatttttagtagagacggggtttcaccatgttggccaagctggtattgaactcccgacctcacgtgatccacctgcctcggtctcccaaagtgctgagaatacaggcgtgagacaccgcgtccggcctttaattttttataggcagccagaataggctcgagagagactcccttgaataattttttcttgcccgggcgccgtggctcacgcctgtaatcccagcactttgggaggccgaggcgggtggatcacgaggttaggagatcgagaccatcctggctagcacggtgaaaccccgcctctactaaaaatacaaaaaattagccgggcgcggtggcgggcgcctgtagtcccagctactcgggaggctgagacaggagaatggcgtgaacccgggaggcggagcttgcagtgagcggagatcgcgccgctgcactgcagcctgggcgacagagcgagactccgtctcaaataataataataataataataataattttttctttgccggtcgcggtggctcaggcctgtaatcccagcactttgggaggctgaggcgggcggatcacgtgacgtcgggagttcgagaccagcgtggccaacatggtgaaaccccgtctcgactaaaaaaaaaaaaaaaaaaaaaaaatttagctgggcgtcgtggcaggcgcctgtaatcccagctactcgggaagctgaggctggagaatcgcttgaacccaagaggcggaggttgcagtgaccagagattgagccattgcacttctgcctgggtgacgagcaaaactttgtctcaaaaaataaaataaaagtaaaaacaaaggttgggcgcagtggctcacgcctgtaatcccaggcctttgggaggcagaggtgggtggatcacctgaggtcgggagttcgagagcagcctgaccaacatggagaaagctcgtctctactaaaaatacaaaattagcagggggtagtgcgggtgtctgtaatttcagctactcgcgaggctgaggcaggagaatcgcttgaaccagggaggcggaagctgcggttagcccagatcacaccattgcaccccagcctacgcaacaagagcgaaactccacctcaaaataaacaataaaaattaaaaaaataaaaataaaaataggccgggcgcggtggcttacgcctgtaaacccagcactttgggaggccaaggcgggcagatcacgaggtcaggagatcaaaaccatcctggctaacacggtgaaaccccgtctctccctaaaatacaaaaaattagccgggtggtggcgggcgcctgtagtcccagctactcaggaggctgaggcgggagaatggcgtgaacccaggaggcggagcttgcagtgaaccgagatcgcgccactgcaccccagcctaggtcgacagagcaagactccgtctcaaaaaaaaaaaaaaaatagggccaggcgtggtggctcacgactgtaatcccagcactttgggaggccgaggcgggcggatcagaaggtcaagagatcgagaccatctggccaacatggtgaaaccccatctctactaaaaatacaaaaattagctgggcgtggtgtcgggcacctgtaatcccagaggattacaggtactccagaggctgaggcacaagaatcgcttgaattcgggaggcggaggttgcagtgagccgagattgcgccactgcactccagcctggcgacagagcaagactctgtctcaaaaaaattaattaattaattaaaaaataaataaaaaatttttttgaaacaggatcttactctatcaccgaggctggagagcagtggcatcataatcgtggctcactacagccttggactcttgggctcaagtgttctgcccacttctgtcccccaagtagctgcggctgggactacaggccacaccaccatgtatggctaatttttttttttttttttttttttttttgtcgaagcagtctcactatgttgcccaagctggtcttgaactcctgggcttaagggatcctctcacgttggcctcccaaagtgctgggattacaagtgtgagccaccgcaacaggtcttagataatattttctttctttcgtgtttcgtatttttttccacccccagcacacatatagcaagaataatttttttctaaaggcagagataaacttgtttctcttttactctctttctttctttcttttttttttttttttgagacggagtctggctctgtcgcccaagctggagtgcagtggcgcaatctcggctcactgcaagctctgcctcccgggttcacgccattctcctgcctcagcctcccaagtggctaggactacagtcgcctgccaccacgcccggctaattttgtgtgtgtgtgtgtatttttagtagagatggggtttcaccatgttagccaggatggtctcgatctcctgacctcgtgatccgcccgcctcggcctcccaaagtgctgggattacaggcgtgagccaccgcgcccggcaaacttgtttctttatacccgtgctgttcatatttcagcttcctggttaccaaggctacacattcatggcctattgagtgagatttcaggagtactgcaccttaagtgggccatattaaaagattcacgtaaagaatgacatttttagttcaaatctctgttttcctaagctatttggtcagagaaatcacacatgggtccccataagagagatcgttccaactgaagccccaggatgtgtctaggtaggctgtgtgtgttggggtggtggggccgattctgtataactaatttacgttttcaccctgttccaccagggggcagactgactcaacaaataacctacttctgcgcatcccgcttttttcaaagtgaattgggacccatagaactaagggcttggacaactaacagtaaaattctaggactgccttttactcagccccagaaaccgatgataactcatcttctagcttcgttgaatagcatctccaaaactcagccccatttttttttttcaatttctagtgctctccctaccttcacccttattcccaaaactcttggttctcttcccctaatccctctaaaatttctcttctaaaatttctggtcgtcgtggttaaacctctacttcccttcaccccagcctctctggcctcagaatggaagagtaaggtcctaagaggggagctacaattaccgaaaggctgtggaaaatagcgagagagacaggccggcctaagctaggaagggaaaaccgagagaacagaggccgggctggcagccttggcctgctcaaaagggtgggcgggcagggggtggagcccggaggggtgccgcctctcctctttcccggagcctgggcggagagggaggaaaacttcttcctggcctgggctccgtgccgctctgtttgccaaccgtccagtcccgcctaccagtgccgggcgctccccacccctcccccggctcccccggtgtccgccatggccaaagcctacgaccacctcttcaagttgctgctgatcggggactcgggggtgggcaagacttgtctgatcattcgctttgcagaggacaacttcaacaacacttacatctccaccatcggtgagcccgctggccatgtcccagaccccgactctcctgtgacctccttctccggctcccggattactagtgaccccacttttcagtccccttagagtaaggctcctaaattctagtccctcaacccctggctctgacccttcccccgtgcatgtctctgtatagtaaccaaacctctcacctctctgaggccttcaggtaactcttcaactgctgccagctcctcattttcttggtaccatcgccttagtctccccaaatccacaagaactcttctctatttttctctgttcccctcttcccctacccccaccacctagaactctctcgatcctatctccatgtttcctgtatccctgtccgccacatctttttctcccgatccgatgctagcctctttctgtcttgctgagcttcaaactctcccactgtgtccccacctcaccatctacttcccaggttccctgccccagtctccctgcacctcagctgaacaagggtttgggaagggtggaacaaggtggctgggtgtgctggagggtggcccaaggactgtgatcatgaatatgcagccagcttggtgaggaacgtggaaatgaggggacttttggggtctctgagtcagcctggtgactcatcctcctcccaggggcccccagcaggcttgggggaggtgcccaagtttctactaagaagaacattgtctcccctcctcccttctcttctttcttcatctcctctggcttgggaaatagacaggaagagtctcacgacaattctggttacaaaggaaaaggaaaaatgcccctctttcctaattgtctcaaaagtaatcctgtttagcctcagactttcctagtgccaagtttggcccactagttaattcacataga

SEQ ID NO: 3187 - DNA, 6000 bp, Homo sapiens
tggtctcaaactcctggctcaagcgatctacccacgttggcctcccaaagtgctgggattacaggcgtgagtcactgtgcctggccacattttttaaaataagtaaaatatatagtatatattaggtattgaaaatgcaatggagagaaagcagggaagtgaaagagtatgagtttgttgggtgtatgtgtcagggacagtctcactgaaaaggtgacatttgatcaatgatctgaagaaaggtgggggacaagccatgtggttatctgagggaagaatattttggacagaacagcaagtaccaaggccctgaggcagaattatgcctgctcaaggatcaacagggttggttggtatggctggagttacgtgagatggaggagggtagtaggagatgaggtcagagaggcagggagtgcagtgcttggttcctggcatacaataaatacctagtaaaagtttgctgaacttacttttgtttttttcaaattggccagaaggtgaactctccaggaaggatcttcattgtaactcaactgcctactctcccctaccccctgcacaaccaatgccatttttagttcaacatatgactcctactggatgcctagagctggtgctatagggcaatagctttcaaacgttttgaccacaacccagccataagaaatacattttaaggggctgggcatggtggctcatgcctgtaatcccagcactttgggaggccgaggcgggcggatcacaaagtcaggtgttcaagaccagcctggccaacatggtgaaaccccatctctactaaaaatacaaaaattagctgggcatggtggtgcgtgcctgtaatcccagccactcaggaggctgaggcaggagaatcacttgaacccaggaggcagtggttgcagtgagccgagatcacgccactgcactccagcctgggcaacagagcaagactccatctcaaaaaaaaaaaaaaaaaaagaaatacattttaaggctgagcacagtgcctcactcctgtaatcccaacactttgggaggctgaggctggaggattatctgaggccaggagttcaagaccagccttggtgacctaataagaccccatctctacaaaaaaaattttaataaataaataaataggaaaaaattttttaagaaagacattttaagtcagagctcaacacacacatagacccactaaaacaaaagtcatgaaacaatacttttcctactacatgtaatatacttcattttttcttttttggtttttaatgctgatcaaccttcttaatttatctcctaactgtggggtcaaatctgcaatttgaaaaacattaccatgggaaaagaggagaaataccagttgggttaccactcccatgcccctctcagtgtctgtggggtgagctcacagtaataacatcactcatttggacaactgttggcagatatgaaatttcatggtattagcaccctcaccaactgggatgaggtagggattacagaaagaaaaactgaatttctgagagactaagtttcccagagtaacatggttagtaggtggctgtgctgaggctggaacctgggctcagaaccccatgttcagggctgtggccaaaagcttttccgctgaacttcctgctgtgcccagggcatgggaggaagatatagtctctctggggccagagaagcctttggggaaggagggtgctaagggtgccaagcagaacatcacatcccatcatatcacccccaccaggagggccgtgtagccatcacccgagtggccaaccttctgctgtgtatgtatgccaaggagaccgtgggctttggaatgctcaaggccaaggtgtgtatgtgcccatccctccatagccctgggcccagccttcgtgcttctacactgtgttcactcccaccaggaccctgtttctagagttctcatgtctactcagtccatttctggtgtgggccagctcccaagagcaggtgggggttgggggctggttgcttcctatggcactgggagcagacctggatttggggtccctaatgccaggctgtgtgcgggactgatctctgttctccctctgcaggcccaggctttggtgcagtacctggaggagcccctcacccaagtggcggcatcttaacggcattggtggaagctggggtcagaaaagagaaatgaccatttggaggggcggggcctcctagaagaaccttcttagacaatggggggaggatgggactttgttttttccaagaataaacttcaactcctgtcatgtgtcttggctactttcttggatgggaggaatcagagaagataggaagaagcaggcatcgcttctaggattcctcatgttctgcaaggatggacttctacccaccccttcaccatgaccttctgcgaacaatggttcttggcagttacgccaaatagtccttgtcctcaccaatggcatgacctcacctagaccctgctgctcagaacagagtcttacccacctcataggcaaaactgggagtgagctcagaggtgcaagggtctggtgggggttgtgttgcacagagaatataaaggccctgagaggttagtgtctatcatttcaggtttgggggcgtgcgtgccttttatttttttgagagggtctccctctgttgcccaggctgtaatgcagtgacacaatctcagctcactgcaggctcaagtgattccacctcagcctcccgagttgcctggattataggcacacaccatcatgcctggctaatttttgggtttttgttttttgtgttttttaggggttttttttgttgtttttgttgtttttggtagagatgaggtctcaatatgttgctcaggctgttctccaacttctgggctcaagccatcctcctgcctcccaaagtgctgggattacagatatgaaccacttcgactggccagtgagtgccttttctattcttggggttgggagggtgcccctaacagcctagaacaagctatccctttcttcttcttccaggtgtttatgtgcttacacagaccctccccagatcttgaagccctttgtagacaagaggcctttgctgtgaggcctcaggtcctgtacagggagtagaagtaacccagacctcccaaaggccttcatctccagaccctgctcctacactcagaccactcaccccagctgtctgtttctgccccaggtctctgcctacccaatatccttaaagcaggtctgtatagggagctaccagcccccttccccagtgccatataaaggaacccatcccagagaagtgggtaggtttcgagtcccagctccacccaagatgagaaacactgcccatcccaggccctgggctgtcaaggaagggcagaagttactgtggccatgatactcccacagctctgcattgcagcagggtgactggtgttctatcagcccctggtctaatatcccttactctggttcccccagtgtacccccctaccagctctgaaggaaaagcaggccaagtgggtttcttcctttttttttttttttgagatagaatctcttgctctgtcacccgggctggagtgcaatggcacaatcttggctcactgcaatctccgcctcccgagttcaagcaattctcctgcctcagcctcctgagtagctgggattacaggcgcgtgacaccatgcctagctaatttttgtatatttttagtagagacagggtttcaccatgttggtaaggctggtcttgaactcctgacctcgtgatccgctggcctcggcctcctaaagtgctgggattacaggtgggagccaccgcaccaggcctctttttttttttgagacggagtcttgctctgtcgcccaggctggagtgcagtggcgcgatctcggctcactgcaagctctgcctcctgggttcacgccattctcctgcctcagtctcccgagtagctgggactacaggcacctgccactacgcctggctaattttttgtatttttagtagagacacagtttcaccgtttctaccatagagccagagagggccccctcctgtttttttatctcttaccaagacctcctggggctcctcattccttcaggatggtctcgatctcctgaccttgtgatccgcccgcctcggcctcccaaagtgctggaattacaggtatgagccaccgcacccggccttttttttttttttttgagaagcagtctctgttgcccagactggagtgcagtggcacgatctcagcccactggaacctctgcctcccggcttcaagcaattctcctaccttggccgcccaagtagctgggattgcaggcgcccaccaccatgcccagctaattttttttttttttttttttagacggagtttcgctcttgttacccaggctggagtgcaagggcgcgatctcgactcaccacaacctccgcctcctgggttcaagcgattctcctgtctcagcctcccaagtagctgggtttacagccatgtgccaccacgcccagctaattttgtatttttttagtagaaacggggtttctccatgttggtcaggctggtctcaaactcccgacctcaggtgatccgcccacctcagcctcccaaagtgctgggattacaggcgtgagccaccgcgcctggcctcaagtgggtttctgaggggctatttcttgctcattagttgggggaccggccctcaccacagattccagaagcccagcaatgcacactcagccctcagtgggctgtctctgaaggtcctgtccctttttcgcttcccccccgctggagctgcttctcccgcttgcgggagcccaggctgagagcagacacccaacctgtcgaacctgtctgacgtcatcatctctccacccacctgggccccaggtctccagccaccccgctcttcctgttctcagcttccgtcctctctgcttccttacagcacccccacctgccagagctgatcctccctaggccctgcctaaccttgagttggcccccaatccctctggctgcagaagtccccttacccccaatgagaggaggggcaggaccagatcttttgagagctgagggttgagggcattgagccaacacacagatttgtcgcctctgtccccgaagacacctgcaccctccatgcggagccaagatggggaatggaactgaggaagattataactttgtcttcaagggtgagttgggttccctgaagcaagaggaagcctgagagacccagaaagagattgaatagagccagagagggccccctcctgtttttttatctcttaccaagacctcctggggctcctcattccttcagaaagaaagctgcagggagtgggggagggtctggttgcaggggcaaaagtcagggagcttctgagtatgctctactgtggtaaataatgatgttgattcctccttaagagtgctgagttaggctcctctgccccgttcctaatagaaacccaaatccctggtgtcagccagtgcagcacaagagatggaggtcagacttcagaaaggacttccctcttttatttttttttctgagacggagtcttgctctgtcgcccaggctggagtgcagtggtacaatctcagctcactgcaacctccacctcctgggttcaagcgattcttctgcctcggcctcccaagtagctgggactacaagcacctgccaccacgcccggcttatttttgtatttttaatagagacggggtttcaccatattggccaggatggtctggaactgacctcatgatccgcctacctcggcctcccaaagtgctgggattacaggcatgagccaccacacccggccaggacttctctcttgagaagaaagggaaaccagcaaacaagaggaagaaagtcatcttttctgggcaggtgtacagggaacgagagaaaggagagacacatcccattatagggtggggcaataaatacatagggaa

SEQ ID NO: 3188 - DNA, 6000 bp, Homo sapiens
ttcatctcaaaaataagaagcaaaccacataagtataggagaggtaaattaagtgggggcaaggcagtagtggacagggttggaaactgcactggaaaatagggaacatgtgtatgtcataaggaaggcaatgcagcccatccctacctggaatgctgggaagtgctaggcagggctgctctcagcaagactgcagcagctgcacccagacctggggctctggtaggtactaatggtgattatgctccaatttacctaatgaatttggtgggacagcagaaaagaaagctgggaatgtaccaagagaaatttttgttcagggctgttggaagtagctgttagccttgcttccacaaggccattgctgctgtaataagaactgcaaatcagagtgctacaacataaaactgggaaatatggccctatctgaatgcctctgtcctattttccgctggtgtatcagttagtgcaggaagtaaagaatgctggaaagttgaatcagaaattgaaaaccttctaaaatcttacacagattagcagaagtcacttctcccagtctggtatattatttcataatggaccaggatcggcttcctgcctgttggtggctatctgtaaaccataagtacaggggtctccctagtggttcttctctgtcttttgctgggcaggctgtcttcctttattcctggtagcattcagagcattaaccagtgttgattttgaaaatagtagtccctacaggttctcacaaaggaatgaatcctgttctgatacagttcccctgcatactgacatactggccaaggacttgagcagctgtgtatttttctttatcaactaaaataccagggagatggtcttttcttgaaacccagtggcctgtatgtgactgagaggaaaagctggcttggtcctaatggctgtttctctgtacctttcccttcccttaccaccttaagcccaatccaggtagagaatagggagaggcattctcctctctatggatttgaagtgaatcacccccacattattctcacatgcttttcttctctcacatattcctccctactcccccacccaatcattgtgcttatttgtacagatcttattgggaatattctttatttattttgtcatttcacttctattttaagaatgcataattgaaggagtagtcattttcagggagcaccaggtagaccctgggaacctaatgacttaatccttaaatatgttttgcccttgaaaaataggccttttccttccttccttagttataattgtggaagctaattaggatggcatggaagtgaatctaatgagttaggtattattaatgttcttggtatcgggtctaattccagttactgcttcattctctttttaaagctttatgaatacttcccccatcctccccaaggagagctcaatacacacatatttttattttattctctcaaaggaatattagcttaggaagataggaattcaacattgagcactgagttttcttctggctctgtcattgatacactgtcaaaccacagcctcatctcttaatctatttaattaaggtaacagtacatgttctcaagggtgttgcaagtaagtgtgcagctatcccttggagagcctctctggaaagctcttttagtgcagtgttgttatgctgaattgttttccattatcttatttgctgagtagaaaatattaatgaaattaagaattgttgagattatatgaattgggctagaatactaaggggaaaactatgttttgaatagagtttggcatttttgaccaagaacaaaattgagttttcattggaaagaaaggaaaccttgattcttaccattgctgctccaaaggaggcccaggttaagaggattagaggagacacgcggtgctgggcattcctggcaggtgttgggtgatccccgcagtatgtcacctgcagttgcagcacaggcagctagtgattgggttcatctcctcctagtggttggaagagaactcagatgtaaaaaccagcggtccttctcccaccttctttcctgccattcttgctcatcatacatgtccgtaaacttgaagaactcgttttagcagctagccttttaaggtcgaggatgggaaagctaaaactgtagaatattattatgctgctttttaggtttatccctgttgttgtgggatgcaagttaagggattgtaattgtttttcagggtttttttgttttttgttttttaagcaagggctctattttcccttgagagttctggaactaagccttggagaaacactactgagtgtatttaggctccctggttttcttgcccaacaacaatctgaagggtagggggtgggggctgtgtcttactcaggggcagcacctagctgtcttgcctacagtgggtgcacgatatataaatggaattgatttttgtcaacactgtcaagagtggcattgactattggagcataccccgtccacatgatgcttgaactatgtaacttcaggggttgagggctcaaggttcaggttaaagaggcactgtcaacttactatacaagcataatttaggtttttcctttttctacttgaaaaggaccagcttaaacacaaacccttatgtaaattaaaaggtttgaatccaaagcagagagaactgcttctggaaaagtgtagtttaattttaactattctaaaagcaatgagcaaaggcccttgtccaaggcgttgacagttttctaaagtggttatgctgtatatctggatgcatgcctttgggctgccactgcttgattcctttcatgtacagataatattacttcagtttagatttcccactttaaaatgcagtgatttgtgttgaatacatcttgattgtgctttacctaaagtattttcttaaaaggctttgtgtaaaatttaaatgtatatattttcctgtagacttccatcatgattttcagagattagccttaaaaaatttggccctaagaaattcattcagtgtttttctagatgacctctgtacatagaggtcattatagtggagaccctttaccagcagcattttaagatttaaattagatagaaagtttcttaggattcaactgaaaattggctagtaaaatatgtcccaggtaataaagcatgctgactttgctaaggcactgcccatttttatttaactaaagtcatggagattttgagtttaaaggatgcagtatagatagtggtttagtgtttaggctctaatgccagtctaaaaggcaagtcatttaaccttgggagcctcagtttcctcactgtaaaacagggataataatagtaactacctcagggttgttgtaaggattaaatgagatgatatttgtaagatacttagctcaagtgcctggcacacaatgagcacactctataaatgttctactactactattattaacacctagtctagggatgcacagcagaatcccctagggttaaaaaacaaaacaaaacaaacaaaaaaaactgacggaatagccccactccagatcagaattcccagtgggctggggtctcggccagtgtattctccagtaatctcgccaggtgtttgaaacacccagtgctatctgaaaactatcagtaccccaaccctttggtttatagattaagaaactagcagaagatggttaaattacttgcctattgtctcagaacggttaattagtggcggagccaaggctagaattcaagtctcttgactttatggttgtggggtctttccaccatacctgctgccatgtgagacactgcaaaaaagtggctcagaccgacaatcagcctgtgtggtgctgcacactttctaaagcacatgctcctgacactttgaccttaaggggcttgaatgtggagtaatgggaacacaagccaagcaagcactcagtagaattcagtcatttaaaaaattcaatggggtcattcttttggacagacctcagcaacacagcaatgtgcactttgtagtaaagaaataccaacttgagtttttaaaaaacctagttagtcctacattcccttttctttaaaaaaactttattgttcacattattttaatgactatgagataatgtatatgacagcactttgagaaaatatcaactgtaatataactataaggttgtagtattgtctgtttaaaagataagacagttgattcaatgtggatggaccctgtggggtacctgaaaatgtagatacgtaagaatcacctctgtcatttatcacatttagaaatatgaaactgcttaacaggtatgagcaggtatagcaagtgtttgctaaagttgtagttcagagctgaattacttcaggaaactagggaccaactttttggtttaattccgatctttaaaaagtaagaatgtgtactcactccagaacacagaagctcttccaaggaccttgactcaagaaggatgaggtcctcttactcttctccatttatccactatatgcttggccatttatcctaaatgtggtgggaacagacttgttatctgttgatgttgacagtgtcttttttaacctatgtcctgcatagttttgttaggtttacagggggaggtggatggccataaaaccagtgcactttgggaattacttttctaggatttcctaccagttataaatgacattgacatttgtcatcttttttttctttttctaaaaagaatagctgaatttaattcacctattataaaatactcaaaagtaaattgccttggtggccacttctgaattatagctacatttcattatgaccccttctgctcccttccattttgctactgatgtcattcttgttatcaggctgtgcccctaccaggagttcatattgggttgacagggttatctatatttttgttcttgatttttgagtttcatcatcttgcattaaattgttccacctggatttggggttcatctctgtgccctaaggatctgctatgaccaatcctctttttgtaggtgggtctctggcttaagtattgataggcttcagcggtttgtgtctctgtcttagcttgtatcaagccagtagtagctcacttcctttgtaaattcctgcttcagtctgggatccgtaggagtatgtgagaacttctgaaacgtctccaactcttaacagtcaagatatctatatcatttggatagagttctggttttccaactactagacttaaagaaattctggccgggtgcggtggctcacgcctgtaatcccagcactttggggggctgaggcgggtggatcacgaggtcaggagattgagaccatcctggctaacacggtgaaaccccacctctactaaaaatacaaaaacttagctgggcgtggtggcgggcgcctgtagtcccagctactggggaggctgaggcaggagaatggcgtgaacccaggaggcggagcttgcagtgagcccagatcgcgccactgcactccagcctgggtgacagtgagactccgtctcaaaaaaaaaaaaaaaaaaaaaaaaaaaaaaaaaaagaaattctaatgcaaagcttgctttttttttcttttttccagcaagccagtagtaatagttattgttacttgctctgttcagcacaactgtagttcacttgaacttcactgtcattccctacgctcctctcttactgagaagcatgggtgggattcagggctgtgggacaagctacagcctactctggagcactcacccccatgactcagtccagcctgtctcttgggaagtttattgcaatgtgcagacggatgaatttctgcttttcatgccacctctctgaggtatgtattctatcttgagtatgtacaagatgataccttttggctgggcacagtggctcgtgcctgtaatcccagcactttgggagaccaagatgggcggatcacttgaggtcaggagtttgagaccagcctggccaacatggtgaa

SEQ ID NO: 3189 - DNA, 6000 bp, Homo sapiens
gctgatagacttgctcaatgtagggttgccacaaaccttcaatttgtgaaaaacacagcgtctgcaaagcacagtaaagcaaagaataataaaacaacatgtacttatactattattgactaacctaaagagagttaatcttgcaaaagctgaggtctctctattgcttttttaaaaaaagtttatagatttggagggtacaagtgcagttcttccatggatatattgcctagtggtgaagtctgggcttccagtgtaaccatcacctgaatagcatacatgacatgggacccaataggtagtattccaccttttggagtctccagaatatattattccattcggtatgtccatgtgtaccattgtttagctcccgcttacaatgagaacatagggtttttggctttctgtttttaagtcatttcacttaggataacgacctccagttccaaccatgttgctgcaaaatacatgattttattcttctttatggctaagtagtattccatggtatatctataccacattttaaaaactccagtcatccattgatggacacttaggttgattccatgattttgctattgtgaatagtgctacaataaatatatggagtgcaagtgtctttttgatagaatgatttcttttcctttgggtagatacccagtagtgggattgctggattgaagtatagttctacttgtagttctttgagaaatttctatactgtttttcgtagaggttgtgctaacttacatttccaccaacagtgaataagtgttcccttttctctgcatccttgccaacatcagttggtttttttttttttttttttttttttttgcatttctctgatgattagtgattggaccatttattcatatgtttgttagccacctatgtgtcatctttggaaaatgtctgttcatgttcttagcctactttttaaattttttttttttaaagacagggtctggctctgtcatgtgggctggagtgcagtgctgtgatcttggctcactacagcctcaacctcccaggctcaggccatctctgggctgataagagtctatagttgtcaccagtaaaggagaatttgtatcctgtctttaggtagaaaagcaagaggatatggagagcttttcccctattcattgctttaggctcaaaaataatttttatgtcagagacatattttggggtgatatatctttttcctttcctttttcctcatggcagaaggcaaaggagaaacaggcaccttcctcacagggtggcaggatggagtgagtacaaggagaggaaatgccagacgcttataaaatcatcagatcttgtgagactcaccatcacgagaacagcatgggggaaaatgcctccatgatccgattatctccgcctgatcctgcccttgacacgtagggatttatggggattacaattcaagatgagattttgggtagggacacagccaaaccatatcacttgggactcaacctcaagatatctcattatatatatgcacatattctaaaatctgaaaaaattttaaacctgaaacacttcaggtctcaagtgttttggataaggtatactcaacctgtgctactgctgcttctcagtgaattacatggccatctacccagttacagttaagcctaaaacctggcagccgttctttattttctccttctctcttatgttgtatccaagtaatctgcaagccctgttgattccctcttcaaaccatatcgttaagttcttccacttttctttgtctccactgccaccatcctattctaagccaacatgatcccattgctgaactactgcatagttttctgcttctaatttggttctcaatgtaattcattttttttcatgtaataatggtcttttaaaaaatggaaatcagcagcctggccaacatggcaaaaccccatctctactaaaaatacaaaaattagccaggcatggtggtgcacaccttgtaatcccagctacccaggaggctgaggcaggagaatcgcttgaacctgggaggtggaggttgtagtgagccaagatcacgccactgcaccccagcctgggagacagagcaagaccctgtctcaaaaaaaaaaaaaaaatggagatcagaccatatggccatcctgcttaaaactgttcactggatttccattgcacttggaatagaatcctaaatccctaagcacttgatttggccagcccctgtctaccttactttgtttcatgctcatcttttgacttccgtaacagtagccacacttcttatttcctgtacataccaggttcttttcctacctcagagtttttgcattgaacttgctacattgtctactcagaatgcccccgctcctcctcatctttgcttagattcttcttttgcttctggccttagtttgtcacgttcattaaagtaatgcacttttccacctcagcctattaaagagatttgcaaaaactgaaaatgctactcttatcttcttaattcttttttgaaaatagttttctttttggtaaaaatatgttattaacataatgggtttattgttattttagaattaataggtattcaaatttctcattaaaatttcaggtttaatttcaaatatagtaaatactgatagctataacataaacaaaaggcctttggagaccttagtaattttaatttttaattatgacaaagtatcagaatttactattttaactattcgtagatgtacagtttagtaggattaaatatattcataatgttgtatagccatccatttgcagaactagacttccagaactagaaaaattctaaatatttcatgtaagtagaattatataatatttgccttgatgtgtctggcttatttcacttagcatcatattttcaaggcccatctacattgtagcatatatcaacatttcattctttttatggctaaataatacttcattatatgtatagaccaccttttgtttatccatttatctcctctttattccaaattatgctataagtaattgaaaatgtaactactaattattggtaatttaaatagaagatttattgattaaatagtaaaccatatggtatagagtctacatatggatagaatgtggatgatgaagatcctttcccatacctttttttctataatccggagaatgagatattcaatctggtatttgaaattcttagtcataattgtggtaacctttagtcatctaactcttttatttgtcccttgatgttgaaagtactggctttataaaggataattttattgaaaacataagctttgttattttaaatagttaataattacctacattaaagttattctttctctaataaggttaagttaccattttatttttcaattttctctaaggctgtttcagtcctgtcatcctattatcttaccctgttacttatattgacctagaacaggggctggtacatagtaggtgcttaataaatatttattgagtgaatgagtgttctcagatacacagttaaacaaacactcttttttttgttttttttgagatggagtctcgctctgtcgcccaggctggagtgcagtggcgcgatcttggctcactgcaagctgcacctcctgggttcatgcctttctcctgcctcagcctcccgagtagctgggactacaggcgcccgccaccatgccgggctaattttttgtattttttgtagaggtggggtttcactgtgttagccaggaggatggtctcgatctcctgaccttgtgatacacccacctctgcctcccaaagtgctgggattacaggcgtgagccaccgcccctggcctacaaacgctctttaatattatttttgtagatcatacattaaagtcatgtattatttgtaggttttactagtttaattctcataaagtactatcattttcaggtttttaaattttctttaactttgttcctgtttattaacaaagattgggctttttgctttaaaaacttttaacactcaggctgggcatggtggctcatgcctgtaatcctagcactttgggaggctgaggcaggtggatcacgaggtcaggagtttgagaccagcctggccaacatagtgaaaccccgtctcttctaaaaatacaaaaaattagctgggcgtggtggcgggcgcctgtaatcgcagtcacctgggaggctgaggcaggataatcacttgaacccgtgaggtagaggttgcagtgagccgagatcgcgccactgccttccagcctgggcgacagagcgagactccgtctcaaaaaataaataagtaaataaaaataaataagtaaataaacttttaacactcaaaagttttcaacactatattgccatgtttttaacctttattaagctatagagccagattgttagcaaaggcagttatttcttggcttctgtgctcatgaatcagatcacagctatttctttgactttggctttgtggtttcttgaactatttaagtgatgtaaaagatgagtcttgttaggcgtttcctttcttttaaaagtgtatttcgtgttttattgtaaacagattttctccaaggaaacttttctctctagtctcacctcatcatctccctataaaatagagatatattaacttctacattgttttattattaggctatttgttatacatatatatgttggtttttattttacttacattttaaaagtgttctcagagattttgaagtaactccattctgactcagtcttttgcggattgctggaaattttcctttaggtcactctccacccactttgggaattgtgaatgctcaccattttattggttccctctggccactgagtacatgagtaaatgtcacatgcatgtggtattgcttgtcagagaatggaattctaagacttcctctttacacagaacagtttaacttttgtgcttctgggcagaggtatggtccttgggacagttctccttccacctaatagttatggcagagatcaggacacttcactttgctgcctgtgcactgaggcctcagaatctgctctacccgacttaacaggtatggttcagagttgatagtttcagggaggcttgataaccacattaatcaagtgtgaatgaagatttcaaaaaattcatcttatctgctactgtttttgtcttcattcttggtcagtgaaagtttgtgtgctttcttgggggaatatctcatagtaggatctcaataaatactgaatggaagaatgtatggataatatgtagtattttgtaataataagatatagatggcttgatgtgaagaacttaagctatattgaaaactgttgaataatttaccttacataatttttaaaagaagttattaaaacttattagcttcttagagaatatacagtcagataaagtagaattctggcaagataatgtttataaaatacttgaaaatgcctaaactaaaaatttgtaatattaatttctcctattactacctgacaaatttctaattaaactgataaaagttactgaatgactaactggtgaaaagtatttttaataaaattaaacatgaagcttaggaattttctcaatttcagttttattattttgggttttaactttttcaatcatgataatttactttgtacaagtggctattctgttttgctttatttttgttgtagcctgcaactgtagcaatagaaaaaaaatgccttttttaaattgtgataatatatttctgttatctaggttctttacatgtgagtgaaaatcagtcttctcttatcccatcttaaatctctgatctacctctatagcagtgaataatggaagataagttaacttgatatctaagttacctaatttatagtagtcatttcattttgttcaaaaataaaccattcccagcccacacacttgcatttgggcgtatacagtacatctgaatcatccagacatgtctgtctt

SEQ ID NO: 3190 - DNA, 6000 bp, Homo sapiens
aaaaaaaaaaaactacagatccaaaataaaaaataaataaataaatcagatcacttaaaataatgagtttgatttaaggaaaaatttttgttattccaaacttcataatgtaagggtttttgtttgttggtttttttggagacggagtcttgctctgtcgcccaggctggagtgcaggtgcgcgatctcggctcactgcaaactccgcctccggggttcaggggattctcctgtctcagcctcctgagtagctgggactataggtgcccgccaccacacctggctaatttttgtatttttttagtagagacagggtttcaccatgttggccaggctgatctcgaactcctgacctcaggtgatctgcccacgtcggcctcccaaagtgctgggattataggtgtgagccaccacgcccagcctaaagttaatttttaatagaatttttagaaaatgagagagggaagctaaagtaaaatcattcagctgttaaaaggtatgtgagatattcaacagcaagtaagtattcaaccctagattattagtcatgaaacatcagctcaccagaaaggtttaatagcagagcttgcctctcgcagtggctcacgcctataatcccagcactttgggaggccgaggcagagtatcacctgagcctaggagtttgagaccagcctgagcaacatagtgagacctccgtctctacaaaaaaaaaaaaaaaaacacaaaattacccaggtgtgatggcgtgtgcctgtagtctcagctcctcgggaggctgaggcaggaggattgcttgagtccaggagtttaaggctgcagcgatctacgatcgcagcactgcactccagcctgggtggcagagcaagacctttctctaaaataaaacataaaataaaagagttgacaaaaaaaatagcagatctcagaaaagtcacacagcactcactcctttcataccaaaaatggctctattatttttgttccttctaaattacattcacaaaaatcacttttggcaaggcaaattattatcacagcttacccacatattattaacgataaaaaatgaccattttagctaaagaaagaaaagtcctggactctgataaaccatttccataatgtatgtacctttttactgattaactaaatgtattatttggcttatattaaaacctacatgtaaacccaagagtctaacagacctaacattcatatatgaaattatgtgctaatacctcaatatggcaaactcaagacagtaatttgtacactagattcgagcacctacatttaccatgtaaaggtcaaatgatacatccactgagaagctttcgaatctaattcattcattcattcattcaattcagaatctatcacatttctaagtggtgtcctcaactaggggcaattctgccccccaagagatttaacaatgtctggaggcatttttataacaagtaaggggcaaaaagaaggtgctactggcatctagtgggtagagtccagggatgctgctaaacatcctacaatgcacaggacagccccccaaaacacagaattagccagcccaaaatatcaatgccgccgaggttaagaaactatgacgtggccggaagcggtggctcatgcctgtaatcccagcactttgggaggccgaagagggcggatcatgaggtcaggagatcaagaccatcttggctaacacggtgaaaccctgtctctactaaaaatacaaaaaaaaattagccgggcgtggtggcaggtgcctgtagtcccagctgctcgggaggctgaggcaggagaatggcgtgaacccgggaggcggagcttgcagtgagccgagatcgcgccactgcactccagcctgggcgacagagtgagactccgcctcaaaaaaaaaaaaaaaaaaaaaaaaaaagaaactatgatgtacagaaaaaaactttttaaacccatctgtctaaaaaacagtactcactgcacctttgtttcctatattatttgctaattcctttcttttcatactagtctttggcaataaactcgacctattcccattttttcaatcagcttctaacttccaaacttgtcaatagaatcttcatcatcccagttagccaggttctaaatcctggtgtcatctttgaattatccctactttttttttttttttttttttgagacagagtctcgctctgtcacccaggctggagtggcgcgatcttggctcactgcaacctccacctcccgggttcaagcgattctcctgtctcagcctcctgagtagctaggactacaggcgcgtgccaccatgcccagctaatttttctatttttagtacagacgaggtttcaccatgttgctcaggctggtctcgaactcctgacctcatgatctgcccacctcggcctcccacagtgctgggattacaggcgtgagccaccgcacctggccgaattactcctgtttttaataataacagtagtattagtaatggcagcagctacacacatttagctcatactatgtgcccagccactattcatttaatactaggtactattattatcaccactttacaaatgaagagtccaagacacaaaaagttaaataacttgtcccaggtcacaaagctcataagcagccaagcaaggtttcaaatccaggaaaaatgggtccagagttcatgcccttaacaaatactccaaagtgatctctcttctttcatcctctatcaaatcataaagtcctttaagttccaaagggcagggactctgttatgttcacagcaacattcccacaatccagtacataacaggtgctcaaaaaaaacccttgtttgttgaatgaatgaaaggacccttgaaattactcctcccatttccactgccaccactcaaggccagtctttcaggtaaagactagccaatcaggtaaatggatataaacttctctgccagattttccataacccagtcccatccagcctatcaaaattttctttctactgcttcttaattagaatcataaaatcttaaaaccagaaagtatcttagagatcatccagtccaacctcctcactttacagataaagaaacccaaagatggtgactaaaatcacccaggcaggtggagccagaaccagaacttgactcttccaatttttgctctatgatctttttcttccaactcataatgatgcttcattcctgacagctgtctcctcactagcccatcaacaaattatatctattcccatgttcccgttcaagttgtttcttctacccaaattgttctccctctccatagatccaaatcctcaaaatgtcttcctattccattcttcatgacttcctctttcttggaaaatcttacataccgaataagatagtaaagcaagaggatcaccattgcctactaggccaagtttaatgcatagtaacacttcccacaaagtgaagcttacttggatgatttcttccctgtaaactactaatccattcttccatcctgtgttttaggaagtgattttaataaagattagctcatatatcaccttcataaagtgttcatatacccgaaagagacactcaagcacatcttcaataggagacatgtggccaggcgcagtgcctcacgcctgtaatcccagcactttgggaggctgtggcgggtggatcatgaggtcaggcgttcgagaccagcctggccaacatagagaaaccccaccctactaaaaacacaaaaaattagccgggtgtggtggcgggcgcctgtaatcccagctactccgaggctgaggcaggagaatcgcttgaacctgggaggcagaggttgcagtgagccaagatcacgccactgcactccagcctgggcgacagaatgagactccgtctccaaaaaaaaaaaaaaaaaaaaaagagtttgggccaggaacggtggtggctcacacccgtaatcccagcactttgagaggccaaggcaggcagattacctgatgtcaggagtatatgacaaaatcccaccaccaccaaaaatacaaaaattagccgggcgtggtggtgcacacctgcagttccagctactcgggaggctgaggcaggagaatcacttgaacccgggaggcagagattgcagtgagccgacatcccgccattgcactccatcatggggaccaaagcgagactctgtctcaaaaaaaacaaaaacaaaaacaaaacaaaaaaacaagacaaaaaaagtttggagacaactattctaaaaatacattgacaatgagatcaaaataataggtttcagactacagggagcatacatacatgtatgtatgtatatgggcacacgcacacactacaaaggaaaacttgttcatatcctgactgacgtcctaaccatgcccaccaacctctagcccttgccagcaatctcagaattgtgtgtcctactctgaagcatagtacagaggctttggcaaagcctttcatttctagtaaaaacgaaatacaaaacaaaataaaccacaaaagcatgtcaaaagtgataagatgatgctaacttcatcttccctacagaaaagcatttgacactgtccacagttcactatcctgacactgctcatcacctaacgtaaacacataccttgtactccacaatctcctgaaattcagttcccatttcccaatcccttaggatacaacccatttccccttcactaacgacgggtttatgctcccacctctgggactgagctaatactgcccttcatccttccctctcctgaagctgccattcactttctttctgcagccgcatagtcccgtcccagagtagaggacagaccatccagggtccccaaacccacttctctttccttctccgcccccgggatctgccagccaggctagagacgcgaggggggaggggtgtgactcgcctcccaggactggaccagatggcagcggattccgcccccactctcaggcaccttccaccctccgacccctcgggcagcccgtccgccacccaccccgccccgaccccacccccggcctcccccacgctctcatgccggctcccagacacactcaccatgctgggtgaagatattgaagccggtctctgtggtgcgccccgccgggtcccgcctgcggccggagggcctggctgcactgctgccccggatcccgcggggctgaggctgctggagccccggagcttccccgacgcggcccacctgctgccccatccctgctctcgcgtactcccgcgcccccgccgacccctggtcacattcctcctcggctccggcctcgggctcctggcgctgctccggtctctccctcccagcccaggccctggccctgagtggctgggccaccggcggctccgcacccggcctcctcacggcagccgccgcgctgcctccaggcgactcacagattctgcttttccctcctcctgtcgcggctccgcgcccccaacgccgccgccgccgccgccgccaccgccgccgccatctttaaaccaccgagcgctgggaaagcgtgggacagagcgtctcccgccccccgccccccgccccccgcccgccagtcacctccgccgcggggaaggagggcttcccggctgccgccccgccctgccgcgccgcgccccccgtccccgcccccgcctcctcgcagggtgggtcccccagtgcccacctcatttgccggccaccgctgcttgaggtctttcgtcctccgcgtcctgtcgccgcacctcggcgtcccccccctcaatccgcctcagccgaccccctcccgcgttcggctccacacgctaccgcctttggggttggtcggtctccggccttccccatcccacctccacctgtcaaatgagtgagtcgagggctcagtgccaccgcgtgcgcagctcaggtgcaggcacaggtggggcagaaaagcacaaggcatttatttggtccttgccatccagttaaggagctctaaa

SEQ ID NO: 3191 - DNA, 6000 bp, Homo sapiens
cactacagcctgggcaacagagtgagattctgtctccaaaaaaaaaaaaaagaaagaaaagaaaaaggaaaatgctatacgtaaaattacaacaaaatttttttctctcaatttatctacataaacattttcagcccacgtagataaatatagatagataaacataactatataaacatgcatatatgcaagaaaataaaagatttggggaaacatgatagctttcaaatatgtgaaagatttcatgtagaataaagattatatttgttctgtgtagctacatggtagaattagaactggggtgaaacaggtggaagtttcaggggaacatttttcagtttatctttaggaagaactttttttttgagactgagtctggctctgtcacccaggctggagtgcaatggtgtgatctcagctcactgtaagctccgcctcctgggttcatgccattctcctgaatcagcctcctgagtagctgggattacaggcgcctgccaccacgcccggctaattttttgtatttttggtagagatggggtttcaccatgttagccaggatggtctcgatctcctgaccttgtgatccgcccactttggcctcccaaagtgctgggattacaggcgtgagccactgcgcctggcccaggaagtatgttttaataattagaaccttttgaaagaaatggataccctcactggaattactgcagagaggattccagattagcctacatgacctctaagtttctttccaactctatgacacttgagtcatgtgtcaaaacaaaacagccgggtgcggtggctcacgcctgtaatcccagcactttgggaggccaaggcagatggatcacaaggtcaggagatcgagactatcctggctaacacggtgaaatcccatctcttctaaaaaacaaaaaattagccgggtgtagtggtggtcgcctgtagtcccagctactcgggaggctgaggcaggagaatggtgtgaacccgggaggcggagcttgcagtgagccgagatcgcgccactgcactccagcctgggggacagagcgagactccatatcaaaaacaaaaaacaaaaaacaaaaaaccatatttgagggatgtagaggaaggtaagcgaattttataacgaaagaattattaccagttgtggttaaggcctgtactgaatagagtccgaggaaactgttaggtctgtattaataagtctgaggttctcttatcaaggaggcaggatctgaatagaatactgaagaggacagtagaatcctgtaagggagtcactcgagacttatattagggagaatataattattgcaaaactcatagctaaaagggatacatctcagaaataggctaattggataaagtatgtatgcctgccataggaaaggtggaggttggaggaacaggagatggaagaacattaggcaattataatccagttatcctggaaaataacttcgaaacactaggtgaaacgtttattttgtttatttatttatttatttatttatttttgagacagagactccctctgtcacctaggctggggtgcagtggcgcaatctcctgtcactgcaacttccgcctcctgggctcaagcaattcgcctgcctcaggttccccagtagctgggattacaggcacgcgcccccacgattggctagtttttgcatttttagtagagacggggtttcaccatattggcctgactggtcttaaactcctgacctcaagtgatccgcccaccttggcctcccaaagtgctgggattacaaacatgagccactgtgcccggcccattaggtgaaaattttagacttaagactttgtacgtaatgaatgagagggagagtgtggtcaaagcaatgagagaagcagtttctttgagtgagttgcttggtgctaaaggtgaggaatctctaggaagaaagggctagtagcgggagaaaccagcgcagagatgcctaagctaacactgtgtcttacataacgctgtttatatagatgaagggaagaggtagatatgagagatactgtaaaactgtaaaaagtatggcaatagcctagaaatgcagactggtgaagtcagggattggtgaggcattactcacaagctccttccttctggagagagtggtgttgctcctgtgataaggatgatgaggatgaagagtatctgtgtcttcagcacgccttactgctgttggtgatgtgtctgatcttttatgctggcctctggccattgctcaaatttatatatatatatatatataaaatttgaaaaagttaggcttgtaaaacctaaaaccattatgttttttgtattaatagtatatgcatatatgacaccagttatatgccaaatactgttttaagtactatacatatatattgactaatttaattttcacaatattcctataaggtagatactatttgttatcatcatcagtttacagataatgtactgagacacaaaaaggttatgtactttgcccagatcaaatagtccataagtatcagggccaagttatgaacccaagcagtctggcttcagagcccctgcccttagccactgcactctactgcaggctgagcagcccttatcagaaatgttcggaccacaagtgtttcagatttgggaatatttacacacacataatgagatatcttgggcatgcgacccaagtctaaacacaaaattcatttatgtttcatatacacctttatacacatagcttgaatgcaatttaatacaatattttaaaaattttgtgcatgaaacaaagtttatgttaagtacttacgtgaaatgttccacctctggcatcatattggtgctcaaaaaatttcgaattttgcagcattttggattttcagatttgagatgttcaacccatatattcatctatctttatatagtatgcatgaattagcagagaaaccaaaccattatccccaaattaaaattttctcccataataaaaatcaaacagtaaaccaaattccggctctgtgacatctttatccctttcgaatgaatttttttcagtagttgcaaacactgggaattagaagaaaagacaggtattttaaacacagggaaactttaatccaaatggaaagttcatattttatccagtgtttacacatagtgtttccgttcccattttggagttaatttcagttatttctggctacaccctagatggcaatggaataatttcatagtgcttttacaacaggcaatatctacgtcagtggatggttcatctaaggtcaacctggttcaggaaagatatgcaaaggagagcttcatccacctcttctcccaaccctacatttccagtggttgttttgttccttctttgcagtggctcccgtcctgtctaatttaagcaaaatttcagtgtagtacctccattaactgatactttttataaagcaaattgggaagccaaaagaataacaggagaatgatcaagatttgagaattaaaaaaaattgaattaagatgcaagtaaacacagtgggagagggggatggcgagtcaattgtatatagtatatgtgtatgtataaaacgcttcttttctgcctcattcactctctttagactgcataagctaaaatgagtaagttctgactcagaaacagggtcaaagatatatattttttctcctttgtcatcaaaagaagacctgaccacgtgcacagtgtataaaggatgccagtgggaagattaactttactgtcaggcattgtaaggaaacagaaactcacatatggtgagatggtaaaggagttcaagaggaattcatggtaatataatatgaggaatggggctacaattgcgtccccaatgagactatagaaggcacacaatccaggccagtgcgatttaacatcatgaaataatctccaaaaattaaaatcaaataaggtagcattttactctcttcttgtaaattttataccattttaatttttactggaggcctgctgctgacaagggtgtttaaaagagatccccctgggtattttagagctccttaactggatggcaaggaccaaataaatgccttgtgcttttctgccccacctgtgcctgcacctgagctgcgcacgcggtggcactgagccctcgactcactcatttgacaggtggaggtgggatggggaaggccggagaccgaccaaccccaaaggcggtagcgtgtggagccgaacgcgggagggggtcggctgaggcggattgaggggggggacgccgaggtgcggcgacaggacgcggaggacgaaagacctcaagcagcggtggccggcaaatgaggtgggcactgggggacccaccctgcgaggaggcgggggcggggacggggggcgcggcgcggcagggcggggcggcagccgggaagccctccttccccgcggcggaggtgactggcgggcggggggcggggggcggggggcgggagacgctctgtcccacgctttcccagcgctcggtggtttaaagatggcggcggcggtggcggcggcggcggcggcggcgttgggggcgcggagccgcgacaggaggagggaaaagcagaatctgtgagtcgcctggaggcagcgcggcggctgccgtgaggaggccgggtgcggagccgccggtggcccagccactcagggccagggcctgggctgggagggagagaccggagcagcgccaggagcccgaggccggagccgaggaggaatgtgaccaggggtcggcgggggcgcgggagtacgcgagagcagggatggggcagcaggtgggccgcgtcggggaagctccggggctccagcagcctcagccccgcgggatccggggcagcagtgcagccaggccctccggccgcaggcgggacccggcggggcgcaccacagagaccggcttcaatatcttcacccagcatggtgagtgtgtctgggagccggcatgagagcgtgggggaggccgggggtggggtcggggcggggtgggtggcggacgggctgcccgaggggtcggagggtggaaggtgcctgagagtgggggcggaatccgctgccatctggtccagtcctgggaggcgagtcacacccctcccccctcgcgtctctagcctggctggcagatcccgggggcggagaaggaaagagaagtgggtttggggaccctggatggtctgtcctctactctgggacgggactatgcggctgcagaaagaaagtgaatggcagcttcaggagagggaaggatgaagggcagtattagctcagtcccagaggtgggagcataaacccgtcgttagtgaaggggaaatgggttgtatcctaagggattgggaaatgggaactgaatttcaggagattgtggagtacaaggtatgtgtttacgttaggtgatgagcagtgtcaggatagtgaactgtggacagtgtcaaatgcttttctgtagggaagatgaagttagcatcatcttatcacttttgacatgcttttgtggtttattttgttttgtatttcgtttttactagaaatgaaaggctttgccaaagcctctgtactatgcttcagagtaggacacacaattctgagattgctggcaagggctagaggttggtgggcatggttaggacgtcagtcaggatatgaacaagttttcctttgtagtgtgtgcgtgtgcccatatacatacatacatgtatgtatgctccctgtagtctgaaacctattattttgatctcattgtcaatgtatttttagaatagttgtctccaaactttttttgtcttgtttttttgttttgtttttgtttttgttttttttgagacagagtctcgctttggtccccatgatggagtgcaatggcgggatgtcggctcactgcaatctctgcctcccgggttcaagtgattctcctgcctcagcctcccgagtagctggaactgcaggtgtgcaccaccacgcc

SEQ ID NO: 3192 - DNA, 6000 bp, Homo sapiens
atccaaaaagacttttaaagtgtcaatctgtaaatggaactgtatttggcactctataggtctttaaagatttaatacaacaatgcagagacaaatcacataaacaaagtccaaagaactgtgtacataaacagtttaagaaaaatgctggccaggctctggtggctcgcacctgtaatcccagcactgtgggaggccaaggcaggtggattacgaggtgaggagttcaagaccagcctggccaagatggtgaaacctcatctctactaaaaatacaaaaattagccaggtgtggtggtacacgcctgtaatctcagctactcaggaggctgaggcagaagaatcgctagaacctgggaggcggaggctgcagtgagccgagatcatgccactgcactacagcctgggcaacagagtgagattctgtctccaaaaaaaaaaaaaagaaagaaaagaaaaaggaaaatgctatacgtaaaattacaacaaaatttttttctctcaatttatctacataaacattttcagcccacgtagataaatatagatagataaacataactatataaacatgcatatatgcaagaaaataaaagatttggggaaacatgatagctttcaaatatgtgaaagatttcatgtagaataaagattatatttgttctgtgtagctacatggtagaattagaactggggtgaaacaggtggaagtttcaggggaacatttttcagtttatctttaggaagaactttttttttgagactgagtctggctctgtcacccaggctggagtgcaatggtgtgatctcagctcactgtaagctccgcctcctgggttcatgccattctcctgaatcagcctcctgagtagctgggattacaggcgcctgccaccacgcccggctaattttttgtatttttggtagagatggggtttcaccatgttagccaggatggtctcgatctcctgaccttgtgatccgcccactttggcctcccaaagtgctgggattacaggcgtgagccactgcgcctggcccaggaagtatgttttaataattagaaccttttgaaagaaatggataccctcactggaattactgcagagaggattccagattagcctacatgacctctaagtttctttccaactctatgacacttgagtcatgtgtcaaaacaaaacagccgggtgcggtggctcacgcctgtaatcccagcactttgggaggccaaggcagatggatcacaaggtcaggagatcgagactatcctggctaacacggtgaaatcccatctcttctaaaaaacaaaaaattagccgggtgtagtggtggtcgcctgtagtcccagctactcgggaggctgaggcaggagaatggtgtgaacccgggaggcggagcttgcagtgagccgagatcgcgccactgcactccagcctgggggacagagcgagactccatatcaaaaacaaaaaacaaaaaacaaaaaaccatatttgagggatgtagaggaaggtaagcgaattttataacgaaagaattattaccagttgtggttaaggcctgtactgaatagagtccgaggaaactgttaggtctgtattaataagtctgaggttctcttatcaaggaggcaggatctgaatagaatactgaagaggacagtagaatcctgtaagggagtcactcgagacttatattagggagaatataattattgcaaaactcatagctaaaagggatacatctcagaaataggctaattggataaagtatgtatgcctgccataggaaaggtggaggttggaggaacaggagatggaagaacattaggcaattataatccagttatcctggaaaataacttcgaaacactaggtgaaacgtttattttgtttatttatttatttatttatttatttttgagacagagactccctctgtcacctaggctggggtgcagtggcgcaatctcctgtcactgcaacttccgcctcctgggctcaagcaattcgcctgcctcaggttccccagtagctgggattacaggcacgcgcccccacgattggctagtttttgcatttttagtagagacggggtttcaccatattggcctgactggtcttaaactcctgacctcaagtgatccgcccaccttggcctcccaaagtgctgggattacaaacatgagccactgtgcccggcccattaggtgaaaattttagacttaagactttgtacgtaatgaatgagagggagagtgtggtcaaagcaatgagagaagcagtttctttgagtgagttgcttggtgctaaaggtgaggaatctctaggaagaaagggctagtagcgggagaaaccagcgcagagatgcctaagctaacactgtgtcttacataacgctgtttatatagatgaagggaagaggtagatatgagagatactgtaaaactgtaaaaagtatggcaatagcctagaaatgcagactggtgaagtcagggattggtgaggcattactcacaagctccttccttctggagagagtggtgttgctcctgtgataaggatgatgaggatgaagagtatctgtgtcttcagcacgccttactgctgttggtgatgtgtctgatcttttatgctggcctctggccattgctcaaatttatatatatatatatatataaaatttgaaaaagttaggcttgtaaaacctaaaaccattatgttttttgtattaatagtatatgcatatatgacaccagttatatgccaaatactgttttaagtactatacatatatattgactaatttaattttcacaatattcctataaggtagatactatttgttatcatcatcagtttacagataatgtactgagacacaaaaaggttatgtactttgcccagatcaaatagtccataagtatcagggccaagttatgaacccaagcagtctggcttcagagcccctgcccttagccactgcactctactgcaggctgagcagcccttatcagaaatgttcggaccacaagtgtttcagatttgggaatatttacacacacataatgagatatcttgggcatgcgacccaagtctaaacacaaaattcatttatgtttcatatacacctttatacacatagcttgaatgcaatttaatacaatattttaaaaattttgtgcatgaaacaaagtttatgttaagtacttacgtgaaatgttccacctctggcatcatattggtgctcaaaaaatttcgaattttgcagcattttggattttcagatttgagatgttcaacccatatattcatctatctttatatagtatgcatgaattagcagagaaaccaaaccattatccccaaattaaaattttctcccataataaaaatcaaacagtaaaccaaattccggctctgtgacatctttatccctttcgaatgaatttttttcagtagttgcaaacactgggaattagaagaaaagacaggtattttaaacacagggaaactttaatccaaatggaaagttcatattttatccagtgtttacacatagtgtttccgttcccattttggagttaatttcagttatttctggctacaccctagatggcaatggaataatttcatagtgcttttacaacaggcaatatctacgtcagtggatggttcatctaaggtcaacctggttcaggaaagatatgcaaaggagagcttcatccacctcttctcccaaccctacatttccagtggttgttttgttccttctttgcagtggctcccgtcctgtctaatttaagcaaaatttcagtgtagtacctccattaactgatactttttataaagcaaattgggaagccaaaagaataacaggagaatgatcaagatttgagaattaaaaaaaattgaattaagatgcaagtaaacacagtgggagagggggatggcgagtcaattgtatatagtatatgtgtatgtataaaacgcttcttttctgcctcattcactctctttagactgcataagctaaaatgagtaagttctgactcagaaacagggtcaaagatatatattttttctcctttgtcatcaaaagaagacctgaccacgtgcacagtgtataaaggatgccagtgggaagattaactttactgtcaggcattgtaaggaaacagaaactcacatatggtgagatggtaaaggagttcaagaggaattcatggtaatataatatgaggaatggggctacaattgcgtccccaatgagactatagaaggcacacaatccaggccagtgcgatttaacatcatgaaataatctccaaaaattaaaatcaaataaggtagcattttactctcttcttgtaaattttataccattttaatttttactggaggcctgctgctgacaagggtgtttaaaagagatccccctgggtattttagagctccttaactggatggcaaggaccaaataaatgccttgtgcttttctgccccacctgtgcctgcacctgagctgcgcacgcggtggcactgagccctcgactcactcatttgacaggtggaggtgggatggggaaggccggagaccgaccaaccccaaaggcggtagcgtgtggagccgaacgcgggagggggtcggctgaggcggattgaggggggggacgccgaggtgcggcgacaggacgcggaggacgaaagacctcaagcagcggtggccggcaaatgaggtgggcactgggggacccaccctgcgaggaggcgggggcggggacggggggcgcggcgcggcagggcggggcggcagccgggaagccctccttccccgcggcggaggtgactggcgggcggggggcggggggcggggggcgggagacgctctgtcccacgctttcccagcgctcggtggtttaaagatggcggcggcggtggcggcggcggcggcggcggcgttgggggcgcggagccgcgacaggaggagggaaaagcagaatctgtgagtcgcctggaggcagcgcggcggctgccgtgaggaggccgggtgcggagccgccggtggcccagccactcagggccagggcctgggctgggagggagagaccggagcagcgccaggagcccgaggccggagccgaggaggaatgtgaccaggggtcggcgggggcgcgggagtacgcgagagcagggatggggcagcaggtgggccgcgtcggggaagctccggggctccagcagcctcagccccgcgggatccggggcagcagtgcagccaggccctccggccgcaggcgggacccggcggggcgcaccacagagaccggcttcaatatcttcacccagcatggtgagtgtgtctgggagccggcatgagagcgtgggggaggccgggggtggggtcggggcggggtgggtggcggacgggctgcccgaggggtcggagggtggaaggtgcctgagagtgggggcggaatccgctgccatctggtccagtcctgggaggcgagtcacacccctcccccctcgcgtctctagcctggctggcagatcccgggggcggagaaggaaagagaagtgggtttggggaccctggatggtctgtcctctactctgggacgggactatgcggctgcagaaagaaagtgaatggcagcttcaggagagggaaggatgaagggcagtattagctcagtcccagaggtgggagcataaacccgtcgttagtgaaggggaaatgggttgtatcctaagggattgggaaatgggaactgaatttcaggagattgtggagtacaaggtatgtgtttacgttaggtgatgagcagtgtcaggatagtgaactgtggacagtgtcaaatgcttttctgtagggaagatgaagttagcatcatcttatcacttttgacatgcttttgtggtttattttgttttgtatttcgtttttactagaaatgaaaggctttgccaaagcctctgtactatgcttcag

SEQ ID NO: 3193 - DNA, 6000 bp, Homo sapiens
aagtcattagttgccatttagttcatctcaacagaaatttattgaacacataggcaaaattttagttttatgttttactcttttctgtacctctatatacatttcccgttgaaatttttagactactttacagaaataggtatcactggttctttttaaaagcccctacctgagacttgacttatgcaaatgttagggaatggatatggagttgcaaaactgattatatcagggtgtaaacattttaaatttagcagcagttttttgggctaattggatcttaaaaaatgagacttcaatttagtaacactacaatacagtattttccaagtaagtttgcaattaattttggttttaatcttgttctttctgcttagttatctgaattgaagaaaacactttctagtgttcagaatgaagtacaagaagctcttcagagagcaagcacagctttaagtaatgagcagcaagccagacgtgactgtcaggaacaagtaagtatagccaattattgagaaatgagcttcgatcctagagaatgattcttgaagtatatttatgcattataagaactggtggaccttacaaaaattcaagataatttccacttttgtggaacttagacaagacaaattgaaaagtatagatggaaggctaaaaataaatacatagggcaatattcattaacaaagcaatcttgacaatgggaaaataaaaacaggactaggagactaaaatttgtacttggctctcatttgcaaaaattattttactattgtccttcactagatctgattataaaattacagatacagttgattagaggcaacctttgctaacaaaacaagaacctcttgataacattgttaatgcattaccaagtttgcgcagatatctatatactatttataaaatgttaaaaaagtatcattattttgagtgtatgtatgtatgtgcacacagtattgaagctttttataatttttttatgaacaggaaatgataaaacaattcaggattcagagttactaaaatggtaggatgggatagcagtacatttgagcatattggtaatgttcttattttaagttgggtgtcatgttaatagctattcatttgcttactattctttattgcctatatatatgtgacgtgtatattgctattttaaaatgtaatacagggaagaaatgcttcaaagtaaatttcattaaaatcaatggatctataatttagtacttaatatagctgagttatgtttagcttcttatatcaaaaagtttgtccaaattgctggtcttctaagcttcatttctgacagttttataatattaagtaactaaagcattaacttttaattattttcttattttgctacatttagattgtctttacttttattatttaaaaagtccaatgtgtatctttggacaagtgctaactagttttatggatttttaatctttggtatcaattgggtaataatttcttataggctaaaatagctgtggaagctcagaataagtatgagagagaattgatgctgcatgctgctgatgttgaagctctacaagctgcgaaggagcaggtttcaaaaatggcatcagtccgtcagcatttggaagaaacaacacagaaagcagaatcacagttgttggagtgtaaagcatcttgggaggaaagagagagaatgttaaaggtattattgtaaatctgaatagaatgttctgttgaattgaaagagttgtttttttctttattttataatgttttgagatggagcctcgctctgtcacccatgctggagtgcaatggcgtgatattggggtcactgcaatctccacctgctgggttcaagcaattctcctgcctcagcctcccaagtagtcgggattacaggcgttagccaccgcgcctggccaagttgttttttttaaatatgcattggaaaatctgttattctgatagactcttggcttgcaggatgaagtttccaaatgtgtatgtcgctgtgaagatctggagaaacaaaacagattacttcatgatcagatcgaaaaattaagtgacaaggtcgttgcctctgtgaaggaaggtgtacaaggtccactgaatgtatctctcagtgaagaaggaaaatctcaagaacaaattttggaaattctcaggtaaatcatgttcttactgcttcatttctgtggtataacaactatgaaatgaaactacaaatatataaattagagaaggagattatacacgattttgatataaagttcattcttttatttgtcaaagaactcataacttttaacatttacacatattaaacaagtgactttaaagttgaatctgatagtaagaactagagcagttttctcttgaaaaactaaatgcctttcagatcattttagagataaacattctaaagccagtgtctataaaagaaaatagaaatacatctcccattattatttattattaatgaaaacgtgtaatagttattaaagtcaatgatttttgtcatcttaccaaattacctacgttttgtaatgttggctttttaaaattcacataaaattttaatatctgtatttttgtagatttatacgacgagaaaaagaaattgctgaaactaggtttgaggtggctcaggttgagagtctgcgttatcgacaaagggttgaacttttagaaagagagctgcaggaactgcaagatagtctaaatgctgaaagggagaaagtccaggtaggtatactaagctttaagaaagcacttgttaaatcaaaagagaagcactcatttatatctctaccatttaacgtaatgtaaaatttaacttgaagtaagcattcttctaaacttgtaaattcattaagcatttgttaaacactaatatagtatagtgcttaaaagtaaaggctctgtaaccaaactgcctggtttcagattctagcttcataccattagctgtggccttgggtacattgtttaacttccctgctcttagtttcttcatctgtaatatttggataataatgaggtttaattgagtttgtgcacatgaagcatttagaagcatgtctggtatgtagtgggtgcttaataaattccagctatcttaatttattatagttatggattatacgtgtggatagtcattctaggataaagtgatttaaactgctacagaatatctttctcacccaaggagcaaaaagtagtaaaaactaacaaccaaaggaaaagaagctgtggtagtgaaatggatgataataagacaagcttgactccttaccccacactaccacccaaagcttattgttgagttacttcattcttaggagctacagtaatatacccccacctctagaaggaaggaaattaagatcttaaaacatttatcttcttttaactgatgagtagtcaaaatgactgttaagaagaaaccattggacagggaaaagtaaataatgaattttatgggatttatgtgttcagcaaaagctaaaggttccagaattatatcctgtttaattcaaatgtatctcaccatggaaataatagagcctccagttcaatagagttaatacttggaggaaaagggacagaatcagagtctctaacaaagactgcatattgtttcagtcttttccgcttcattttttattcctttgggctatagaaagtaaatactagaaaatgcccgcctacgaatgagttcatagggggaaaccaaccttaaatacaggaagaagagagtcaacaagtaacatagattatataaaaaataatataatgggccgggcatggtggctcatgcctgtaatcccagcactttgggaggccgaggcgggtggatcacgaggttaggagattgagaccatcctggctaacacggtgaaaccccgtctctactaaaaatacaaaaaaattagctgggcatggtggtggcaggcacctgtagtcccagctactcgggaggctgaggcaggagaacggcgtaaatccgggaggcggagcttgcagtgagccgagatcacaccactggactccagtctgggcgacagagcgagactccgtctcaaaaaaaaaaaaaaattataatagtaatgtaatgtctgtctaagcatgaacagtgtagcatggcaaccatgaaatatgctatagctttaaaaacagtgggggaagaaagtaataccaagtgcagaagatggataattataacctatgagaaggaaaaaattcttcacagataattcagtaaaatttctcatggccaaagtgatgaaacaatggatcaaaatgagagatttctgaacaagagggaataaactgaggattagaataacattttagaactaataaatttagtgcagcaaggaaaaaaagatacagaaaggtaaatagagatttggattaatgtttttacctaatgttaatactttgttggtgggatttgtagcatcttttcacttttgtctttgtaattcttgtatttgtttaaagtctgcagttcgcatgcctcacagaaaagtaaacgtgaactttcaaaaattttagttctaaaagttgaaacttaaatcctctttattttgtcatagggaggatttgagctcataggaacaggtagactttcaactattgttagatgttggtatgtatatttatttgaaatgtttaggtaactgcaaaaacaatggctcagcatgaagaactgatgaagaaaactgaaacaatgaatgtagttatggagaccaataaaatgctaagagaagagaaggagagactagaacaggatctacagcaaatgcaagcaaaggtttgttgcttagttatcaagagtggaagcatgttgtttttaataataaatgaatttttacatttgttgttaaatattggcatgattttcaggtgaggaaactggagttagatattttacccttacaagaagcaaatgctgagctgagtgagaaaagcggtatgttgcaggcagagaagaagctcttagaagaggatgtcaaacgttggaaagcacgtaaccaggtaaatgcagttaaaactcttccaaaacatggaaacacgtgtttttaataataggggaaacttaggggaataaaaatatttgaggaactagtgaaaattactgtgtttattagtgaaagtctattatgttattaatacatgtaaatacgtgacagatgttaaacttataacccaatttataaaaaattttggttatattatatatatttctaaaaagcagttattttccataattttaaagttttagcctttcattttatctctaaaatatttttatacatgaaaatagaaatctgaggccagacacggtggctcatgcctgtaatcccagcactttcggaagccaagatgggaggattgcttgagcccagaagtttgagaccagcctgggcaatgtagtgagactccaactctacaaaaaattaaaaattagctgggcgtggtggtacatgcctgtagtcccatctacttgggaggctgaggtcagaggattacttgagcccaggaggtcgaagctgcagtgagttgtgatcatgccactgcatgctagcctgggtgagagagggagaccctgtctcaaaaaaaaaaagcaaaataggaatctgtataatttattgaatttattaaagcactttaaaaagacttgttcactggaacgtttttagggagatgaaaccatgtaacatactgtggttcgaaactccagccctttattcaaacaaaaggttagaaatctgccttgcatgtattatttatatgacttgggagagtttcttaacctcttggagctttagttttcccttatcacctttcgtgtgataaaaatttaacaaatgtgaagcacattacctggcatctacagaaggtttgtgtgtttaacttgtaatgcattgtctatattttttttcttgtaaatgtcacttcaatgaaattaggtacttaatattgaaagtt

SEQ ID NO: 3194 - DNA, 6000 bp, Homo sapiens
ttacatggtcaaaggggaaggtgtcctgacgagcaaaattgggctaggtttgtctacttctccatgtttcctcaaagacctactttaaagttacttcttccacatttcttcttccatcccccaatcttgagtttattattaaatagcatcttttaactttaaatcaacaagtaatttttaaaataaattacagagtaattatttagttataaatgcagagtaaaagatacatacctgtcctattaaaaggccagagacaaaagcctttccttggagatttatgtttgaaagatactggccaacagtctcttctacaatgtaggttcttcccatttttaggaactaaaatctcctatatcacaagaagaaaagatacagcatttaggtaaaatatcatttgcaatgtctttatcatgggagtagtttagcaagagaagtgatactatcctgaggctatctcatgccttgcagcaaatacttattacatagtgtattccttcttgcaaagttcagatgcagttccagagttcttctcaatacaatgcagcaggaaacaaccacaaatcaaccagagttgacatgagagatcaaaccttttactcatacctgggataagggagaggatactaaactagtaagcaacacaccagatttcttttttttttttttttttttgagacggagttttgctcttgtcacccaggctggagtgcagtggcgcaacctcggcacactgtaacctctgcctcccaggttcaagtgattctcctgcctcggcctcctgagtagctggggttacaggggctcacgaccatgcccggctaatttttgtgtttttagtagagacggggtttcaccatgttggccaggctggtctcgaactcctgacctcaggtgatccgcccgcctcggcctccaaagtgctgggattacaggcgtgagccaccatgcccagccaacacaccagatttcttattttagatctactccctagttgtattatctttgatactctattgctaagtcttggtgttctcattgctaaaatcgtaaacatgaatttctgaatagttcattaggaggtagagtcaaattcatttacttgataagcatatatgaaagaactatactatttgcttagaaactatgctaagtgggataacacaaagatgagcaacacaatctctgtccttgagcaatacatactacagtaagagttatttaagtagataaatagcaatacaataacaacatatagcttctactttgtacaacgcattattgtaagtactttccatgtaacattaataattcataaaaccccaggaagtgggtaccattattataatcctcattttatagatgaagaaactgaaatgagaaaagttgattaaataacttgccaaagtgacaaagctgggtaagtggcaaaggagggacttaaattcagacactctggctctagaatccatgtttttcaacaccacgctcataatgaggaatcgtaaccagtccttcaattaaatcattactacgggtagctcttactctgttttccctctggtctgtggatggaagtcagtatattcattccctctattggcttatgctcctttgatttgcatttctatagcttaaaaccaaagatattgaataaaagagctaggcaatataatgaatgattaaatcaaggagttcataatcagtgaggatgaaaatgtaaaagagatgatatccaaaagagctataaaacaaacagagactgcaggaacacagttacagtattttgaacactgcaatttaggaatcatcatcatttggattctgttaaaaatgtgaatcttattcagtaccacaaagttaaggctaccagagatatgctggggtggtatatctgataccagtaaactgtcagtcacaaaacggttttgcattttaaaactaaagcccagagaatggattcaagtctgaaatgtcctactggaggctgtttccttattgtttcaatgagcttgttcagttttgtctcaaaatacattaatttcttcctggctcttttttttttttgttttttgagatggagtcttgctctgttgcccaggctggagtgcagtggcgcgatctcggctcaatgcaagctccacctcccaggttcacgccattctcctgcctcagcctcccaagtagctgggactacaggcacccgccaccacactcggctaattttttgtatttttagtagagacggggtttcaccgtgttagccaggatagtctcgatctcctgaccgtgtgatctgcctgccttggcctcccaaagtgctgggattacaggtgtgagtcaccatgcctggccttcctagctcttttttgacaacaatagacgtgaatcagatttgcatatcattttttagagactaagtctaggaatgcttgtctaaatatcactgttgcctctgtgaagttaagggcttttaccttttagtaatgccttaaggtatgcaattctatgtatctactttcctctatatcatattatactccttttccttctggtctaataattcttaattcttgcaacaaatacaagtaattctaaagttatatttaaccttttaaccttatttcttctagggtgtcacctagtagccatattaatgtgtaagaaactgaatgtaatagggagatgaaaatctattcaattatgaaatctgattgaatgtcagataaatttttctttagtgctctttcaaaatttttaaatgtagtcaaccatactttataaaaggcagtactaaaaatgtatatagtcagctttccacatctgtggtttccacttccatgtattcaaccaaccacagattgaaaaattatttttttaaagcatgattacatctgtatcattaaagatgttttttcttgtcactattccctaaacaatataatataacaactatagcatttacattgtattaggtattataagtaacttagagatgatttaagatatgcaaatgctacaccatttaatataaggaactggagcatccatggatttcatatccatggggtgggcaggtgagagggtcctggaaccaatgccccacggataccaagggacaactgtattttgccttatagggtcataattttccagaaatgttgtatatcagccaaagcctttgtggtccaagcactgtgactgacacaactcaacctttctgggctctggtttcctaatctataaaataaagcatttgaatcctagcagatctgaaaacctatctaattttaggattctgtgaatctaagtacagaaaaatctacatttcccaaatgacagatcaacagtatgataatactgtgggcttaggacatagcataatacttcatataccagcaactttaattacaatgcttatctaaaaaatatttttggggaaaaatcaaccttaagctccgctgttgatttatttttccttagttattacaaaatatcataaaatgcttccatttatatttcttagacggcttcacaacatgattcaaaagtaagaactagagaaaaagaataaatttcatataagaactaaatcaccaattcacagaaggcccacgactgtgggaactgcagagagacgacactgggaatgcattatttacaatgaataatttaacaaattctttcataagagtaaacacgaaacaatctacggattgagctttaaaactacagaattatgatctggaaccatacaagttctgttactgtagaaattaacaatgtgtttaaaaacttcagttacaacagttttcaattttaaaaacaatataatgttaggtaaccgtttctgcaacgaaaaatttaaaacataggctacactcaaagtgctaccggtttcttttaattctcctcctgaagaattaacccgggtccttaaattcccgggtactgaatcactcagtgccacctccccaccaccaaaaaccatttaggtacgccgtttcacacaaggtaagttcgtcagaagtgtgtgccggagtgactgtccatatggttccaacactgtcccttcctttttctcttgaaaagagagcacacacacacacacacacacacacacactacacttaggctgacttacctgttttcagaatgtgcactcgtggcagacaattacctcggacggtctctccgccggagatgggggtttcgggcccaagtaccagcctctaggggccagattccctccggtctcaattcactgccactgaattcatcagaaagcgacctacttcccacacctcacttcccactccaaagccagggacttgggagtcaggtggcgcagattgatgacgtaaaagccccccctcccttccccgcagagcctcagccaaagcgactgcggtcgccaccccgcccccttctgggcgccatagagagcgtggcggtatcccggagcctgccgtccggccctaccgggaccgatgccctctagtggctcagtgtccagaagccgccaacgaggacgatccatggcatcccggggctttgacggtaaggtcaccagctcttcagggagggccaaggggtgacgagtacgtatgtggcgccaccgtgcggacagcggttacggggccgagataggagagccaggggagcggggagaaaaacggaagctgagagggcggtgcagcattgggctcccggaaaagaatgagaaaaacactacatttcccagagccctacaaggcctgaagtgggtggagctggaagccggaaaattgggtgcgcaagaggatcagggatagcctctgagctcgggttcccagggttcgtagcttccaacggctgcgcgcgcacttcggtcgcgggcggtgaggtgctgttgctgaaacgctgccgctgagggtggactcgatttcccagggtcccgccgcgggagtctccggcgggcgggcgcgcgcgagccaccgagcgaggtgatagaggcggcggcccaggcgtctgggtcctgctggtcttcgcctttcttctccgcttctaccccgtcggccgctgccactggggtccctggccccaccgacatggcggcggtgttgcagcaagtcctggagcgcacggagctgaacaagctgcccaagtctgtccagaacaaacttgaaaagttccttgctgatcagcaatccgagatcgatggcctgaaggggcggcatgagaaatttaaggtggagagcggtaagtgagatgctctttccgtccttggttttgggctcgactcccgccctttgggtctggtcttcccccatcaagttggcactgggtaccgctctgttaacctcacttcctgggctctgtggatatcctgagccttcgctttcctgctccttacagtttgataagaagcctttgaaaaaaaaatctgaatctaagttcagtagcattttctttgtagttagggtaggctcatacagggacgcttattttccttcgtccggcagacgggaaacagacttgatagagtctgcgaacccatctctctaagcctagagtaccttatatgttttgttgcacttcaactgatagtggctccgccctattttctaggcacctgcattctaggcctttgccaaattgaccactctgtgcacttgttcttagtgtgtgcgtcgtcccgtggctccagaacgaatcagatgtttacaaaaatgaatattaggtgcataagagcgctggaaacacagtgaatgtgcagtacataaatttaatatatcttgatttctcttaaaaagttggagtttgatagaaaacattaaaattttcttgtaattacctaaagtaggcctttaagtaagaaagttactgacaataatggcttgaacatccttgaaaaaaatatgaagaatatagtcattaccattagtaaaatacaaacttcccgttaatgtgttttggtttaccatttgtttggggaggttcatactgttcttgctaagt

SEQ ID NO: 3195 - DNA, 6000 bp, Homo sapiens
agtaaaatgtctacaatgagcttattctaagaaatatctcttacctgaatggcaatattgcgatcctgagcaatttcaagttctttgtttttctcagttagtgccttcagttgattgtctggataaaaggaattttatgaatacatacacatttgcttaaaacttgcaatgagtgtttttatgcaactgccaaccttacatattttaataaatgaaaaaacagaagcccagaaagactgcattgtacatcacattccaaattcatgaatgcattcaaaatttactgtgttctagaccaaaattttaaatatgctatcctgtctccaaatcaaatgtataataatcctagccaacatttatggggaaagtcacatgcaattagtaattcctttatttttcagtgccatcttctaagtcaacatatatcataagaaacagtgaactgtacttagcagtaagaaaatggagttaaaaagacaggatcaagagagaaaaagcatttaaactatataacatgtatatacagcaaatcacaataatgaatatttgcaattcctatcatttatcactctaaatagagcctttaaagaaaaaacattatgcttgataacgcacttatcaatctctcaattgccactcaaaatgggctcttttcccttacatgcagtttctcttctaaacataggctaactagaaaaaatataatttttaaaatttttccaaaaatatacattttgaaactgtatttcactaaaatacatatgttggcaatttaataagcaaatacattttaattaattctaatcttaacttctatttaaagaggaccattaaagcaaaaaaatccccattaaatgtgtctaaattttctattttgttttaatattatttactgctttccagacttactgatccagagtatataaatacacacacacgcgcgcacacattaactgtataccacaggaaggtatctgatgtatctgtaggttcatccctttttctcttctcccagatctcgtaaaagctgtattcagtcatttttctcaaattcctcggcactactactaaacagatctttttattatggctaggcaaaactacatagataatgaaccagatctagctatatatgctccatcacacatgtatgcatatacattacgtttttaaaatgaggtgtaccaaaagtagctgaaaaaagttataacctaaatagttgatggtcatggacccattaagaaggaaagctgcaattttaatcatttgattatgaacttcctgtgttccttctccatcaatcaaattaaaattgaactatattaagtatcaattaattataccagccagacacagtggcaatcccagcactttgggacgccgaggcgggagaatcgctcgaggccaggagttcaagaccagcctggccaacatggcgaaccactgtatctactaaaaatacaaaaattagctgggcctggtggtacatgcctgtaattccagctactcaggaggctgaggcgcaagaatcgcttgaacccaagaggcagaggttgcagagagccaagattgcaccactgcattccagcctgggcaacacagtgagactctgtctccaaaaaaaaaggaaaaaaaaaattaattacacctttatagagatctttcctaatgttctgatgtttgctttcttaaagcagaagcagtctacagccagaccaccctgaaggcaccccatctcgtctgatctcggaagctaagcagggtggggcctggtcagaacttggatgggaaaagcaaagcacaagacatatcatcctcctaagaaatgtcaggatctttaacatcttgtgaactttctaaaacttaatgatgtaagaaaagtaagaaagagattagctatcaatcttttataggaattaggccttaaaggggaaatatcctgagattcatagatatttataaaaattattaaaaaatggagttaaaacataaatataatgaaatcaataggcttcgattcttcaacataaaaacaagccactctctacttctttagttgcataatgctttcacctttttaaaaagatttcaagaactcttatctcatttgatttacaaagctgtctaggtagacagacatgtgggtctaaccattttataaacaataatcagatactgttaagatttacatgtggcaaaagcaattttaatagcaaaatcagaataagaatccagacctcctgaccattaaattctgtgttctcacaaaatctttaccactaagtgaaaaatcaaaatatcaccataataaaaaccaatgatgcttaatcaatattttcatgtttagtaagcaaatgtttccaaagtatataaaggagtctctgaagatttcgatactccgagaatacttacaaagatgaattaaatacttactgagtttctctagctcaagccgcaagctttgacactctcgggtttcattcacaagtctctcctgactgtgggacaacctcttttctatttcaaaatactgttgttctacagcagacaagcaaaaaacaaaaaacaaaatcaaacacatgtacatacattgtgaatactgttatttatttctaataaccttgattttaaaacttaagatacagtattagaattgtgctccacataagagaatctgagtaaagataaatagactgagcactgaaaaggacttaaagcatttccaaacgacttacatgacaaaaaataaaaaataaaaataaggcctaaaaggggctttacaaatcaatgtcttcaaggcaggtaacctcatttatcttagtattttctccagacatcagtaaactgcttaataaataaagtatttattacacgagaaaaaattgtttagacaaaaaaaaactcctttgttttaaaagacttcttttatagtagtcaagatattacctgaaagcataaaactactaaatatatgtaaaagtaaatgtgtaaactttccaagggaagggattgaatatcatgttcagcatagtatcaggaacatgtaagacattcaatatttatggtgcaaattaataaatagaatgcaatgtactatactcagctctgggatcagagaactaattttcaaggtcaattctgcttgacagttacactttttttgaagtaaaaacttgttcagaatttccagtcaacttagcaagaacagtatgaacctccccaaacaaatggtaaaccaaaacacattaacgggaagtttgtattttactaatggtaatgactatattcttcatatttttttcaaggatgttcaagccattattgtcagtaactttcttacttaaaggcctactttaggtaattacaagaaaattttaatgttttctatcaaactccaactttttaagagaaatcaagatatattaaatttatgtactgcacattcactgtgtttccagcgctcttatgcacctaatattcatttttgtaaacatctgattcgttctggagccacgggacgacgcacacactaagaacaagtgcacagagtggtcaatttggcaaaggcctagaatgcaggtgcctagaaaatagggcggagccactatcagttgaagtgcaacaaaacatataaggtactctaggcttagagagatgggttcgcagactctatcaagtctgtttcccgtctgccggacgaaggaaaataagcgtccctgtatgagcctaccctaactacaaagaaaatgctactgaacttagattcagatttttttttcaaaggcttcttatcaaactgtaaggagcaggaaagcgaaggctcaggatatccacagagcccaggaagtgaggttaacagagcggtacccagtgccaacttgatgggggaagaccagacccaaagggcgggagtcgagcccaaaaccaaggacggaaagagcatctcacttaccgctctccaccttaaatttctcatgccgccccttcaggccatcgatctcggattgctgatcagcaaggaacttttcaagtttgttctggacagacttgggcagcttgttcagctccgtgcgctccaggacttgctgcaacaccgccgccatgtcggtggggccagggaccccagtggcagcggccgacggggtagaagcggagaagaaaggcgaagaccagcaggacccagacgcctgggccgccgcctctatcacctcgctcggtggctcgcgcgcgcccgcccgccggagactcccgcggcgggaccctgggaaatcgagtccaccctcagcggcagcgtttcagcaacagcacctcaccgcccgcgaccgaagtgcgcgcgcagccgttggaagctacgaaccctgggaacccgagctcagaggctatccctgatcctcttgcgcacccaattttccggcttccagctccacccacttcaggccttgtagggctctgggaaatgtagtgtttttctcattcttttccgggagcccaatgctgcaccgccctctcagcttccgtttttctccccgctcccctggctctcctatctcggccccgtaaccgctgtccgcacggtggcgccacatacgtactcgtcaccccttggccctccctgaagagctggtgaccttaccgtcaaagccccgggatgccatggatcgtcctcgttggcggcttctggacactgagccactagagggcatcggtcccggtagggccggacggcaggctccgggataccgccacgctctctatggcgcccagaagggggcggggtggcgaccgcagtcgctttggctgaggctctgcggggaagggagggggggcttttacgtcatcaatctgcgccacctgactcccaagtccctggctttggagtgggaagtgaggtgtgggaagtaggtcgctttctgatgaattcagtggcagtgaattgagaccggagggaatctggcccctagaggctggtacttgggcccgaaacccccatctccggcggagagaccgtccgaggtaattgtctgccacgagtgcacattctgaaaacaggtaagtcagcctaagtgtagtgtgtgtgtgtgtgtgtgtgtgtgtgtgctctcttttcaagagaaaaaggaagggacagtgttggaaccatatggacagtcactccggcacacacttctgacgaacttaccttgtgtgaaacggcgtacctaaatggtttttggtggtggggaggtggcactgagtgattcagtacccgggaatttaaggacccgggttaattcttcaggaggagaattaaaagaaaccggtagcactttgagtgtagcctatgttttaaatttttcgttgcagaaacggttacctaacattatattgtttttaaaattgaaaactgttgtaactgaagtttttaaacacattgttaatttctacagtaacagaacttgtatggttccagatcataattctgtagttttaaagctcaatccgtagattgtttcgtgtttactcttatgaaagaatttgttaaattattcattgtaaataatgcattcccagtgtcgtctctctgcagttcccacagtcgtgggccttctgtgaattggtgatttagttcttatatgaaatttattctttttctctagttcttacttttgaatcatgttgtgaagccgtctaagaaatataaatggaagcattttatgatattttgtaataactaaggaaaaataaatcaacagcggagcttaaggttgatttttccccaaaaatattttttagataagcattgtaattaaagttgctggtatatgaagtattatgctatgtcctaagcccacagtattatcatactgttgatctgtcatttgggaaatgtagatttttctgtacttagattcacagaatcctaaaattagataggttttcagatctgctaggattcaaatgctttattttatagattaggaaaccagagcccagaaaggttgagttgtgtcagtcacagtg

SEQ ID NO: 3196 - DNA, 6000 bp, Homo sapiens
tgaccagagagcgactccctctcaaaaacaaaaaaaaggataggccgggcgtggtggctcacgcctgtaatcccagcactttgggaggccgaggcgggtggatcacaaggtcaggagatcaagaccatcctggctaacacagtgaaaccctgtctctactaaaaaatacaaaaaaaaaaaattagccgggcgtggtggcgggcgcctgtagtcccagctactcgggaggctgaggcaggagaatggcgtgaacccgggaggcggagcttgcagtgagcccagatcgcaccactgcactccagcctgggtgacagagcgagactctgtctcaaaaaaaaaaaaaaaattaaaaaattaaaataaaaaaataaatgctacaggtgaccaataaaggctgcaataataagggaaatgtttataaataagtagatatttaagtcaggccttgaagcaccatttctcaaaagtactatttctcaaagtggaatgtggtgtagcaatcacatgagtacttgtcaaaaatgcagattaacctgggtcaccccctagccctacagaatcaaaatgtgggtatttaacaagtaccccaggtaggtgatgcttatgcacactaaaattttagaaccttcggtgacctttaagacaatccactcccacttagtgaataatatagtttctcttccttttgattttcttaataatatttaagtaagatttagatgtgtagaaagaaacctgaagagtattctgaaaggtgatgcatcctggacaaaaacagaaaatcaaaaatgacattgggctttaaaagagcataaggaacctcaccttgttggaagaaggaaactcccatttgaagtcgggtgagataaaattggttaggtaggccggggcaggtgcatagaaagctttggacaccagcttcagggaggttggcctttttttttgaaagacagttggtagacaaggaagaacaaacaatggtgttttaggaaaaccatcctgtccagttgtagacggtgagttaaaaagaaaataaattcagggagaccaataaacaggttactgcaggaatccaggtgtgagatggtgaaagcctgaactaggaaagtgttacttgctgattacctgggtgacaaaattatctgtaagccaaactcgcgcaacatgcagtttactcgtgtaacaaacctgcacatgtaccccttgaacctaaaataaaagttggagaaaaaaaaaaaaggaaagtattactgaatatgaagcagagaggatgagtgggagaaaccatttactgaagaaacaatcaatcagacatggtaactgaattttttttaaaagggtatagaccaggtgcggcggctcacgcctgtaatcccagcactttgggaggctgaggcgggtagatcacttgaggtcaggagttcaagaccagcctggccaacatggtaaaaccctgtctctacaaaaaaaatacaaaaattagccaggcttggtggtatgcgcctgtagtcccagctacgcaggaggctgaggcacaagagttacttgagcccaggaagcagaggatgcactgagccaagatcatgccaatgcactccagcctggacaacagagtgagactccatctcaataaacaaacaaacaaataaataggtataaagggacatgtgtaaaggaaataataatgctcagaatctgaagtctacatggaggcaagaaatgatgagaccagtgacagaaatagggaagctgagaaaaggagctatttttatggcaatgtagtaagaggaaggatgtggcaggacatccaagtgggggcaccttttgggcagctgaatatcactgatcagagataaagaacaaataaagtgttaatggtagctatgatagcggttatcaccagtgccgtgagtattccttcattaagggctgacacagagaacaattatacttattgggtatatttatcaatcttggctggcaataatgcctggatgcaatcactttatgacgcagttacacatgctttctgatctcagtatttaccataataaatctgctcctataattgaggcataccgccctcaaaaacttatttgtaaacaggattggacccagttagaaaaaatgaacgtacttgtttaggaagattgcattgcagaacaggcagagatgctgcacaatgattcctatggaatcattattaattggtcccctaaggggatgtttagcttgaattgcacctctcagtctgcgtgccacggccacactatgttcagctggtctgaacaaaatggtcagatggtagatataataagaagtacagcaagagttcctattatctggaaccatggcagtatagtgacacctcaacctcaaatgatatggcccgctctaggagcttaacataaggatttaaaattaaaagaagaaatatttaaagcatccgaggcacacttgaccttaatgccaggaactggagtgcttaaaggagccgaaaatggataaaaacacttggaagctctgtgatttcaatgatgattgtgcttttaatctgtgttgtttgtctttgtatagtctgcagatgtgtatcctgactcctgcgagaagtagctcaccgtgacaaagctgcctttgcatttatcaatttgcaaatcagagaagagggacatgttgagagcaggccccccaaaatctggccataaactggccccaaaactggccataaacaaaatctctgcagcactgtaacatgttcataatggccctaacgtccacgctggaaggttgtaagtttacaggaacgagggcaaggaacacctggcccgcccagggtggaaaaccgcttaaaggcattcttaagccacaaacaatagcatgagtgatctgtgccttaaggacatgctcctgctgcagttaactagcccaacctattcctttaattcggcccatcccttcgtttcccataagggatacttttagttaatttaatatctatagaaacaatgctaatgactggtttgctgttaataaatacgtgggtaaatctctgttcggggctctcagctctaaaagctctaaaggaaatcagacccctgatttcccacttcacacctctatatttctgtgtgtgtgtctttaattcctctagcgccactgggttagggtctccccaacagagctggtcttgacagaatatcactgatcagagataaagaacaaataaagtgaagatagatctttgacaccaaggacaattcactaaagagtttatcgaatgattgactcagagaccaagaatcaggccttaggaaatacttagcgggaaatgggatggagagaaacctgaaagaaaaagataatcatcagagaagtacggggatgacaaagaaagaacagcgtcatagaaggcataagggaaacaaatgtcaaggagtggtcaactatgtcaaaacgaataagaacagagaaaactggatccttaaagatgagtagcttgaactaacctcctgtacctgggtaacgaacattctgggcaaaatatattgtgaaccatgctgatgttctttcgccacaaaacataagtgatagcctctctatcaagagacctagatttcctagtgtctggtcctgggctgttttcccatggccccgctggttctcttcctctattcctagaaaagtatagaaaatggagctctctttgcttgccattgagctcatgtcctgccaacttctacccaagtgacaggtaggtcagtaaagttacaggctgagaaattaaaattatttgccaaacactagttttatgattatctattaacaacagccacaacaaatcaagaaggagtcccagtgtatttcaattagcttctagctcaagtgatacatgagtagtatggctagaataggcattgtagaagtatgaatggagaactgtctcttgttttctgtccatctttattgttattgctggatattaaatgctgtaatttttggcataggtttttttccaaagactggtctcttgggtcaagttttcctgaacttgcctggtattgggcaagttcacacagaaaatatgagtcatttcacaaagtcctgggcttgtctatctacttgaaggaataggaaatggacttcacttggagcatgatggatgaggcttgggcttttactaatgaaataagtttcaatcttaactcagttaaacctttaaagacaggagaaaactatctggggatggattcaggccagtgagatcacgttgcacaaatctccccttaagggatctttactgacctagaattgtttcaaaataagattccaaactgtcgagggagtttgaagccttgaaacttggtgtaggtttgcttaaaacaaaataacgaatatactacatttcccaggaggcttcgcggtgagcctccgcactcggctggttctctttaccgcgaggaaagctgggaaatgtagtgccacaggcaaccctgcacgtgacgcttgcggaggaaggggagagagaggcgcgcgggagggcgtctagggaatcgaggtgccggctgctccttcctcacaatttggtttgtgctgcaaggggagggtccccatcatctggccccagtggtgtaaggagctgactgggattcagtcactgacttggagccgctcgggggaagtcccggtgggtgaggttccgcggcgcctggtccagtttctcggcagtcaggccaggagggggtggggaaggtgcgaacagccgggggctcggagctcgcgccctgcgccccacccaggttgcggccgcccggggaggaagcgcgtataggttgagtgcaaagtttccttttttgctttctcgtcagagcagcccagacaggcggtgggtgggaatgcctcacttcagtttgaagagggtccggatccaaaggggttaaaacgagcgacccccgatccccgaccacacttcccgcctccctaaaacgcacaccccgctagccatgggcagccgcgaccacctgttcaaagtgctggtggtgggggacgccgcagtgggcaagacgtcgctggtgcagcgatattcccaggacagcttcagcaaacactacaagtccacggtgggaggtgagacgtctcgggggtggggagggggagggggaggaggaggccccgaccgcggactcgagctggggacccaagtggggtggggatttgctgtcggttgttgggtccttcttcgggtcaggaagtactgtctgggaacctagatggtgtaattgccgggtgtttggtttacacgcctctcttgagtttcccgttagattttcccaaactgagcccactgccaggagaaaggtaagagcaaaggcgtgaagatgagaaatagggaagggaggatgaggatgagcaattgctgtttattgcaggcgtactgtgaacttaagtctccagcctttcagctgtccggcaaatctctccaatcagcagaagcagctgagatcctctgtggggcctcctggttaggtgccggctggggctgtagtcctgcccctctgttgagggaggaaccgcaaggtgtttaacctggcttcagtgggagaacgcaggaagcggaactggtctgaaggactgtagctttgttgtggggctgtgggtgggatggaagacacaaaatccccgaacgagccccttggctacgcagtcagatgcccatgagggctgatgagctgtgtttttgtccgttgattgcttaaataaaggtaaccaaggaattcttccaagaatgtgaaatataccacttctctgacctatcttcccaccacttttttcctcaaactggagaaggtagggaggaaggggacaccgagttcattcatttctttcccgggtgtggcctttggactcaactattttttcagaggcagaaatgccttattgttaattagaaggtatttagctaggaagagctggtgatgggggagagtaacttaaaattttatt

SEQ ID NO: 3197 - DNA, 6000 bp, Homo sapiens
cttaaatcttaactcccgacctttccgattttggaagctaagagtagttcctttcacagatgatcaggagcaaagtcaaaattttgaaggaaaaatttacttcttcctgttttcttcgagacacgctggttgcttatataagttaaatagttacaaattggtcacatagttaagtgaccaaagtgcaaatagaatataaatgctacaggccaggtacagtggctcacacttataatcccagcactttgggaggccaaggcaggcagatgacaagatcaggagttcgagaccagcctggccaatacggtgaaaccttgtctctactaaaaatacagaacttagcaaggcatagtggcacgtgcctgtaatctcagctacttgggaggttgaggcaggagaatcacttgaacccgggaggcggaggttgcagtgaaccaagatagcaccattgcactccagcctgggtgaccagagagcgactccctctcaaaaacaaaaaaaaggataggccgggcgtggtggctcacgcctgtaatcccagcactttgggaggccgaggcgggtggatcacaaggtcaggagatcaagaccatcctggctaacacagtgaaaccctgtctctactaaaaaatacaaaaaaaaaaaattagccgggcgtggtggcgggcgcctgtagtcccagctactcgggaggctgaggcaggagaatggcgtgaacccgggaggcggagcttgcagtgagcccagatcgcaccactgcactccagcctgggtgacagagcgagactctgtctcaaaaaaaaaaaaaaaattaaaaaattaaaataaaaaaataaatgctacaggtgaccaataaaggctgcaataataagggaaatgtttataaataagtagatatttaagtcaggccttgaagcaccatttctcaaaagtactatttctcaaagtggaatgtggtgtagcaatcacatgagtacttgtcaaaaatgcagattaacctgggtcaccccctagccctacagaatcaaaatgtgggtatttaacaagtaccccaggtaggtgatgcttatgcacactaaaattttagaaccttcggtgacctttaagacaatccactcccacttagtgaataatatagtttctcttccttttgattttcttaataatatttaagtaagatttagatgtgtagaaagaaacctgaagagtattctgaaaggtgatgcatcctggacaaaaacagaaaatcaaaaatgacattgggctttaaaagagcataaggaacctcaccttgttggaagaaggaaactcccatttgaagtcgggtgagataaaattggttaggtaggccggggcaggtgcatagaaagctttggacaccagcttcagggaggttggcctttttttttgaaagacagttggtagacaaggaagaacaaacaatggtgttttaggaaaaccatcctgtccagttgtagacggtgagttaaaaagaaaataaattcagggagaccaataaacaggttactgcaggaatccaggtgtgagatggtgaaagcctgaactaggaaagtgttacttgctgattacctgggtgacaaaattatctgtaagccaaactcgcgcaacatgcagtttactcgtgtaacaaacctgcacatgtaccccttgaacctaaaataaaagttggagaaaaaaaaaaaaggaaagtattactgaatatgaagcagagaggatgagtgggagaaaccatttactgaagaaacaatcaatcagacatggtaactgaattttttttaaaagggtatagaccaggtgcggcggctcacgcctgtaatcccagcactttgggaggctgaggcgggtagatcacttgaggtcaggagttcaagaccagcctggccaacatggtaaaaccctgtctctacaaaaaaaatacaaaaattagccaggcttggtggtatgcgcctgtagtcccagctacgcaggaggctgaggcacaagagttacttgagcccaggaagcagaggatgcactgagccaagatcatgccaatgcactccagcctggacaacagagtgagactccatctcaataaacaaacaaacaaataaataggtataaagggacatgtgtaaaggaaataataatgctcagaatctgaagtctacatggaggcaagaaatgatgagaccagtgacagaaatagggaagctgagaaaaggagctatttttatggcaatgtagtaagaggaaggatgtggcaggacatccaagtgggggcaccttttgggcagctgaatatcactgatcagagataaagaacaaataaagtgttaatggtagctatgatagcggttatcaccagtgccgtgagtattccttcattaagggctgacacagagaacaattatacttattgggtatatttatcaatcttggctggcaataatgcctggatgcaatcactttatgacgcagttacacatgctttctgatctcagtatttaccataataaatctgctcctataattgaggcataccgccctcaaaaacttatttgtaaacaggattggacccagttagaaaaaatgaacgtacttgtttaggaagattgcattgcagaacaggcagagatgctgcacaatgattcctatggaatcattattaattggtcccctaaggggatgtttagcttgaattgcacctctcagtctgcgtgccacggccacactatgttcagctggtctgaacaaaatggtcagatggtagatataataagaagtacagcaagagttcctattatctggaaccatggcagtatagtgacacctcaacctcaaatgatatggcccgctctaggagcttaacataaggatttaaaattaaaagaagaaatatttaaagcatccgaggcacacttgaccttaatgccaggaactggagtgcttaaaggagccgaaaatggataaaaacacttggaagctctgtgatttcaatgatgattgtgcttttaatctgtgttgtttgtctttgtatagtctgcagatgtgtatcctgactcctgcgagaagtagctcaccgtgacaaagctgcctttgcatttatcaatttgcaaatcagagaagagggacatgttgagagcaggccccccaaaatctggccataaactggccccaaaactggccataaacaaaatctctgcagcactgtaacatgttcataatggccctaacgtccacgctggaaggttgtaagtttacaggaacgagggcaaggaacacctggcccgcccagggtggaaaaccgcttaaaggcattcttaagccacaaacaatagcatgagtgatctgtgccttaaggacatgctcctgctgcagttaactagcccaacctattcctttaattcggcccatcccttcgtttcccataagggatacttttagttaatttaatatctatagaaacaatgctaatgactggtttgctgttaataaatacgtgggtaaatctctgttcggggctctcagctctaaaagctctaaaggaaatcagacccctgatttcccacttcacacctctatatttctgtgtgtgtgtctttaattcctctagcgccactgggttagggtctccccaacagagctggtcttgacagaatatcactgatcagagataaagaacaaataaagtgaagatagatctttgacaccaaggacaattcactaaagagtttatcgaatgattgactcagagaccaagaatcaggccttaggaaatacttagcgggaaatgggatggagagaaacctgaaagaaaaagataatcatcagagaagtacggggatgacaaagaaagaacagcgtcatagaaggcataagggaaacaaatgtcaaggagtggtcaactatgtcaaaacgaataagaacagagaaaactggatccttaaagatgagtagcttgaactaacctcctgtacctgggtaacgaacattctgggcaaaatatattgtgaaccatgctgatgttctttcgccacaaaacataagtgatagcctctctatcaagagacctagatttcctagtgtctggtcctgggctgttttcccatggccccgctggttctcttcctctattcctagaaaagtatagaaaatggagctctctttgcttgccattgagctcatgtcctgccaacttctacccaagtgacaggtaggtcagtaaagttacaggctgagaaattaaaattatttgccaaacactagttttatgattatctattaacaacagccacaacaaatcaagaaggagtcccagtgtatttcaattagcttctagctcaagtgatacatgagtagtatggctagaataggcattgtagaagtatgaatggagaactgtctcttgttttctgtccatctttattgttattgctggatattaaatgctgtaatttttggcataggtttttttccaaagactggtctcttgggtcaagttttcctgaacttgcctggtattgggcaagttcacacagaaaatatgagtcatttcacaaagtcctgggcttgtctatctacttgaaggaataggaaatggacttcacttggagcatgatggatgaggcttgggcttttactaatgaaataagtttcaatcttaactcagttaaacctttaaagacaggagaaaactatctggggatggattcaggccagtgagatcacgttgcacaaatctccccttaagggatctttactgacctagaattgtttcaaaataagattccaaactgtcgagggagtttgaagccttgaaacttggtgtaggtttgcttaaaacaaaataacgaatatactacatttcccaggaggcttcgcggtgagcctccgcactcggctggttctctttaccgcgaggaaagctgggaaatgtagtgccacaggcaaccctgcacgtgacgcttgcggaggaaggggagagagaggcgcgcgggagggcgtctagggaatcgaggtgccggctgctccttcctcacaatttggtttgtgctgcaaggggagggtccccatcatctggccccagtggtgtaaggagctgactgggattcagtcactgacttggagccgctcgggggaagtcccggtgggtgaggttccgcggcgcctggtccagtttctcggcagtcaggccaggagggggtggggaaggtgcgaacagccgggggctcggagctcgcgccctgcgccccacccaggttgcggccgcccggggaggaagcgcgtataggttgagtgcaaagtttccttttttgctttctcgtcagagcagcccagacaggcggtgggtgggaatgcctcacttcagtttgaagagggtccggatccaaaggggttaaaacgagcgacccccgatccccgaccacacttcccgcctccctaaaacgcacaccccgctagccatgggcagccgcgaccacctgttcaaagtgctggtggtgggggacgccgcagtgggcaagacgtcgctggtgcagcgatattcccaggacagcttcagcaaacactacaagtccacggtgggaggtgagacgtctcgggggtggggagggggagggggaggaggaggccccgaccgcggactcgagctggggacccaagtggggtggggatttgctgtcggttgttgggtccttcttcgggtcaggaagtactgtctgggaacctagatggtgtaattgccgggtgtttggtttacacgcctctcttgagtttcccgttagattttcccaaactgagcccactgccaggagaaaggtaagagcaaaggcgtgaagatgagaaatagggaagggaggatgaggatgagcaattgctgtttattgcaggcgtactgtgaacttaagtctccagcctttcagctgtccggcaaatctctccaatcagcagaagcagctgagatcctctgtggggcctcctggttaggtgccggctggg

SEQ ID NO: 3198 - DNA, 6000 bp, Homo sapiens
aacgagagcccagcaatgtcatctgtttctgacagggcacaccgcaattgaggggtggggagggcgctatggacttgctgtgtttttccctattcaggacctctgtagcaaggaaagtcagacggaagagctcagcagagtatgcccaggcaaagactagcatcgacgcatctgcaggcacctctgttcagcagcctctcctgctgtctgtgtggctcagcagagcgcagcgctcagcactgggggccatggggccctgggcttcctgtcttaggggagcagccttgatggtggttaactgcagcttctgggttcttctagggcaacggggcagtatttttagtttgacagttcctggatacatcctagattcccttaaggagcagataaaatgagaatcactgaaaccttgaacggtgattacattcaacataacctttttcttgcagctttgaatagtttaactggtaagaaaccgttgcagctccctaagtgctaacacacagaggttttgttgataaaagtccagggtagtaccattcgttagcaattgtcttcccacttgccaccttgcttgtataaaacagaatacagttattgtttagaacaaatcagcagttagaaaggcaaaatgttccattttctacaaacagctgcagtgacatgccagattgtcctcactggcgttaataatggaacagatttgggaatgtgtcatctttcgttatcgccattgatggtcctcctccttcctcttacagaaaaagagggtttctttgagatctggtcgcttttactgccatataatgccatttgttaaatgttctaagaaaatcaggcaactgatgttccttggatgcagggattcaagggatgtagcaagtagagttgatcattgtcttctttttccagataagtgtttttgaaaaacatagttcatgttcattatcatcactattccctatgcacagcctctcacagcaggaactaacttgtgtacattgacaggctccgactcagagtcagctgccacttcctccagctcccctcccaccgcagcccctgcccaggctctcagctcttttagggccatgatcagatgttcacgcctcattgtttccaagcctgacaacagaaaggggcaggaatgatggagggagatcattggctttaaagaatatcaaggattggggccctcagggatatctgtgaaatttcctagattcagaattgtgatgaatgtgttactgaagtgacagaatgaaggctgtctctcaattcttagctgacaccagcaagagtccctcctcttccaaaagggtgtctagcacctgcccctgttgagcatctggctaacctgggtgctgaacctcgccgggctggaatgagtcctggccatggccccaggagtccaggcagctcctgcccttcctggctgagcaggacaagcaccaggctccccactgctgtccagagccagctgcaggtttgctgtgcagaaacactgagtaaaataaagctgttggtgaggaaaattgtttatttgaaatgtgattggctcatgtcagaatctgaacattaaggttttagctgcccgtattctctagagagtttttatactctggggctcaaccacgggtacaccatcattcccagctccttccgtttttactgtagctaaaaatactgctgaaggtatttgatctaaaagatgtgtgtgacttgcttggtacaaatattggaaccaataactttataaggaggtagagatttccccaaatctcaataccttctagaaatgctgactgcagttacagtggtctatttgcagaagaagagagggcctccgagttcagtgtcttacacagagcagggagccacaaatgcttcttgatggatcagttctcacctaatacgaggatatcttctggtacattaggggtcagaaattttggctaatgccagcttgatcccatttctagaatcttctgcattaagagtgggatacagaaaagaaaaacagtgatacaagaatggaagtgtttattcttcagacaaaggcagagccccctcctcttcggagtgacagagtcagagcctcagtgcagtgggatctggcctgtatgctttctttgtttacacccacatccagcggatgctccctggagaggttagaatattcaaaaaaattggtaatgtacttcctatatgggtttgaggacatcgaattattttgcttgaagagaaaagggttgagtattggaaagattcactgatttccattgcaggacagcatatgattaaacaagcttagaggcaagcacgggggatttaaaatggagcacctcccccaggagactgtgaggccagggggcccttgggactttgttcaaagttctgcggtccttgggcctgacgggtgctcagcccagagcagatgcgtgggagcgcatgttgactgagtggctgaccacgtggccacataccaggaagagcttccaacagcacaggactgtcatcacaggacatttatgagaacagggtgctgatcatctgtgatctttgaaatacaggaaaccaggaaagctgacaggaggaacactgtgattgtcagcggcctgttttgatgcctttcaagtctcttccattgtttcctgatgagctaggactcagatgttgacatccttccctctttttctttcacttagtcccttcatgctaaagttttatcatagggaaattgggaaaggtgagttaagccagatgctagatgttgaatgaaatttcataagaagctttattttgcagttgcacttaaagcatcacaaagaaaaaatataagcacttgaagacattcgatgatgaattctatacagactttggatgctgtggatttcactgacttgcagttttgatatatgtggttacatgaaatgaaaggttactgaagactgctccttcttaaaaacttctgttttcttcaataccatttttttcactgtttcattgagtcttgaaattttgatgtcttagagatgattctatagtattatttcttcatagactatgtatttatgaaaatcagatgatttttgaagtataattactctacagcttattgatgaacacaagtttatgggagctattgcctctgttcatctttcctatgttcagagtttaaaaaacatagactagagataatgttgcaaaaaatgaatgtgtaaaattaaaatagatgtttcctgcccacagatgatgaggatggtatggactgcatggacaatgagaggcggccgcatttccctcaattttcctactctgcaagtggacgagaataagtctctttcattctgctacttcactgtcatcttcaatttattactgaaaatgattcctggacatcaccagtcctagctcttacacatagcaggggcaccttccgacatcccagaccagccaagggtcctcacccctcgccacctttcaccctcatgaaaacacacatacacgcaaatacactccagtttttgtttttgcatgaaattgtatctcagtctaaggtctcatgctgttgctgctactgtcttactattatagcaactttaagaagtaattttccaacctttggaagtcatgagcccaccattgttcatttgtgcaccaattatcatcttttgatcttttagtttttccctcagtgaaggctaaatgagatacactgattctaggtacattttttaactttctagaagagaaaaactaactagactaagaagatttagtttataaattcagaacaagcaattgtggaagggtggtggcgtgcatatgtaaagcacatcagatccgtgcgtgaagtaggcatatatcactaagctgtggctggaattgattaggaagcatttggtagaaggactgaacaactgttgggatatatatatatatatataattttttttttttaaattcctggtggatactgtagaagaagcccatatcacatgtggatgtcgagacttcacgggcaatcatgagcaagtgaacactgttctaccaagaactgaaggcatatgcacagtcaaggtcacttaaagggtcttatgaaacaatttgagccagagagcatctttcccctgtgcttggaaaccttttttccttcttgacatttatcacctctgatggctgaagaatgtagacaggtataatgatactgcttttcaccaaaatttctacaccaaggtaaacaggtgtttgccttatttaattttttactttcagttctacgtgaattagctttttctcagatgttgaaactttgaatgtccttttatgattttgtttatattgcagtagtatttattttttagtgatgagaattgtatgtcatgttagcaaacgcagctccaacttatataaaatagacttactgcagttacttttgacccatgtgcaaggattgtacacgctgatgagaatcatgcactttttctcctctgttaaaaaaaatgataaggctctgaaatggaatatattggttagaatttggctttgggagaagagatgctgccatttaaccccttggtactgaaaatgagaaaatccccaactatgcatgccaaggggttaatgaaacaaatagctgttgacgtttgctcatttaagaatttgaaacgttatgatgacctggcaacaaaaagtaatgaagaaaattgagacctgagtgaagataagaaatgatctttacgtggcaaaatgaacacatcttgagtatttaggaaatgggcagtgaaggctaagaacctggtgtgtttcttgggatcatggtacatttatcactgaattaagccatcagggaaaaaacaacaaaaaaagagaacacctccagcttttctttttctgtatatactcatgtcccccagattccaacatttctcactgaaagggggcatgtatgcaaacctcatctttctccttcattaatgatgatcttcagattaaaccctttggtgctaggagctgacaatttccaaagcagcctgtgaagtcctaggggctgggggccactcttgcggcaagcagaaggccatcctactccgcggagtgatcatggaaatgtattttagttaaactctgacagctcccaaacggaagactacagcatgacgtagtattatgattgcattgtatgaaagagcaagtgactttctaagtaggatgaatcatattcatatgcagatgtcttagcctcttgacgctggaagtgtggatttatagctatgaaaccactgctggcagtgggtgggccactgggactgacgggggttaaagggcattttactaaggcagctaagacatattcagacatcaacgttatccttctttttcatatttctacctgagtgaagttcatccttagtattgagtaggaagttacagtaaatggtagttcattcttacttacacacatagctaatcttttttttttcacttggaattatgttgaatgtttcattttgacaaaaaagtagactagaaggtatgttctttaagttgtcttgcatccattatataagaaagaaacaggtgagaggaagagcagaaagctgagactggctgatgttcagagcacttactcctctagagggaaagcatgacaccgaacactaagcacacagctttttgttgttttggttttttctcccgcaaatcttaaagtgattcccatgaccttggccaaggacacttcttaaagattaatgactggcactgacattgccccaggcgggccactcctcacactggctctcagttcccagccatgcctggggctcagtcacttctattccaccctctgagactccattggtgtcacacaaggtgtcttcttggctttgattttgagaatcccctattttcacttccagatctgtcagctgccatggaggaataatagaaaaccagaaatgcgtgtagagggagatttctaaaacttcccttgtg

SEQ ID NO: 3199 - DNA, 6000 bp, Homo sapiens
gagggaggacaaatattacatgaatgagactgttgaaatttagatgaatgtagggttttagttttcagttgtgtatttgcattgtggttttgcagcatgttttcttacagcgttttaaaaatagtccaaagtaatcctgcaaaaattgtgaaattattatttgtattcatttggttttctttccataattattactggagtgaattgttttccaatttaaaattaatttttggcttaataatcttgacatcgactctaaattgtatatgtcagagtactttaaggttttgctttggactttttaaaaattaatttcatagctgtaaaatattttaaataagattatatttaacaaatactggagtgtgaactgtgtgctggtttaattaaaaacttttaatatttacatttcattcagaaaatcactgtcagaaggaatctgttttcagaatcactgcaaatctaaataaacgtgttgattaaacttactagggaacaaatggacttagcatagagacttgtggaaagtaaggacttattttttaagctgtagcttttgatgtaaacatcagaaattttctcataaaaattcagtggaaatttccagctatctgggtttctttaaaatgaggaacctgttttacaaattgattttgtagaagtttagcctttacttaaactttgtgtattttcgtgaaaagatagctatgttttcttttgttattatatcttttagttcaagaatttgtccttgggaaggtaaggcaatcactgttaacaacttgttagttggatgcttagcatgatttgataggagcttgtctttatagtgtgattaagttttgaagtgttaaaaagaaaaatttaaaactatcttagatttgagcaacaaaatgcaagaactgaaaaaccattttcattttgagcaaatcagtcttgtgatctgactggcatttttatttttaagttaatatgcattaataatacaattaatttttgttagaagatttgtgttactccaggtttcagcatgtgcatcagtattttaaatcctggtcacacagcataccttcttttggaaagatagtcctgaatcttccgacaacaaatactttgtcctgatcttttacatgggataggattagattcagtttagagttaatgctaaccaatgcctggtaagcagttgccatgtgccaggcactgttctatgtgctttacctgtattcatttaatctttcaaacaacccctgctacacttttgaaagtgattttcacataagaaaaacttattgtggcattctaaaaataccttttatttaaactttcctaattctgcaacacttctagtgtttttcttgtttgtacctattattacagttaacagtgataattctaaatttgcaaaatttggtacaataatttccatagcatcaagttaataaaagtgtattgactggcccattaacatcacctttcatttgtttaaaatgccaaattaaataactcaaatgtttacagattttattatagcatcatagtctttaatcaaattagatgtaaactcattttctctgccaagtaatctttgaatactaatgggtagataaaattaatatatgcttcttgacttgttgatgtgttttttagttctgtttcttttcagtactctatcaccaactacaggtatttctcatttctaaatattatgagaggaaagtaaaaagatttactagaagaaaacactagaattgcaaatgataatttttcttccctatattagataattcctatatatatatggatggatttaaaaaaatttataattagggagattcccaagacagattttaggaggattttacatgtatattggaatctatattagaaagcttctgactgtatttgggggactaggggatgggaggggaaggaggacagtatttttccaataatggagcttagcccaaattttgtcttagttgaaatgctgtttgaatgttttatcttccaattatcaaacttttgaggacatgaactatgtatgtataatcatgtctttcacttatgatgccatctatatatgaagtagatactccgtagattttaacttgcagaatcataaatattagctctggaagagctataaagctattcagagttcatctaatgctatactttcatttttatggctccggaaactgaggcacagataattaaagtgaccttatacagcatcactctgggtggggcagggactcaagtttcttggtctttctggtgctcttcctaatacaccattgtgatgaaccttgttagaggattccatacctattgggtagctcagtttaatctgggggtaaattctgtcaagctgattcttggtatttaatggaccatatatcaattgcattttatatgtatgtatggatttttaaaaatttatgatgaggctcccaagacagattttaaaatgattttacatgcatattacaaaaatatggccaactgtgcaaccaaattctttttcttttcttttctttttttttttttttgagacaggttctcactgtagcacccaggcacggtcaccactcagcatagcctagacttcctgggctcaggtgatcctcccacctcagcctcctgagtagctgggactacaggtgcctgccaccactcccagctaatttttgtattttttgtggagatgggttttgccatgttgcccaggctggccttgaactcctggacataagtgatcctcctgccctggcctcccaaagtgctgggattacaaactaatatccctttttgacactctacagcaacagactcatggtgattttgaggagtctcagccttacctataggttctgcctgtgacctcataatacatgaggctggtggtcttgcattcagctacatagcttttgtcaggctatttagtcaggctgtctagagaatgtttagtcttgattcctgactgttaaatggttaagctccacacttaatttgcattgaagaatgacctgtagtctaatttagcgctaggttgggagtctaacactgaacttaactgctatgtatcatttatcacaaaccaagttgagagagtatgtttgtgtagtccatctatccatttttctagttatctaaaatttatgatatgattcttgaccacataacactggtgtacctggaccacattttttggtccccttctgtgcaaatggatttactaattttatgttggcattttcctttttagtttgagagtgacaataagcaatgaccctgtaaaactcattgctgtatatgggagggtgtttttgaggactttcccgcatacatcttatgaagaagacccatgggataaattcgatgtttgtcccaggaaaagttgtatttcttctgaggaactttttttgctttttaaaaaaatttgtgcagcgtggacaatatagcgggaccccatctccacaaaaattttttttaaaaattagctaggcatggtgatgcctgcctgtagtccagctcctcaggaggctgaggtgggaggattgcttgacccccattggaggctgcagtgagctatgattgtgccactctactctagcctggatgatggggggaaaccccatctcaaaaaaaaattttttttggatactgtaaataggaaagcctgttgtgttttgttatttgcattgtcttcccaagagctccatgccaaatttgtgacgtatctttcccaagtatgtatgcctttactctgacttctttttatcttaaggcagtatagttttggaatgcaggctctggagtcagacagcctgggttcagatcttggctccacatttactaggtgtgttgaaattgagcaagttggtttatctgtgtgagcctcagtttccttgtctgtgaaatggaattaatagtatcctcataaggttataaagatcacataagaataatagatgtaagtacccgtaacagttcttggcacatcttgagtactaaatatttttttctactttcatattccctttgtttcactttactttataataagtacataatatgaaatcaattattttttaatctccttaaaatatttcttggaacaggcagagtaagaatacgtaaatgatgagttcttggtacgttgtattttatatcacttaaagtattcacgactggttgtggtggctcacttctgtaatcccagcactttgggaggctgaggcgggtggatcatgaggtcaggagtttgagaccagcctggccaatatggtgaaaccccgtttctactaaaaatacaaaaattagcagggcgtggtggcgcacacctgtagtcccagctgcttgggaggctgaggcagaagaatcgcttgaacctgggaggtggaggttgcagtgagcagagatcgcgccactgtactccagcctggcgacagagtgagattccgtttcaaaaaaaaaaaaaacaaaaaatttacaattgcttctgaaattacagggatttagggcaattaactttcattctcttccctcttcacctcaaatacacatcaccaaacaaattttctctattatttgggtaggcgtgactggttttcttaagacttttttgttgcaacctcttaggttaaaagtttcactatcatttgaaattggtcacaagactagggaagtgctttcattatagaactatttaataaataagttccccagtttgaagagccagacttttatgtgaggtcaggccagttgaagacatttacaaagaattagttgtttgttattgctctgtgagttgcaagaatggaaaaaaaattctttcttcaatacttccttccaggctgagtcatcactagagagtgggaagggcagcagcagcagagaatccaaaccctaaagctgatatcacaaagtaccatttctccaagttgggggctcagaggggagtcatcatgagcgatgttaccattgtgaaagaaggttgggttcagaagaggggtaagtgctccgcaaaccaaaaataatacggttggtaagagtgctagcagtgagtggtgtcttagaagttgatcttttttctgatactgttaaactgtgtcatgctatgtctagtaagagagaaatgatatatttaacgtgtgttaggaatttgcttgttattaagggatttttttgtaattcttgattttgagcatttataatctagttaagttaggtttgactttctggtatgttgtgtgtagcgtgttacagaaagtgttgtatttttctgtggtgtctacaggttctgtaatctggagagatatctttagaatcatttaatatatgtaaaagtacgatcctatatgcatttaatcacatgtaaatatataaataagagaattaagccagtttgaatggttgtaggggaatggcttaaagtagaaaaggggaaagggttcacccgcaaactcatggattaatcccataaatttggtaagtaaagtcctgacgtaaaaggccaaatgaggacaaggattttttgtgtgtgtatgtttatgtttaatttcgtatttttatttttcatcatctaggtttaatacaccttgttcactcctactttagataaataacttaagcacattattattttttattattaaaggaagaacccttcgatgtaaagcggtttatcatctgtgagatcacctgcttatgtggtcaatatatttattagaaatttagagtttagattagttgctaggcaactactgtttacccacatggccacgtcgagtaggatgaggactgttccattctcagaaccttttagttcctgtatatctactttatggttacaagttccctcctaatattgattttaatattttttgaaggtctgtagtaaatacctatcctgaaaagctgttgtcatagttaaatgtgattatggattattttttaaatgagccttattaagtcgtaacttacataataaaa

SEQ ID NO: 3200 - DNA, 6000 bp, Homo sapiens
agctgacaaatgagtgaaactcattggtttaggttatgtatttacttaggaaaacgaaggtggaagagtctaataaagatggtgtaggaaatgaagattagtcttcagaacttgagtatcacttgcaaaatatgtataaacgaatacaaacattccgggggtggttgtctaaaacatgaaaatattttataattaaaatagcaacttattactaagttactagttttccaaggtttatgacttaatgcacaattatatgcaagatatatatccggactgtaattgttttccttttgccagtacattatcttgacttggaaagtttaccaaggagatagtacttgaaagtttacagggagatggtacttgaagatctttttgttttccttactagggttgaccccaatatctttgattggcttgaggttccagttttaaagtgagggaggacaaatattacatgaatgagactgttgaaatttagatgaatgtagggttttagttttcagttgtgtatttgcattgtggttttgcagcatgttttcttacagcgttttaaaaatagtccaaagtaatcctgcaaaaattgtgaaattattatttgtattcatttggttttctttccataattattactggagtgaattgttttccaatttaaaattaatttttggcttaataatcttgacatcgactctaaattgtatatgtcagagtactttaaggttttgctttggactttttaaaaattaatttcatagctgtaaaatattttaaataagattatatttaacaaatactggagtgtgaactgtgtgctggtttaattaaaaacttttaatatttacatttcattcagaaaatcactgtcagaaggaatctgttttcagaatcactgcaaatctaaataaacgtgttgattaaacttactagggaacaaatggacttagcatagagacttgtggaaagtaaggacttattttttaagctgtagcttttgatgtaaacatcagaaattttctcataaaaattcagtggaaatttccagctatctgggtttctttaaaatgaggaacctgttttacaaattgattttgtagaagtttagcctttacttaaactttgtgtattttcgtgaaaagatagctatgttttcttttgttattatatcttttagttcaagaatttgtccttgggaaggtaaggcaatcactgttaacaacttgttagttggatgcttagcatgatttgataggagcttgtctttatagtgtgattaagttttgaagtgttaaaaagaaaaatttaaaactatcttagatttgagcaacaaaatgcaagaactgaaaaaccattttcattttgagcaaatcagtcttgtgatctgactggcatttttatttttaagttaatatgcattaataatacaattaatttttgttagaagatttgtgttactccaggtttcagcatgtgcatcagtattttaaatcctggtcacacagcataccttcttttggaaagatagtcctgaatcttccgacaacaaatactttgtcctgatcttttacatgggataggattagattcagtttagagttaatgctaaccaatgcctggtaagcagttgccatgtgccaggcactgttctatgtgctttacctgtattcatttaatctttcaaacaacccctgctacacttttgaaagtgattttcacataagaaaaacttattgtggcattctaaaaataccttttatttaaactttcctaattctgcaacacttctagtgtttttcttgtttgtacctattattacagttaacagtgataattctaaatttgcaaaatttggtacaataatttccatagcatcaagttaataaaagtgtattgactggcccattaacatcacctttcatttgtttaaaatgccaaattaaataactcaaatgtttacagattttattatagcatcatagtctttaatcaaattagatgtaaactcattttctctgccaagtaatctttgaatactaatgggtagataaaattaatatatgcttcttgacttgttgatgtgttttttagttctgtttcttttcagtactctatcaccaactacaggtatttctcatttctaaatattatgagaggaaagtaaaaagatttactagaagaaaacactagaattgcaaatgataatttttcttccctatattagataattcctatatatatatggatggatttaaaaaaatttataattagggagattcccaagacagattttaggaggattttacatgtatattggaatctatattagaaagcttctgactgtatttgggggactaggggatgggaggggaaggaggacagtatttttccaataatggagcttagcccaaattttgtcttagttgaaatgctgtttgaatgttttatcttccaattatcaaacttttgaggacatgaactatgtatgtataatcatgtctttcacttatgatgccatctatatatgaagtagatactccgtagattttaacttgcagaatcataaatattagctctggaagagctataaagctattcagagttcatctaatgctatactttcatttttatggctccggaaactgaggcacagataattaaagtgaccttatacagcatcactctgggtggggcagggactcaagtttcttggtctttctggtgctcttcctaatacaccattgtgatgaaccttgttagaggattccatacctattgggtagctcagtttaatctgggggtaaattctgtcaagctgattcttggtatttaatggaccatatatcaattgcattttatatgtatgtatggatttttaaaaatttatgatgaggctcccaagacagattttaaaatgattttacatgcatattacaaaaatatggccaactgtgcaaccaaattctttttcttttcttttctttttttttttttttgagacaggttctcactgtagcacccaggcacggtcaccactcagcatagcctagacttcctgggctcaggtgatcctcccacctcagcctcctgagtagctgggactacaggtgcctgccaccactcccagctaatttttgtattttttgtggagatgggttttgccatgttgcccaggctggccttgaactcctggacataagtgatcctcctgccctggcctcccaaagtgctgggattacaaactaatatccctttttgacactctacagcaacagactcatggtgattttgaggagtctcagccttacctataggttctgcctgtgacctcataatacatgaggctggtggtcttgcattcagctacatagcttttgtcaggctatttagtcaggctgtctagagaatgtttagtcttgattcctgactgttaaatggttaagctccacacttaatttgcattgaagaatgacctgtagtctaatttagcgctaggttgggagtctaacactgaacttaactgctatgtatcatttatcacaaaccaagttgagagagtatgtttgtgtagtccatctatccatttttctagttatctaaaatttatgatatgattcttgaccacataacactggtgtacctggaccacattttttggtccccttctgtgcaaatggatttactaattttatgttggcattttcctttttagtttgagagtgacaataagcaatgaccctgtaaaactcattgctgtatatgggagggtgtttttgaggactttcccgcatacatcttatgaagaagacccatgggataaattcgatgtttgtcccaggaaaagttgtatttcttctgaggaactttttttgctttttaaaaaaatttgtgcagcgtggacaatatagcgggaccccatctccacaaaaattttttttaaaaattagctaggcatggtgatgcctgcctgtagtccagctcctcaggaggctgaggtgggaggattgcttgacccccattggaggctgcagtgagctatgattgtgccactctactctagcctggatgatggggggaaaccccatctcaaaaaaaaattttttttggatactgtaaataggaaagcctgttgtgttttgttatttgcattgtcttcccaagagctccatgccaaatttgtgacgtatctttcccaagtatgtatgcctttactctgacttctttttatcttaaggcagtatagttttggaatgcaggctctggagtcagacagcctgggttcagatcttggctccacatttactaggtgtgttgaaattgagcaagttggtttatctgtgtgagcctcagtttccttgtctgtgaaatggaattaatagtatcctcataaggttataaagatcacataagaataatagatgtaagtacccgtaacagttcttggcacatcttgagtactaaatatttttttctactttcatattccctttgtttcactttactttataataagtacataatatgaaatcaattattttttaatctccttaaaatatttcttggaacaggcagagtaagaatacgtaaatgatgagttcttggtacgttgtattttatatcacttaaagtattcacgactggttgtggtggctcacttctgtaatcccagcactttgggaggctgaggcgggtggatcatgaggtcaggagtttgagaccagcctggccaatatggtgaaaccccgtttctactaaaaatacaaaaattagcagggcgtggtggcgcacacctgtagtcccagctgcttgggaggctgaggcagaagaatcgcttgaacctgggaggtggaggttgcagtgagcagagatcgcgccactgtactccagcctggcgacagagtgagattccgtttcaaaaaaaaaaaaaacaaaaaatttacaattgcttctgaaattacagggatttagggcaattaactttcattctcttccctcttcacctcaaatacacatcaccaaacaaattttctctattatttgggtaggcgtgactggttttcttaagacttttttgttgcaacctcttaggttaaaagtttcactatcatttgaaattggtcacaagactagggaagtgctttcattatagaactatttaataaataagttccccagtttgaagagccagacttttatgtgaggtcaggccagttgaagacatttacaaagaattagttgtttgttattgctctgtgagttgcaagaatggaaaaaaaattctttcttcaatacttccttccaggctgagtcatcactagagagtgggaagggcagcagcagcagagaatccaaaccctaaagctgatatcacaaagtaccatttctccaagttgggggctcagaggggagtcatcatgagcgatgttaccattgtgaaagaaggttgggttcagaagaggggtaagtgctccgcaaaccaaaaataatacggttggtaagagtgctagcagtgagtggtgtcttagaagttgatcttttttctgatactgttaaactgtgtcatgctatgtctagtaagagagaaatgatatatttaacgtgtgttaggaatttgcttgttattaagggatttttttgtaattcttgattttgagcatttataatctagttaagttaggtttgactttctggtatgttgtgtgtagcgtgttacagaaagtgttgtatttttctgtggtgtctacaggttctgtaatctggagagatatctttagaatcatttaatatatgtaaaagtacgatcctatatgcatttaatcacatgtaaatatataaataagagaattaagccagtttgaatggttgtaggggaatggcttaaagtagaaaaggggaaagggttcacccgcaaactcatggattaatcccataaatttggtaagtaaagtcctgacgtaaaaggccaaatgaggacaaggattttttgtgtgtgtatgttta

SEQ ID NO: 3201 - DNA, 6000 bp, Homo sapiens
tggaaatttactgttgttatttcactgctagctgttgcatgggaaagtccaatccccacagagctgattcagaaacaactagaaatgcacaccacctcaggaagttaacattacatactaaaatgaggctgtaggattataatatgtattaatttatcacataccacgattctcctgcacagccaggaataataattgtgtatgcttgttgctttggaattagaacatgaattctagctcgatgctccacaagcagttatttattagtggtcagtaactttttgtgacccaagtgtcctgaaatattaaatgtaatgtccagagattgcttaagttgctaacagatttagccgtctgacaatgagaatatgaacaaaaaaaattcattcatactctaataacatagcaaaaaaataaaacctgagaacaaaataagagggaggtttccacagggctttaagtaacccagattcacacagcaccagattagtgatatatctggcccttggctatgctcatatgttcttgtacaggcacctggcctgtgccttaagaaagacatcaggactttgggaggctgaggtgggcggatcacgaggtcaggagatcgagaccatcctggccaacatggggaaaccccatctctactaaaaatacaaaaattagctgggcgtggtggcaggcgcctgtaatcccagctactcgggaggctgaagcaggagaatcacttgaacccgagaggtggagttgcagtgagccgagatcatgccactgcactccagcctggtgacagagccagactctgtctaaaaaaaaaaaaaaaaacagaaaaacagacagacagacagacagacatcagggaaagggagaaaaagacaattagtactgataactattgtaatgaactgtgtgccttagtcagtttgggatgctgtaagaaaaatatcacagattgggaggcttaaccaacagaaatttaagctatactcctttagaaattgttctattaatcatctagaatatattcactaattacagctgtagacttaacgtggttatttcagaaccaactgtggcagagagtgccaatatagatttttgtatttgtttgtagcagctattgttagtttaacataaatatattcacatttatggtaaaggaatcttagcttgctgaccactcactgtgttttagatactaatatttcataaaatttaattcacataagttgttgaagtagttgtaactgccatttcacaaataaggaaatataaggcttagaaaaattaagtaacttgcctgagatgagacaaactctgcagagagaggatttgaactctggtctgcaagtctccaaagcacttttatgttctttccaataaatcacgttacatcccaagaggaaaatactatataaactgtacatagtacacagatttattagagccgtcattagaacattagaacatgtatttcttccacaaacaggtattctgtgtctgctttgttccatgccctctcctaggatgacacaccctttctattaagacagaagagcagtaacttaatttttgttatgtgatgccctggtctgaatttttgtgtttccccaaattcatagattgaaatcctaacttccaaagtgtgttagtagatggggcctttgggaggtgattaagtcatgagggtttgagccctcaagaatgggattagtgcccttataaaagaggctcaagatggctgggaacattaactcatgctggtagtctcagctactcaggaggctgaggcaggagggttgcctgagcctaggagttccaggctacagtgagctatgatcatgccactgcactccagtctgggtgacagaatgagacactgtctctaaaaaaaaaaaaaaaaaaaaaaaaaaaaaaaaaaaaaaaaacaaagaaaaagaaaaagaggtccaagagagttccctcactctttctaaaatgtgaagacacagcaagaagtcaccacctacaaaccaggaaacggaaccctctttagacaccaaatctgctggtgccatgatcttggacttcccagcctccagaactgttagaaataaatttctgttctttataagctacctagttgatggtattttgttatagcagcctgaatggactaagacattagatgctctgaaattctaaatatccttccagttttagttactcccaagaaatgggggaagtaccaagaaatagctcagtatcaaacttagtcattggtagtaaagaagaatgaacatttttcttaaaatgaataaataactaatactgagaaatgttaatcttaagaatatttggtgtaataaagaatgaaggctttctttgcaaaatttaggagggacattcccagggatgaacatgctggctgcactccatattactggatgtgataacaaaatagagaagaaatctgccacacactctgtatggagtaccgacataccacaatcggcagattctaccaaattcataccggcatagtctaagagaaagaacaacgttatttaaataaataatatccctaatcaatagtaattcaataacaaaatcaaacatgcttttattatggaaacttatgaaactactatagtccacaagcaaaaattgaacagaaataaaaacttataattcttcaaatacatgaagccgagagtatataatccattctcacatactgaattttagggtttaatccacctaagatttaatgcaatctgaccagactgggagaaatattttgaggtagtatggctcataagacacattcagttcttgtaaatatattgatgttaaatttgggaacaaatgaacatctcactgataagagatatctagtaattcagtaattccggatactctgactctcaaaagttaagtatttaaagtttcagacactctttttagtgctggtgtcataagggactattttcttaaaaataaaaagcaagttggggtactatggaataaaaatatgacctatttttgtgttttacagcaagaaacctgtaacccaataattttaccaatagtgactgtgagaggtctgataattatgggaatacattatgtatattttatagatacaacgaaaataggacaaagtctgtttattcatcagctcatagcatgctgggaaatatgggaaaaggggaaaggcatggtgcaggactttctctcagacggactgtgttatcttaaaatggcaaattttgctccagggtggtcagggagacaagtttcccttacaaacggagaaaactgacttttttaaaaaacccttttatttggtttcctactcctgtccacaatcccaacagatgcacagttcataaaagatgtgaacctggaagtataaatattaataccacacagtacataaataccagggggctacagtataagaaaatgactaccataagagagttgtcaagacatagaaaagcagagaatgaagtgcatgtcaggaggaggaactcttctgcagaaagaagccacagacattaacaaaaatgttgcagtgggagaaagtaacaggtacatcaacaaggctagagccacgtggcgggataatagggatgctgcccaggtgtttccagaagcgataaaacttgtaaacttttataattttctgaagtgcgctgcatggtaaaatatggtcattgtgcaaaaaagttgtccccaatgcagtctcaggagtcactgacttcaaaataaagaaacggtctcttcgtagtaaatgtagtacctcgtggctttcccaaagtcattgaaaacgaatatccctaaaaagggtgtgatttcaagagtgaattacgatccgcccgcaatctgtgtaccgtgtgtggacgaatgcttgcagcgagcggtgcggaaggctgttcagagaggtgtttttggtctgccgtggtctcctgggatagtcaggaatgattcttgctacgggctgacccgggttccctcttccccgaggtgcagggggtggggtcggcttctggactgctccgcgctctccggtccctacctcattgggcaccgcccacttcgtgggcttccaggtgcgagccctcgcgccgggcccatctccccaaggggccgcggcggactggaggagacgcccggggcctggcggcgcgcgcgtccgcggccagggcgggtgggcggatgcgccgaggaagcggctgggcgaggagcctccgctcccgggcctcgggtgcccgccaagggccacgcgggcgagggggaaacccagaacttcccgcccgggagcgactgcccccgctcccggctctggctggctagggggatgttctcgcgagaggagagggggcgcggggcaccgctggtttgggggcgcggggaagcctgaggacgagggccgggcagggaggggagcagaggcggcgggcagggccggggacgcggggaagccgctcccgccagtcgccgagagccagcccctgacgtcaggagttttcctcaaagtcaacaacaagccccgcggcgacggcgagaaccgatcggcggcggccccgagcgggaggaaggagggggcggggaggcggcggggggtcccctcagcgaggcgcagcccgggaggaggccgcagaacccctccccgcgccgggcgcgccccggggcccagagccgccgccccgccggcgtgacccggcccccgcccgagcggtgttttctggtgatgaatttgtagccgatatccgattcccatgtagagtctccgcctcctcctctccccgccgccgccctctctcctccctccccctcccgccgccgccgccgccgccgccgcctcccgctccagctccgcggcccggcccggccggctccctccctccctcccctgcagcccttcgcttgccctcccgccggccgcaccgggctccaggaggccagaggctctgtggggtggggggaggacaggaggggaggaggagggaggggggacccccgagtcgccccctctcctccccccgcccccccccggctccatcctccgccgccgcccgagcagctgcggggccgccaccgccgccgccgccgttgcaggtaacagccaccgcccccaactctagccccctccccgcctggcctccactccctccgggccccgggccccggtccgccctccctgcctccctcaggcgggggatggcggcggggtggggtgaggcgggggcttctgggttgtcaccgcgccgggggcgtgggcgggggctgggtcaccggaggcttcgggtgtgggtgtggaggccgggggatgcccagcgcggttgacaccgacaccccccgctttccggggaaagctggggggcggcggtgcgcagcgggccgggggaggggtgttcccggcctagcggtaccgtctgtgtctgggctgccccggcccggcgcctgctgtctgcgcaactctcgctccttcccctcgcccctccccgcccgggccgcgcggcgtggggagggggcgcccgcctggaccgggggcggcggcgaggttatataacgcgtggagcgccggtgtcagtgtgtttgggttggggggagggagccgtctgccgcgcgccctggcgctgaggctgtctgcgcgtggggtggggtgaaggcgaggatgcacaggcgtccccggggtctccttccttcccccacccttccccgccactggcgcgcaggaaaagacggcactggtggggtgggggggggggtgtgtgtgtgggaggtgggtaacgtgcttgtctgtgtttttaatagtagtggggttttgatccgcttgggagttgtgtgctaagaatagaaatgtgcggaagatgctgggtttggctgatccagtgatgctgtcgctgctggcggcggcggcagctctggctgcaagtaaacagaccagcctcttccttgtccacctcctccggcgcatcggtccgcatcagccatgatgccggtggggcc

SEQ ID NO: 3202 - DNA, 6000 bp, Homo sapiens
ttatttaactttcaaagatcctgttttaaaataaggtcacattcacaggtatcaggggttaggacttaaatctttttggggggacacatttcaacccacaatagaagggaactgcaggtttttagcctttgttctttgtcacaaaagacataaaaaattttattttttacaaatcctggaggctgcaaattttaagaaaaaaacagtttcaaagttatgtgaagcagagaggtattttaccataattttaaaatgcattctaaataattttaaaaatccacaaatttgaaaatgttattagcattattaaattttattttgaacttttaacatgtgagtaaaacatgctaataggactgatgaagacgtacagagacagaaccccgatagggtggcagttgtggggatcactgtgcagacatgcaagcggaagtaaaaagaattctttgagcccccaaagattaggaattggcagtaatgcttttagcacctccatatcctatcagtcattttaaacatctaagattcccattgcagaaacatggcacatagagtcaggaaacaaaggttatatagatatttgcaacctgtaactgtcctaggatcgatcacaagaaattcagtaggtgcctcacataactaagcactgatcattgatactaagaccagatatgtgatctaaattagcaaagacacactccatgctgctttgaaaataatcaccatagatgttatgctttttcttgatcatctctttcagcaacaccaaattgctctatcacccttcaattcagatctccacagtaacaagtttttaaagcaatttgcagcatttcactttctgtgggccaaaccctgcctggacagtcccttttataatcatgactttctcatggagctaaacaggtgaggatcagccccaggatactagaatctggaacaaatggatttatagccactctaaaattgcaggtaggctctgtcactcccactaatatctacaagtcattgcaaatggaaaggacagcaggactggccaaatctatctttggctttctaaagtcagtctcactgtgcactgctctctaccagagtaagactcaagaataaatgattttagtgaatgagtttttaaaaataaattaatgaattaacaatttaaaaagagtaagtgagcagccatttttttctgccattcatctgagctcctgtgaaatagttccaagcaagattctgcccagttaagaggaggaagagacctcagaggttgtctggacaggccaggtgtggtggttgacaccggtaatcccagcactttggaaggccgaggtgggaggatcacctgaggtcaggagttcgagaccagcctggccaacatagtgaaaccctgtctctacaaaaatataaaaattagctgggcatgacggcaggtgcctgcaatcctggctcctggggaggctgaggtgggagaattgttcgaacccgggaggtggagcttgcagtgatctgagatccagccattgcacgccagcctgggcgacagagcgagactccgtctcaaaaacaaaaacaagaacaaaaacaaaacaaaacaaaacaaaagaaacagaaaagacattatctggacaggggcagaaaatacttaagacttgtgaactaagcctcccaagtcagtgcccatcacattgattggccaagctgcactaggagactctccacaggagagcatgtagagcacatgctaaggttctctatcctagagtagacccctgccagctggaactagcatttaagtttctcagcaattaacagtcacccttgctttctttccaggacgctctttccaaatgccctgactgtgctctgcacagatcactgagtctgctttttcctctgggtgacagattcctccaggcagggaccttctcatagtaaccccttaattcagtatctgatgcatactaaatgctcagtaaatttttgctcaatgaaaaaagaaaaacactatttccagaaaagacagtatatgaggcctgcctttccaatttgagtataaattcattgtattagagtttaatcaaagtagttagttcacagattactaagacagtgagatgtgatttgtgtgcttatgttttcatagggacagcaggaggggtggagttaaagtttagggatctattttggaaaattacaggtttgatggcaaactcttaattgccagcagaataggacgaggggttggagttggggtgcatgagcactagggggcactggggccctggaagcaagcatttctccactttcataaatgacttaggctgtctctactgttgctcttctcagcaggtcgggcccgtttaagggtagcctaaggtatacctctcatgtgctaattaccaacaacaatggcaatctctttttagaggtgaagctagtagaagttcctaagtggagaaagcattcctgctaccatgcagcggaggcgcggaaggcagactcgtcacctgtctggcttgcttccctctcgtcatcctgtccctgcagcaggcagcagctgtgttccagttttgccctcatggcctctgagatacttaactccaacctatctggttcttttttctccccacactctccaccatcatagcagagactcaacgtgtgatccaagtttagtgccttttttccatgccaagcaaagtgaagtcatttggccttggatgaggtgtctggtacacagctagaggtagcatggagcaaatgaggtttaagattcagggaccctcacttgaggattcttctgaggctctgggagggtgctcagcaatgttgcatttcttatcgtgtaaagttcttcatacatgtgtagacagacatacatagacacacgttctataaactttggcccccaggccaggatccatccctggtctcgcataaaagctcttcttggactaacacactgtgaggcagcctgacctggcctagaaaattccattctccaaatccaatcccttaggctcttcccaggccccaccatcaacagccctccgtgtctccccatctgtttatcagagattacaactcctctctgatcttgctgagcttttcttgaccggaatctggggttgtgccgataagagcttcgtgtctgccttggcttgcctcttcgttttttctaagacttcctttgtctagttttttgtttttttgccatggagaatctgcatttctctcctgtttttaaaggcacatgtcatgatacaaaatacaattccatttggtagtaaaaatcacagaactactgaaaggtttgttttgttttgttttgttttgtttgaagcaaggtttcattctgtcacccaggctggagtgcagtggtgcaaccctagctcactgcagccttgaccttttggactcaagcaatcctcctgcctcagcctcctgagtagctaggactacagaggcacaccaccatgcctggctagatttgtgcgtgtgtgtatttttttgtagaggtaggatctcactatgttgcccaggttggtctcgagctcctggcctcaagcaatcctcccaccttggcctcccaaagtgctgggattacaggcgccagccagggggccagacctgaaagtcttaatgtaaaactaggcagcaggattcaaggtcagcctggttgagacagattcctgagcatttgtacctccctttgaaatgataatttggattaaacttcagattactagttaccgtcagttactcgatgagtccatcttcatctgggcatctctccttccactgggtggtattagggaagcagctcttatgacatcatctcagagaaggcttctctaagttcatcaaaggagcaagctctttcctaccccaaggcatttgaactcacttttccctcagcccaaagtactcttattccacactcatgagtgggctggttccttctcatccatcacaacacactattaaacatcactctggctgggtgcggtggcttacctctgtaatgtcagcattttgggaggccgaggcaggcagatcacgaggtcaggagttcgagaccagcctggccaacatggtgaaaccccatctctactaaaaatacaaaaattagcagggcgtggtggtgcacacctgtaatcccagttactctggaggctgaggcaggagaatcgcttgaacccaggaggcggaggttgcagtgagccgagatcgcactgctgcactccagcctgggcgacagagtgaaactctgtctaaaaataaataaataaataaataaacgtcactcttttgagtggtcttccctgtctacggtaaatttgctgtcattgtctcaggcacatttgtttccttcccagactacataattatataggtatttgtttgtttacttctctttttttctgagtcttcctttataccgtaagctccatgaaggcaagaattgaggccatcttttcctgcattgtgtccgcagcacacacaccacagtctctagcacagcatacgggctctccgtcgatgtctgcggaagggctgctattgccatgacaacaggccagatcatttcacttgtcctggcttttttcataatccagacaacagaggcgtagcacatttgtcccaggctcgtaacagcgctctccctaaatagtcagaaacaagggaacttagctattatcagagtctctttccgagttcaggagtttttctttgcgaggttcctggtgttagtgtggcatctccaaggcctctgttttctctcctacacacaccttccccaacaagctggcctgcgtactgactcagcaagggcaggccagggcagatgcacagcgttccgactgaatggtctcaccaagttccaccgagggctccctccactacctgagacagtggagttcccagagacgcaggcgttatttacataactctcccctgcagaggagacaagcagccgaggtttgcttcaacaccaaggacagctcttctgaaacggaggcaaggaaacggactcggccctgtgccccactccctcctctgttagggttctgggcccctcttcctctgtcatagcctcagaggttcagagggccactagaaggttatactgggttcaaggccaggtttcactcagccctgagctcaggggctctcccttggaatgctgtatctccgacttatacctgaggacacggagaatggagtataggcggggcctagggggatggggtggaggaggggaatcccagcttcttccatcaggaatttacagtctggtccagtctgggttagtcttggcaaaatattaacttggaagttatttgttccggctgccttttccttctgttcattcctacagaatggggtgtttacgtgaatgctggctcagatatctcagaagctagagcttgcgtctaagattaatgggaaaaaagtagggtcctcatatgtcttgggaagctcgaggaccccactcctctattagccattaagggtatggacatcctcagagacttgaatcaaaacatggcttggaaccacagactgttccccttggaactttccccatgaggcagtcatgacatggttagtggctctgaggccagtgcaactctgcagtccatttgccttgagagagcaatagagacagttcagaggaggtgaactctcacacccctgcctattgtagctggcaggaaaaacttccagcaaagggtcacactgggcagaatgaactgtttcttaggagttttgccactgcagacagagtgctgcaacccaagggagccggcagatccgtgagtgctgggcagtgcagacaacgactgcaaaagaggccttgctcagatgacaacactgtgctgtgttgtacttggattttggcatccattgattgattgagaagatatacagtgacaaaaagatgctatgaattcagtaatgcttttaaatggatctctatctcattagatacag

SEQ ID NO: 3203 - DNA, 6000 bp, Homo sapiens
ttgagcccaggaattagaggctgcagtgctttatgatcatacctgtgaagagccactgcactccagcctgggaattagcgagaaaccgcctcttaaaaaagtttcactggctgggcccggtggctcacgcctgtaatcccagcactttgggaggccaagacgggcggatcatgaggtcaggagattgagaccatcctggctaacatggtgaaaccccatctctactaaaaatacaaaaaattagctgggcatggtggcggatgcctgtagtcctagctacccgggaggctgaggcaggagaatggcgagaacccgggaggtggagcttgcagtaagccaagatggtgccactgaactccagcctgggtgacagagcgagactgtctcaaaaaaaaaaaaaagtttcatcatcattgctgatggtaactttcctgaaaacactaatatttgtgccaaagatgctatctcttaattcttccaaggaagtgagctttaggtgctcaggtcaatgaataaatgaatagaatggttagtcagggtcccagcaagaaagaaaatctaactcagatatctcaagagagtataaccaaaagactatttacagcagcatggccaggttagggccaccaaaaagtgaggaacccagaaattaacttcagtaggcagccttttccaccctagatctgaggaagcaaaggcagaaaataatgttaccatagcccactaagtgctagggccagggtgggagtcacataagagaaacatgtaatgatccaggaggtcagatgctcctcattgactgtgaattttattaggaaaacagcatcatttgtaggttgcaggtttaaagtttttactacatcctatagagcagcagtgcaaccttacagaatattatctccctgctgccaccttaactgagtgggcaatgggccatcccattgtctatcatactagctgcttcctgaagtggggtctggtgacaacaccagtgaagtccaagggcatgcctgagcccacagccacacttctgctgtaaaataagttccttggtagaaggtgatattatatagattgtaacagagaaggttggaaaagggtcttgggtcaaatggaaaaaatagtgcaatgaccttcttctcagccccagctatcctgtcccacgggccctcagacagagttgcttgtgtcaggctgcaagcctaaagtagctactccagctcttgaccctgacccctctaatcatagggctaaaaccccacccaagtggtcaaaatgacatttcagctaccttttccacagaatttacttctaacccttctctcaaatccccaagccttcacccaaataattaaacaacgaaatgaactcctctttaaaccaggcatggtataatgtgcctgtagtcccagccacttgggaggctaaggaaagaggatcttttgagcccaggagtttgagtccagcctgggaaacatagtgaaaccctatctctaacgacaacaacaacaacaacaaaaagtaatctcttccttgactgcataccaaagctcctgtgcatatcaaccgaggcaaggagaagcagtacctggagagggtgggggttgtttcggaacctcagctcagccaggggcaatggagctgggggcggaggtggcaatgctgtatgacttctctcactaccaactcctaaactctagccacagacgcctgttacacttggacccaagcagtcctacataagccatgagtcacagtgctcatgttggtacctgttcacagaatgtgagttctgcaagcagcatttctcttatcttcattactgatgccgaaggatggagaaaagtcaaaggcctgaatctgtttttttctctcatctgttgtctatctctggggctgcccactgtaggcatgttactgacagcaacatgggatgggccttctccatcacatctccaagtggtttcgccatttcaatttcttcctacatactgggcttgctcattgctcatcccaaacttcaggtattaagaatattgccatagacattcctttatgaggtgatcatatatttggatatggtaaaaataattaatactagaagatggatccacagggaaaagggcagtcagttatgtctgaaacctaagaaaggatttggctgtgttttccagggatgtaaggataatagtatatagaagagaacacctaggccaaattgttggttagaacacctaggccatctccttggttcatttttttagtgtcttgctatctgtcctgaatcttggaaccactgctctaaaagaggtctgaaaaattttgccttcaaggctcacctttacataaaattcactatggctgaaacgaaactcatattccttcttgtttctgtcttgggttttctctcagattggtagtgccgaggcttgaaacattagagaaatgttcgatgtttttctttcccttttctttcccctcttcttcactaagcatgggacagttattcattgtgtcttttaagtacatctctttattgccagcccccatgtggggatgtcttggcagttgtgtatgttggcctgaacctcaggagaaaaatctcagccagagatgtaaattcgggaggccgaggcagggggattgcttgagcccagcagtttgagaccagcaacatagcaagaccccatctctaaaaaaatgttttaaaaattagttaggcgtggtgatgcatgcctgcagttccagctactcaaaggctgaggtaggaggattacttcttgagctcagaagttagagaccaccctgggcagcatagcaatatcccatctcttaaaaaaaaagaaaagaaaagaaaagaaaaagaaagagaggaaatggccaagagatggaggaaatccaagagaaaatgatattgccaaagtacgtcaacagtattacaggttgcaagagatagccctggatttattgatgaagtttttgtttttgtatttatcttggtgtgaatagcacagtgcaatggttctcacactttttggttgtacaaattatagtatactcttaaaaatcattgaggacctgaaagagcttttgattgtaagaaccccaaagagattacatctcttatttatcctactagaaattaaaactgagaaaatttcaaacatgttaatttacttaaaaacaataataaacctattaccagttaatagaaatgtttatgaaaataactactttaaaacagaacaaaattgagaacagtggcaatgttttacattttaggaaatccctttaatatctggcttaatatcatagaaaaccagtaagttcacatatcttgttctgccttcaatctgttttgctattacatgttattaatatatagcctctggaaaactccattatattatcatcagagaatgtgcatgaaaaaataacatattaactatgaaaatagtttgatcttgcaacccccctgaaaggttttcagggatttctagggatctcgggaccccagggcaggagagcttgacaatactgtgaacctcataaataagatctttttgtcataatgaaaagtaagctagatagacttgactgaagtttcaagggctatctgatgagaagtggaggttgtttcattgacattattctctaaggttaggaatggactctacaacattcattcaattaattcattcagcatacatttatttagcacatattatgtgccatgaagtactctagatactgaagacataccagtagacaaaacaaaatatccttgccttcatgagacttctaataaagtagtaaaatatatagtgtatcagagagtggttaaatcctatgcagaaaaacaatgtaaagaggtctagagaatgctggagggatttgcatatttcagtagaatggacagggaaggcctctttaagaatgcaacatttgagcgaagacctgaaggaggagaagccattgggatatcttttgaaagggcttttccagctatttaacaaattaatttcttaacatttgaaattttatttatatgtagtctttaatcaaatatccattgtatatgacattagctgcaggtataaggaaataagacaagagaactgaggtttattgagtgcctgccatgtaccaggcactgtgctaagtattatgaatgaggtttggtaccttcactaagatttacaacttaatgcaggaggcaaggtgtagacatacacttcctgcagtatgggtgtagcagttcttatgaggaaggagagttgacttgaagttgcaccgccagaagtaatgcacctgacctacctgaagtctacgcctccctttcaagatgaattagggtgcagagggtgctctccactataacagaggggaagccagcaagataatacctgatcacaccttttatagagcactttggttaacaacatgtcttcacaaattaactcacttaaccttcataacaataagaagcagatgttctaagaagtgttactgtgtctctcagagatggagaaaggctaagaaagctgggtagtatgacaaggcagttataaggtagagctggacctaaatttaagataatctgcttcaagcacagtgcttttcccaccgcagtgcagctgttatgagcagctgccgaaataaaacagcttgatattctcctgactgagtcctcccactgactcaaaaggagggttaggttgaggctggggcggagctagacctcaagaagaagccaacaaagtcacacacagcgctccccacctgcgcttgcgcaggggaggaacacgcagtccggaaaaacgccggggattctgggtcgcgcagccgtggagctacctcaaggcggaactggggagtccagggcttcggcagcctgaacacccggtgtgaaaggaaggtggcagacgtggagcggcgcgcatgcgcagcagctcactctgctgaagggctgagaggcgcacccgggcggccagctgggctcggagcggaacggggtcaggatggacgaggacgtgctaaccaccctgaagatcctcatcatcggcgagagtggggtgggcaagtccaggtgaggcggaggtgcgggtcgtgacgagggtggctgggctctttctgccccggtggctgctgtctcctgggccgcgacgggaactgtaaactgcagcggcgggctcgggccggctccgctcgcgccctcctcggcctctgggccgcgctctcccgcgacgtttgctttcctctccccacccgcgcctgcctggttcccggcctttgccaggcccaagttctctgggtcgctctccctcctgtagcgccgagaaaacaccattccgagggccgccgctcggccggcaggtttgctgcgcggagctcagggcgtggcgggctggtttgggcccgaatccggccgggggcgccttgcctcgaacctctcggggttcaggctgcctgccaccccgagacccgggagacatagctttcccacttgagggtttctgtggggccttctctaaatacataatgtcctcgggaagtttcgtgacgccttaggtcccattcctggcctgtttgggcgcagcttaatgtcgattcttttacttttttattagtcggctgtgaaagaactggatcttgtgactgctggaaaatttcgctttagtgtaaggtccgagtgcttcagccgtgggccacctttgaaaataaaatgtaattgttatttctcattttgccacatcctgtggagacagaagattagtgttgtgctttcattttttactttttccttggggaaaataatattgacagtggagttgagtataaggtaagacatggatctaggtggatgttgctagagggctgtgatttcatccaggtcttggaagagagttctccagctgatgtcattcttgccatctgattatgagtaggttatgttcaaggccgtcctgatccttaaaccacatttgcactccaggggct

SEQ ID NO: 3204 - DNA, 6000 bp, Homo sapiens
gtgtcatcacattcactgatgttttcttctgcagcgcctaatttgctgttaatcccatccagtgtatttttcatctcagacattgccatttttacctttttttttttttttttttgagacagggtcttgctctgttatccaggctgggctgcagtagcacaaccacggcacatttcagcctcgacctttcaggctcgatccatccttgtacctcagcctcctgagaagctgggactacaggcgcaagccaccatgcctggctaattttaaaagtttatttttggctgggtgcggtggctcacgcctataatcgcagcactttgggaggccgaggcgggcggatcacgaggtcaggagattgagaccatactggctaacacggtgaaacctcgtctttactaaaaatacaaaaaattagccgggcgtggtggcaggcgcctgtagtcccagcagcttgggaggctgaggcagcagaatggcatgaacctgggaagcagagcttgcagtgagccaagatcactgccactgcactccagcctggccaacagagcaagactccgtctcaaaaaaaaaataaaaataaaaatttatttttgtcaagacgaagtctcgctgttttgctggggctggtcttaaactcctggcctcaagcgatcctcccaccttagcctctcaaagtgttggaattacaggcgtgagccactgtgcccagcccattttcatctttagaaagttctgtttgatccttttttatgtcactcatgtctactttttgaacatgtggtgtacagttgtaacatctgtgtcagttctgagtcagtttctattgattgatttttctcctcttcaacaagatgtgtgcttctgcttccattaatatcttctggtctcccattcacatatatctactgttgagttcatattttctttggcctttttcatgaaggttattttagttaaaactagataatatagttaatggagcctttgaaataagcagtaagtgcaacatgaaaatttaccagtgtgcctaaaaaaagattcttgcaaagaaactgaattaaagatcatattaaaaatgcaaacacaaatgaacaaggaaaagctgagatgacagttcttctgtttctgttgtgagctccatgttatccacatgaagagattgaagacacagtttaatcaaattgggtaagaaactggcaaaatcaaatctctcaaaaagactcccactgctgctaccaattaagataaattatcagccacttaacaaaagagaagcatgatgaagaagcagttttagcatgtgagatctgaagagctcaattgctgcatgtgagattcaccagaggaacctagggaagatgactggggactttaggggtctggatttagattaggtgccccttcaggctacctgtgtctgttggctttgatggcaggacgacagtgttcagtgtctcctgtggatgggtattggtaagtttcagatataatatgtcaaaagcataacttagagacattgttagttatccacatgcaaattattcttatgtcagagacagtcattagactgttcacaacaaacttgcagaaccaggaaataataatagagaaagaggagttggggtatgggaagaaaacacatacattctggaagcggtgggtttcttttcttgggtaaacaaattagctcataggaaagatgcttgtctgctcttgaacatgtatctgggattattaaggaaaaaaattagttctttatatactccctgaaaaaccttgagaatttaactgtagagtgtgcatgacagaggctatctctgtgtagtgtctgccagtggctgtcatttagtacctgcaccaagtcagaaccattttcctcctctgaattttctcagggtttgtgctttgcttttttttttttaaagcaataggaagaaaatgtagataatttcatgttgtttatgtagatggttccacttttaaaatggcatagtaacttctttatttagacctggttaatacaagattatttagcatgtgggattttttgtttgtttggctgtgaagaaattttatatttaggtttttgttgggctatgtaatcaacactgtccttttactaatggttgcccatcattctaggctttatcaactcctttatcaccccagctcaaaacaccaaacttaaaaatatatatatttggtatacagaaagacctggcataatgcacattttgaatgtgcatttttattactgaatttgtatatgtaatggatcaccacaagtcttccaagaattacaaatatatttccatattggtgacaggtgttctattaagcatttagtatgtgagggtgctgttcatcttagttggggctgttctgaattaattgtgacaagctaataagatattttgaaagtttctttccaagcttcttgagctaatgttttccctctggccagtggggtagactgaactcttgaaagacatgtgggcagttgctgttcatttaagccagatggcatgtgtcaactccttttcctggaaagggagaggtttcttttttggctgctgtaataaagccttgtggacttcttatgaaactcttttctttacataaattagtacttatagaagcttttcatagaactttgggcactcctctttcacttatgaagattcttagatggttgtatataaatgttttcatgtataaattgttttattgaaattgtgctgtagcaagttattgattaggttattacataaaaatagtatttttttaggataaaaataaagagattatatgacaaggagtgagtggccctttaatatttttaccggttccccaagctgcttacagtcaagatctgagttagtggttggctggcagtggacagcactcttaacagtagcatgtggatgcttagggagcccctggaagctgccatgacccacagtcagccatggatagtcttctttatgtgagcattgtaattgcagctcttgacttttaacacgcatagtgagttatcaccttaaattgaatttcgtttttcctttttggaagaatagaaggtaggtgagtgagtgaattctacaagcatttgattttcatttatcctgattaaatcctaagatcctggattttaatgacactttttatctccacatccagaattctaagaagttggggtgtgaattgggcatttgataatagtgacttttctgttttctggttttcttggtaatggattttaaaagtctgttttactgggagacttatcaaaattttcatttctttaaggtgttgactttaaggtgaaaacaatttcagtggatggaaataaggctaaacttgcaatatgggtaagagtttttaaaatgtatttttaaaatattaaactttactttttaaggatgcagaaattgatttgtgtagtgttctagaggtggtgaatgaacaatttgtattaaataacttttgggagatttgatactgattaaaggataaacagtaatgtcttataattgggtaattaggcagctatgttttgtttaaattttcacaatgcataattctttatgaatatttcaaaacagaacagaatattaaaaaatcatctcatctgccaaagagaatcataattggatatgtttctttgaagttttaaaaagaccatctagactgaactaacactaaagacaatttttaaggggaggaggaatgacgtgatatttaggaaaaaattttatttttcttgtttgttagtatagatatttataaaatttgaggtttcaaactttgggcttatttttaatgcctcgtttttccttactggcttcttttcgttttcctgtcaatccaaccattctgatccccgttactgtactagctagaccgctcatgctagtgtcaaataaggtagcattaactgtcaaaaatatccaagatgcttagtgtctatgtttgtctctctctgtgtctccctttcatcagtctatttacccacccacataccgatctatctatatctgtctatctaaatatgatcggttatatatatatatgtatattctaaatatatactgttttatatatctatttttcacatagactgtgataattatacatatatgtttgtaatataagaaatcatattagaactgatcagtcatcaaatcgagacttatttccacatggtggttaaatggtaaatgctgtttgtacatcagtcacagattgaaaacagcaagtgttcatgcattgtatgatgtcatatttcttggcattctctgaatggcacactgtttctaatacacatttatccccaaataacaaataattgtgtaagtgtgtttaatgtttttatgtcagtttttcctaacatacaatactttaaatttgttaacctgtttgcccctttcccccaaatatgtttaatatcaatcagaacggtaatgtctaacagaaaacaatttggaaaatgttggactagagtatggtaaaatgtgttgaacgatataagaatgttggctttttccatactaaagtgggggcctgatttccatatgcttttcatggttaatttattatccctttccggccttgctgctgctttgtgaaatccgtagattagagtagtatctgagacttgctggttgcagtgagatttttctctcatagtttcgttttgttttaaatttattttctagttcctgcctaataaaaaggctggcaggtattattgaagagacatttttaccataggcctataaacattttttaaagaagagaggttttccccctggctgtaagaataatacagggtcattctaaaagggataattgagacaataagaagagcagagaagaacatctataaaagtataccactgaatacattttagtgagcattctttaaaatatcaagggatatgtatacataccactatacataccagtatgtgagttttccaaaacaaagggattatattatatcttacatttttaaacctgtttgtcctcctttcctaccacctcacccccactcatagtatgtgctgtatccgtttagatggccagctagtattccgtttcatagctgtactttagtcagccttcagtgagagatacttacatttttgccagcttttcacaaagattacagctctttgagcatcctgatttatacgtctgtgtgtacttgtccagttactttagaatgtgtagctggaagtagaaatgaatatgaagtcttcacattaatgtacaccaaaaagccttttttttcagtttatactcccaccaattgtattcatattcattctgccacatccttatctctactgttatcattctttctgtttttgcctctgagtgttgctgttttacttatatttgcatttcttttgataagagatttttgcctgtttattgatcattttaaaaaataagttttctttttacatattttacccattttatacgttagcattcatctttttcttcattaaagtctttatataataaaattattagctctttgtcatgtggtacaattttctaagctatcatttgcctttaaaatcatgtatcagttgaatatatgtttgtgttcttgtgtgtgtgtgtaatactgccatatgctacagatttttttttccagtttgtcatttaccttccaatattgttaaggatgaatatggggatggggaggtgaagaggaggtaaagggtgttcttgtcatttcaaggttttaatatttatatggttggatcagctattttcatcatggcatttgggtgtaacgtatttaggaaggcgtttcctctgtattagaaatatatgaatccatagttgcctaattcttctatagttttatttataaaatgagtttctctcctacttggaagcttcttctaggatgaaatagaataattaagcatagccctgcccctcctacctcctgaaagtgcatactcatcatgacct

SEQ ID NO: 3205 - DNA, 6000 bp, Homo sapiens
gagccaatcccccaggagcctgggtggccgcagacattaatcaacccaccactcccgaatgtgtaattcaaggtcagataagtggtcctctgcggcaaataggactctggggacccaggtccctccagcactgagaaggcttctggttgcatggggagggctcaaagcctgtggccaagccaggatgcagaagacaggtgtgtgctctagcaagccagtctcgttgaccaccagccccacacagcacacaggtgcgtgctgtcacctgtgcaggtgggaagcccggactgtttgggtccagggccccctggctttctatgccaccctagcaccatccagtgactgcttgggcctcatggcctcagctcctacagctgacaggacagaggctgatgacagcggcagctcgtgctgatggccagcgtccctgggctaaggactctgtgcagactgactgtctgcatccccggggaacttggggagaaggagctctgccttcccactgaggcacggagactctgggtaacccgccaaggacatggggacaagagacagagcgcagacacactcagagccccctgcagccttcccaccatgctactgccccaggccacacctagacagccccctgtaggagagaaaaccctggcagaggggcaggaaacactgccactgtctgctgagcccactgatgcatcattgggctttaccctcaaggcagtgcccatgttattgctctcatgtcacagaggatgacaccgaggcccagagaggaccacagaagctgctgagtggtgtggctagcctggctctggtgctgagcgaaaaggatggagattcctccaagggaaggggaggagaagacgggcagaggggaaagaagaaaggagggcgagggaaggaaattcacaagagaacaaagtgtggggacatggaaaactgaagtgggcaaagtgataatgataggttagtgggagtaggtgggcaggctggtgggaggaggtgggctttctctgaaccccccagggtctctgatggatatgtaggcccctgttgcttttgttcgggcacccggctcctaatcaggccccagggaggatgcaaaaggggtcttctcccaggccaggttgagggctcttctgcaaacacccctgagggcacctgaggcccacaggcaggcaggacctgcacagttaggtaaagcctgtcctgcacagccacaccctgcaggcccaggccaggtgttctgtgagcatgctcatggaagcagcatatttggcatagggtgggctggctgagcagcccctctgagtgccctgagagctagctggtggtcactggcttcctcctcgcagctgccctggagggcaccaacagcaaggccagggaggcaaaccgtggggagcagtagacctgcccctcacctcaatagcccgatgggggagcagagggcagtggcagacagatgggaaactgaggcaccgaccactttgctaacagtgcacacagccagcctcagagtctgtgcttccaaccaccatgtcacactgcccatgggagggacctggacccctgcccacgcccactctgagaggcctcggtcagcagttccaggaatgccacccagccttccagtatcaccaggaccgagctgcgctcttgaatgtgtttccccctacctgcaagtcacgaggcacccccagagccagagtttcctgtcactgcactcagcctcactccaaccatgcttctcagtgcaggcagagacccccatgtcacctgggtcagaggacacagagcatcccgcccgcctcccgccaggcaaacctgcacaggcatggcccagatctctgtccatgatgggtttccctcctccctcccttccctgtgctgcgttttggtgctttggggtcagacctgaggtgctccaggtaatcttcacctgctcagaagcaatgaatgacctccaagttctcacatgctacaggaagatggtgtgagccgcctgcccactgagcatcttaccctgcactggggcagagccttgaaaataccatctcctcacagtcaccagggaaggacactgtttcagtccccatttgagagatgacaaaactgaagctgaggagtaatgtatgcaatgtcacacaactatgaatggcaaaattcaaactcaggtctaatcactccaagcagatgcctgcaccagaacctcttggggaatttttttttttttcttagagatagcgtctcactgtgctgcccaggctggtctcgaactcctggcctcaagtgatcttcttgccttggcctcccaaagtactgggattacaggtgtgagcccttagcctggcccctgaactttttttttaacatggatttttagggagtgggggacccaggatgtgtgtcttcataaaagctgccctgaagattctccaaggggacctgcgggcagggacaggaagcactgaccacactgtgatgtgccctcctccagctcccagagagcccgcgaccctcagcagggcagtgtggccagggtgcccgagcccaggcccaggaaggcccaatggctacaacttattaagggcttcctgtttgtcgggcactgggctctaccctcacatgcacccctctttctagtttcaccccttcttctgaaagggagatgtttatagctggggaaactgaggctcagagagatgactaaggggagtcaagaaagagaggcagagccccctgcaggccctccccaccccatggactgagagaagccagggccaggactcctgggcagccaaagaccggcacgtctgctttgcacttcacctggcccccacctccccttgtgagacctcagggggtggcctcgcttcccctctgctgggcaaggagctccttcctgctgcctgatgttctggatactgagcctacacccaggcagggctgaatctcctttccccgcagtccctgaggccagcaggctctgggcctcacaactgtcctctgctgagcgaccctttggtcagatccctgggcgtgcacgtagcagggaggtatgcatctgtgtgcgtgtgtgtccacgtatgggaacacaggtgtatgcatgtatgcatgtgtacagggtacacccatgtgagggccccccagacctttttccaaggagtaaatgacaccctctcatagtgtcaggtgttcactcaggacccccaagggtgagggtggagcgagagcgtggaaaggcctaaggtaggctaggcaggagcacagccccagatggccccttaagatggccacacagagcccagccagacatcaatgtcagccaagggctggccagggtggtccccgggaggtgcaggggtggggctatttaagcctacccacttctctcttcattcacctaggaggcaatcacaggagcttgtctgtagccaaaagatgcccccagcccctccctacctatcaggtcccttccctgggcacaggcctgagtgtgtagcctaggtagccactggcaccagagatggaacctgtctgaacccaagggagccccttgtggccaactctagctccataaactggaagggtgtggcaggcagccggagtccagtggcccacagtgtctctcctgggctggcaggcctgtgccccggccacctgcccctcagcaagccaggtctggacatcacggttggctgagtgcaagccagcctctgtcttggcagctccccctcctgcctgtgagggtgacttcactttgacttcatatctgcagtgatgtgcagatcacttattcagccctgagctcagccaggcaagagggcggggttctgcacacagcaagcaagggagcggctggctcaagggtgccctgggcccaggttccctggcttttcctcctcaagggcccatgggcttcccttcttccatccctctgcgcctaagtgcaggccagacctcaaaaagcagccggggatggggcgagaacagaggacttccccactgagcccacatccaacctcacccagaaccccttctcaggtccagttgctgctccctattaggggtaaatgtgtttatgcgcatcatttccatcatttctttgggggaaaattggattctttcctcctcctcgctactcgctctccgactctgccagcccatctcctgagagttctcctgtgtaagggatgcaagggccaccagcaccaggtctctgaaaggacgccggagccagtttccggtttccaagggttggaccagtgctggaggggggaatcacaaactgcccttccaggaccctaccctctctactaccccaggatgctgaaaaaggctattctgcctctcttcccctgctcagctcttccccgcctcctgcctccggccccagcagaggccgcgctcccactgcgcctctcgcctctgagaaatggcgcagcaagcgctccgcggagagcctggaggcggggcgcccttctctgagtccgcggggtcgcaccccgagccagtcggccagacctgcatcccgcgtagcatccctgccctctctgtgcagcggaaagggcaaaaggcagggactgcaagcgggcgcgcaccgggtaggaagagcggctctgcgtaggtgcgcggacccgggctcctgggttccatccccgccgcgcacctcggggtccgcacccggctcctgccgggcccttttcggccgcaccccgctcccgcaccccgctcctccccaagccccacccggcccaagccgcgcgtcccgcactgagctcctacacgcgccgcgccccggccgcaccccgcgcagccagagcaagcactggagccccgccccttcccgcaccccacccgcctccggccccgcctggcccacccctggaccgcccccgccccgccccgcccctacccgctcctccggcgcagccggcgcttacctcgcttcagtcccgcgaccgaagcagggcgcgcagcagcgctgagtgccccggaacgtgcgtcgcgcccccagtgtccgtcgcgtccgccgcgccccgggcggggatggggcggccagactgagcgccgcacccgccatccagacccgccggccctagccgcagtccctccagccgtggccccagcgcgcacgggcgatggcgaaggcgacgtccggtgccgcggggctgcgtctgctgttgctgctgctgctgccgctgctaggcaaaggtgagttctgccggccgccggctcccgcaggggccagggcgaagttggcgccgagcagcggagcgggcgcgttcagaagcgcctttctgtttgccgtgggcagcgggctgtgcggtcgccggccacccggcctcggctgggagcgcagtggctgcggcgggcggcgggcgaagggcaggacgcctcgggccgggcgcctcgggccggggctgggcgggtctcgggcgggagcggagcgcgggccgggccgcgggggtcggtgctcagaaccctagccatagccgcaggtctcaatctggccgcgccctgcgccaaagccgcgtcctggagcaaacgggacagccgtttcggggccgacctggcggacgggtcagggagccccgaaagcccgcgattcgtgcggagagttctgtttcggcaggagacggctccgtcctggtttccttttcccgctcagcgtccgtgcgttcctcccccagctctgccgtcctggccagccgagggattcggaggctcttttgaaaagattgcttttccctcgtgcgtttttgccgccctgtctttaaacacctaaaaaccgtggtttctggggtggctccccccgaggggccgccgtgataggcgtcccacccggcagccctggagtcgtgtggcgctgcctggcagagatgctgaagatgcggccataggaggcccagggcttggggtggggcaggggtttgcgccgccagccagcgttggtgctgggcctggtgaaacctcaggtgccttaggatcccagca

SEQ ID NO: 3206 - DNA, 6000 bp, Homo sapiens
tcagccagaatactccccaaaataaacctgtctttgactattgagccacttcttgtgtttcctccttctttcttcaactcttacaaggttgaaaatattaagtcgttttttgcattcaacaaatggtatctacatacttcacacattctgttaagctttgcagggttgtgtttgttttggttaggttttttaaggaaaatgaaaacatgattcctgcctttaaggagcttacaatttgaagtttaaagcaggagtatccaatcttttggcttccctgcaccatactggaagaagaagaattgtcttgggccacacataaaatacaccaacactaatgatagctgatgagctaaaacaaaacacaaaaaaccctcaatgttttaagaaagtttacgaatttgtgttgagctgcacacggcctgcaaaccatgggtaggacaagcttaaagtatagtgaacaacaaaggaaaccttattaaaaaatgggcaaaggagttggacagttctccaagaaaatatataaatggccaataaacatgaaaagatgctcaacatcactaataaggaaaggtaaaactaccatgaaataccacttcacacccatcagaatggctattatcagaaaaagcagaaaataaaacgttggtgagaaattggaacccttggtactcctggcgggaatgtaaaatggttcatctcctgtgaaaaatggttcctatggtggctcctcagaaagtgaaacaattaccatatgatccagcaattccacttctgggcatatgtccaaaagaattgaaagtagggacaaacgtgtacacacatgttcatagcagcgttattcaccatagccaaaaggtaggagtaacctgagtgtccgccaacaaatgaatggataaacaaaacatggtgtgtgcacacaactgattattattcagccatacaagaatggaattgggtcacatgccataacaaggatgagccttgaagacacatgctaaatgaatcaagctagtcacaaacggacaattactgtatgactccacttacatgattcgtcaaattcatagaaacacaaagtaacatagtggctgccggggtgagggagggaagaatgacaagttattgtttaatgcatacagagtgtcagtttgggaagatgacaaagttttggaggtggttggtggtgatggttgcccaacgatgtgaatgtacctaatgccactgaactgtacacttaagtggttaaaatgatagattttatgtatattttaccacaatagagaaaaaaaagcatagtggattagaggcaaataatgatagtgtcaaatctattactgagtgtaagtaatgcagttttgctgaggaagcatagactttagaggtggaaaaagtagaagggttctcagaacatggtccccagagcagcagcatgtcatctcctggagctgttagaaatgcaagttctccggtcccctttggatcagaaactaggagtggagccaagtgttcaacaagccctcctggtgattctgatgagaaccatcactttaaagagaaaggaactgaggctcagagatggcgcctacatcacaactcctcagtgcatcctgtggtcaagtaccagactgagtggctggaggactgctgagcatggtgactggtgagtagaaaagatgtaaccagaggtgatgttaacactaatgtggtatcctgcttgtcagggtgcagtggtaagcacatggtggatgctttcaaaaacaaatacaaataggttgactttttaaatctatctggaaagatttcacagaaaaatgggacttcttagattttagagctcagtttcaccgaaactcttcagagttttaattcagttttatcactgccaacgtttgtttgttgctctcccaaatgagtccaagctccttatttcccatggtgcgcttgtgatatttccttaggataaatgtgtaagttatttttaatgaatcctactgaatataagattacctactttgcctgtaatcccagcactttgggatgccaaggtgggtggatagcttgagttcaggagttcgagaccagcctgggcaacatggcaaaaccccatctctactaaaaatacagaaattagccgggcatggtggtgcacacctgtaatcccagctacttgggtggctgaggcaggagaatcatttgaaccccgcaggcagagactgcagtgagctgagattgcgccactgcactccaccctgggttatagagtgagaccctgtctcaaaaaaaaaaaaatacttatttgataaatgttaatattttataaatgcatcattcactgagcaacccctcctccttgaacttcagctcctgtgactccacccttgggtttccgttcgtaaatctgtgactacttcttggtctcctttacagcgtcctattcctctgcccacatctgtgatattaggcttccccaaggttccatcttggaccccattttccatgggtgtgatctcacccctctcccctatttaaattaccatttatatgttggtagctctcaaattgttactctagctcagatatatcctagactgatttatcctcttcgtaactggtctatttctagcattgccttctgtacattaaattctctcaatgtcaccagagtatttttgtttttaaattctaatagcacataatttagaaaaattgtaacatatgaacaagcattaacattaaatatgggggaggaaagactacaagacaccacaaagaagcaattcaccaaacccaaaacgtggaacattctgtaggacaaatgatggggtttcttcaacaaatggaaggaaggggggaagaccattatggataaaaatatatatatatatatatattttttttttgaaacggagtctccctctgttgcctaggctggagtccagtggcacaatctcggctcactgtaacctctgcctcccaggttcaagtgattttcctgtctcagcctcccaagaagctgggattacagacgtgcaccatcacacttggctagttttgcatttttaatagagatggggtttcaccatgttggccgggctggtctcgaactcctgacctcaggtgatccacccaccttggcctcccaaagtgctgggattacaggtgtgagccactgcacccagctgataaaaataaatttaagtgacaatcaaaatgcaatatataaatcttgtttggatcctgactcaacccagcaataaaaggaatatttggaactattggagcaatttaaatatggattggatatgagttaaggaattattactaattttcatagttgtaataaaagcatcatgattatgtaaaaaaatacaatgtgttagaaatgcatactggtatgtaaatgaaattgatagaatgttagtaattattatagctgagtgttcattattgttctttatacttttgtatatatatttgaaatttttcatcataaaaagtaaaaaatgaaagagcaggtcaactaaaaaggaaaaaatagaaataagggggaaaaaacatcttaccatcctgggaattcttgtttacagaaccaaaggctatctggtgaaagtccttgactccagcaatcaatcctggcaacaagtctgggtttatctcatgcacacgtcctctgtttctctgcaacacatatgaagccctcagatggcttcctaggcgcaggaagttgtgggggattgttttttctgtttaaagcactgatacttagcaacactatcctgcaatgagacagcagagtcatccattgctgccatcaaaccacaacttaataagttaatggtcaaattgcctgtgtcccactgatgttagtaatgaagtagctaactacaattttagatcaatggaaaccccttgcttgaccataaaccctgtgcttctggagaccatgtgtacttttgtcattgtcaaaaaccagtgattgcccgagctcggtggctcacacctgtaatcccagcactttgggaggccaaggcaggcggatcacgaggtcaggagatcgagaccatcctggctaacacagtgaaaccctgtctctactaaaaatacaaaaaaattagctgggcgtggtggtgggcgcctatagtcccagttacttgggaggctgaggcaggagaatggcgtgaacccgggaggcgaagcttgcaatgagccgagatcacaccactgcactccagcctgagcgacagagtaagactccgtctgaaaaaaaaaattgtgctaagaagcacattttctctcctttgtctaaaagtgaaacttcaggaaattttgacatttaattttccagagtgttaatttaatgagtagtttctaattttaagctcctaccccatcttaatgtgagaattagtgaaataaataacattaaaccattttttaattttgggagtaaagacaataaaaatatgaggtattgctgcttgaattagtaaaaacacaatttaaaccttgtttctttcagaagttttgaggccaaagaccgtaataaaacaaactcaggagcttatttcaagagaatactgtccttgtctcatacctgtccttactactttgttttgtgtgctattataagctcctcaaccatctgaccaagacagttgcagtgatttggcttcatccattctcgtttagtgtgcagtgctatggctgcaacattgtgaaatcaattcctagaagtcacaaagcaagaatttgacgtgaagggatgtccctcatttagaattcccttctggataagatactggggtttcattgcagggaattcttgagagaaaacaataggaggatgagggattgtgagttgtgtttttttttttttttcctaaagaaaactattaataaaggaaccctgttgacagtgtaaagcagtgcttctctctggggccaaggccagagctgtggacaccttatcccactcatcctcatcctcttcctctgataaagcccctaccagtgctgataaagtctttctcgtgagagcctagaggccttaaaaaaaaaagtgcttgaaagagaaggggacaaaggaacaccagtattaagaggattttccagtgtttctggcagttggtccagaaggatgcctccattcctgcttctcacctgcctcttcatcacaggcacctccgtgtcacccgtgggtgagtctcatgtcaagaacttggcacaatgcactttttgttgtggcaatttgctataatgtacagatgattaagaactagattccagtaccttaaatgctagctctagaatcttgtaagaaaagtccctaataatccttgaaaatagatttcccgagaatttctgttacatgttccatttagcctcttgcctggactccaaaatttccatggatctgccatatcccacagctttcactagctaaagagttcctggagtatgtgtaaaaataattctatcttctttgtgttctaggcactttatagttccaacttgaagagccaaaaaaaaaaaaattaaagttgagcatagaatttttctttaatgaaggcaagggactgaaagctctgttgccatggggggcacagatctggataaaccaaactcattagtctttatgtcagaaaataagactttttgcacagatcgagtgaatcttaaattgtctccctcctcaggcttggtgcaaaactggccagtcaggcaaagaaaagtttcaattccagttactaacagatttctctcttgcatctttttctagtagaatgtgagtactaactggaacagagggtgggggtgagatggagagaaccatccttcttgacacttttgagtagctcagtatctaattgaccctggcttatttcttcatggttgctctagtacctgaaaggatacacattaaaaataggcttgtggccaggcacggtggctcacacttgtaatgccagcatttgagaggccaaggcgggtggatcacct

SEQ ID NO: 3207 - DNA, 6000 bp, Homo sapiens
tggtgtctcagggtcactttattttattttatttttagacagagtttcgctcttgttgcccaggctggagtgcaatggtgtgatttcggctcactgcaacctccgcctcccgggttcaagcgattctactgccttagcctcccgagtagctgggattacaggcatgtgccaccatgcccagctaattttgtatttttagtagagatggggtttctccatgttggtcaggctggtctcaaactcccaaccgcaggtgatccacctgcctcggcctcccaaagttctgggattacaggcatgagccaccatgcctggcctattttattttattttttgagacggagtcctgctctgttgcccagactggagtgcagtggcacgatctctgctcactgcaacctccgcctccccggttcgagtgattctcctgcctcagcctcccaggtagctaggattacaggcacacaccaccatgcccagctaatttttttgtacttttagtagagacagggtttcgccatgttggccaggctggtcttgaactcctgacctcaggtgatccacctgcctcggcctcccaaagtgctgggattacaagcgtgagccactgcgcccggccatcactttagatatttaatatacaaattcagattctaagtccgtgtcctcagaggttctcatttagcaggtctggggaggagcccagtttcttcattttaaaagacactacaggctgccttttatgtttgaataggaaaaaaataaataaataaaatacactacaggggatttggaagcacatccttcgtggagaacattgtcatagtaggatttgcaagctcttaaagcccactaaagccaggcaggtaacaaatgggtggtgtgtgatagaagagtgctggtgaccctgatgaacaggaggatcttaagttttctaaaacgcagtcagtatttagctttagctagttgttgccagataacgccagtccagtgttgctagatattccacttaatttttccaagaagagttagaaatactgatttatttgtgacataccctatttttaaatatcggcaaccaattcaaaatttacacaaaaaatttgaattgtaggccaaaacatatgcgctggctagatctggctctgaatctgcctgttgaaatctcttgacaacactttagccaaacaaaagcttgatttaagtcaaaatgatgcagtcaacagctctcttgactggcagcatcacactgcttctgcgatgtgaggctctccggggttctggataacacccagcttggcatggagcaaagtgctctgagcaggggagtcaggagacctgtttcctaatccctgctaacaacttgctaggtgacattgggaaagaaattctctcccttgtcacaggatttctttctataaagtaagggggatgatctctattgttctttccaaggttctagatcattctttttcatgaaaatgtatgtacttattatctgtcagctacttgaaaaggaaacttttcagattaagttgaaaattcacctttaattggcttgagtgacaactagttcttcctctcccatattctcctgtgtcttcagtgatttgtgtttgcatggaagtttctttctgctgtatgcttttgggggtattttctaagggaaagagctcattttggcatagaaagtctgggcggggttgagcatatggacttctcatttgctgaatactacgtttgagtcaaataaaaaaaataaaggaatagagttaatatagggaacattctgaagtataaagccacttccttgaacttcacagttcaaatgaaaccttgcaattgaatcttttttccttgtagcttcactgagacataatacagacacaataaaattcacccatataaagcatacaatccaatgtttttagtatatttacagagttgtgcaatcaacaccactatctaatttcaaaacattttcaactcctcaaaaagaaactcaatacctactattggttgctgtaatcctgcaaccacaaatctgcttcctgtatctatagatttgcctattctggaccttttatataaatggaattatataatatgtggtcttttgtgtctgtcttctttcatttagcataatgttttcaaggtttatccatgctgtagcatgtatcaggacttcattcctttttattgccaaataatattctattgcgtggctatacgacatttttttgtttatccactcatcagctgagggacaactgagttgtttccactttttggctattatatataacattcacaaacaagttttcatgtgaatatatgtcttcatttctctcaggtacagataagtaggggtgtaattgtcaggttgttggtaactctacatttaatcttttgaggaactgacacatacagttttccaaagcagtggcatcatttaacacacctaccagcagtgtatgagggctccagtttcttcacatctttgtcaacacttacctgtctttttaattttagtcatcctcgtgtgtgtgaagcagtatttcgatgtacttttttttgagacagggtctcgctctgttgcccaggctggagtgcggtggccccgagctcggctcactgaaacctccgcctcccaggttccagcgatcctcctgccttggcctcccaaagtgcagggaatacagacatgagccacaacaattttgttttgcttatgattttgtgggtcaagtattcaataagggtcgggagtgatggctcatgcctgtaatcccagtacattttttttttttgagacggctctgtcgcccaggcgggagtgcagtggtgtgatctcgtgatctcacgatcttggctcactgtaacttccgcttccagcgttcaagcaattctcccacctcagcctccggagtggctgggactataggcgtgtaccacgcccagctaatttttgtaattttttgtagagacgggttttggcatgttggccaggctggtctggaactcctgggctcaagcgagcaatccgcctccctcggcctcccgaagtgttgggattacaggcgtgagccactacaattttattttgctcatgattttgtgggtcaaatattcaagaagggccgggagtgatggttcatgcctgtaatcccagcactttttttttttttttttgagcccgcattgtcgcccaggcgtgggtgcagtggcgtgaacttggctcactgtcacttccgcgtcccaggctcaagtgatcctcccacctcagcctccggagtagcggagagtacaagtgcacgccaccactccggactaatttttgtatttttagtagagatgcgtttagccatgttggccaggttggtctggaactcctgggctcaagcgatccgcccgccttggccttccaaagtgctgggattacaggcatgagccattgcgcccagccatcccagcactttgggagttcgagactagcctgggtaacatagagagaccttgtctcttaaaaaaaaaaaaattacctgatcttgatggcatgtgcctgtagtcccagctgctagggaggctgaggtggaaggatcacttgagtccagaagttggaggttgcagtgggccatgattgtgccactacacttcagcctgggtgacagagggatcttgtctcaaaaaagaaaaaaaaaagatttttaaaaaaggaattcaggatgggctggcctggatgggtatttttgcttggggtctctcacgcagttgcattcagatgctaacaggggatgccgtcattggaaggctcgattaggctgagtgtccaagatgtctcacttagatggctggcaggtgatgctggtgatctggtgggagctcagtgggactttttttttttttttttaaatggcatgttgctcctggccatcaatcagacttcgactggcatgcctacatgtagcctctttagcatggcagtcttatgatagtcaaacttctgactttgttcctcccggagtgagaataccaagagaacagctgcatggcctcttctgatctagcctgggaaattaggcagcatctcttctgctgcattctactggttccaaatgagttaccaagtgaagtccaagaacttgcagtcatgttccaagattgctgtaaatgcttcctgtgtagcagcactgttttatgtgctcatttaattcttattaaaaaccccatgaggccgggtgcagtgactcacacctgtaattccagcactttgggaggccgaggcgggaggattgcttgaggccaggagttcaacccctcgcactcacactcctcatatccaattactgcacatttgtcacacataaacatagccactatgacactgtactgacacatacaaaatctgtcacattccgtcttgcccatgcaagctcaatcactgacttattctccatgctcagccactgtcccattcttcacactgtcacaaccaccagcccatcacacactcaattactgtgacacagctctaatcctcaatcactgtcacatactgtttttcacacaaatatggtcaccatctgtactcttaaagcagggtatgtactctcctataaaattgagttaatatgccaacagccctatttttcgcacacgccgtcacatattgtatttttcatccacacaatcccttacatagacaattagggtgacacactctttctgccttcgtcccactcccaactgacacccactcccacactctcacgcactcgctcactggctagggattagagcggtgtgtccgtgggggtctgaagcccgggttacctcccgaacctcagccccaagcggcgcggccccgcccctccccgccccctcatgcatatgcagcacctcagcctggcagcccggcccccagacggccatttgtggcggcgctggaggctgcgttcggcaggcgctgcggagacgcgtagaggagcgcgccccccggccgctgccgcccctggcccgtgccgtcaccccgcttctccgcgcctcgggcggtacccagccagtccccagcgccgcgctaccgcgctgaccggccctccagacgcctcccggtacccgggaccccagcccggccgctcgcccgcagcccgccggccgcacacgtccccggagccgggcctagggcgggcggcagcggcggctcggcgcagtcaggctgggctctgtagcgtccccatggccgcggccggctggcgggacggctccggccaggagaagtaccggctcgtggtggtcggcgggggcggcgtgggcaagtcggcgctcaccatccagttcatccaggtacctggagcgggcctgcccggggcgccggagcggcggcgggcgggggctggcgctacctgtggcggggcggccgccgcgacctcgccccagaggcgcctcgcgggcccgggccggggccagggggcgggagggcgcggggccgactacgctcctgccctgcggccgcagcgtcgcgctcctgcctcctcccgggcgcggcgtcgcgggagtagggcttctcaggaatgtggtcgggagggcggagctggaagggtgggaagcaccgatccaccttattgctctggccgaggccagagacctccgggagaggctgggccaccgagccgggctttactgctccgagggtccgggcgtggggctggagctggagccccgcgcgctgcttttccagccgcctgcggccgcgccttcaccgtcggggcgatagcggtggcaacttggccgcggctccgcgtggtctccgggcttccccgcgccgcctgagccggagctgcccgcttcaagtactgtgtatttctttgtgtgtgtgttacgctctttttataagtactctcttaggtaatatgtccgggtgggagtgtgtgataatgccccggggaaatggtggcttctaggaagttaaaaatgttctctgatggggtgagaccatttcct

SEQ ID NO: 3208 - DNA, 6000 bp, Homo sapiens
cctccccttcctccctgctccctgcctcagcttctcagtctctctccgttcttcctctagcttccttccctccccagaagacccagcccttcctagagccccagaagccagggttcatgccccagctctctacccacacatgctgtgcaaccctgggccagtcactggtctcttgggcctcagttcaacagatggctgtcttggtgatgtgagatcatagggtggaagcacccagaatggtgccaggcactcaaaaatttttttcttttcctttttaaggaactactaaccgtgaggttatggattaccaaaccgttcctgttcttggaatctgggtcctactattcccaagaatttgaattaccacgggtccctggggatgtaaggggatgaggcttctgatgtactttgggagggggaggagtggaaagaggagttgggaggacactctagcattgcccagagggcagaggacattctgcctatttccagaggttattgaccctggatctcttttatggagttcctcacccaggccccttgagcttggccatacttgaggcaatgggatatcttccttctcctggagccccttgaatcttaggcctcgggaacacacagtctactgtgtttcttggctgcacccacggaggacagcccccatactccttgcttacaaccagcaaagactccacagccatccctgcacacgactcaggctccttggcttggcactcaaggctctttgctttcctgtcctgctttgcttccagctgcaaagatggtggcttcctgttttcctcttcgtttcctttgcttaagttgattctcagccagacatgctttccccctgcacgcttccctaagccatcctatctgggaccctgacccaatcaatggttccctaatgcacctttgagaccaagtgtacctggcacctcctctcttgccccactatctgctcacatgaccctctgcaggcctgtaagctgctggaggctccgagtatgcctcattcatgtctatcccccttactaggcccagaccatggaagacactcaataaaaagtaagtgattaaatgacaacctctacggaaaagagtatggagatttctcaaagaactaaaaacagaactaccttttggccagatgcagtggctcacacctataatcccaacatttgggaaggctgaggcaggtggattgcttgagcccaggagttcaagatcagcctgggcaacatggtgaaaccctatctctacaaaaaatacagaaaattagatgagactacaggtggcacacatccatagtaccagctactccagaggctgaggcgggaggatcgcttgagcccaggaggtccaggctacagtgggccaagatcacgccattgcactccagcctcagtgataaagtggcattctgtctcaaaagaaaaagaactggccaagcatggtggctcacgtctgtaatcccagcactttgggaggccgaggcaggtggatcacatgagatcaggagtttgagactagcctggccaacaatgatgaaaccccatctctactaaaaatacaataattagctgggcgtggtggcgggcgcctgtaatcccagctactcaggaggctgaggcaggagaatcatttgaacccgggaggcaaagtgagccaagattgtgccactgcactccagcctgggcaacaagagcgaaactcagtctcaaaagaaaaagaaaaagagagaaaagaagaaaggaaaagaaatatcatttgatccagcaatctcactgagtatctaaccaaaggaaaataaatcactataccaaaaagatactgcatttttatgtttatcacagcactattcataatagcaaagacacagaatcaacctaagtgtccatcaacggatgagtgaataaataaaatgttatatttttatatatatatatatatataatgaaatactattcagccataaaaaagaatgaaattatgtctttgcagcaacatggatggaattggaggccattatcataagcgaaacaatgcagaaacagaaagtcaaatactgcctgttctcatgtataagtaggagctaaataatgtgtacacatggacatagaatgtggaatgacagacactggagacttgcaagggtgggagagtggggaggcatggtgagggatgagaaattacttaaagggcacaatgtacactattctggtgatggataaactgaaagcctagacttctccattatgcaatatatccatggaacaaaactgcatttgtaccccttacatttatacaaaaaagtgattaaatgaatgaatgaataaataagcatataaacaaaccaaagcaagacaataacacacacgagtgaatgaatgaacacatcaagcagggcctagatcttgtggagtggataaccttacaccccactgcacccagtcagctggggcttggccttcttgatggggaagtgggaacaaggatggaactgatgccaagccaacctgtccctcccctcctttttgggagaggccttggtcaggttcctagggagccctgaggacctgtggcctggagcctttggagagtcccaagtgcagatacaaagtcagtgaaggtggaagtcaagtagatctaatggtgagcccagagctgtgaaattctggtgtttgctgctaatgaaaaaacacttgtggcctaggaatccactggcaagaaggcaggcctgtcttagtggagtgggaatttaaagcaaggggttagattatacaggggaggacactgaatgttcaaaattccttcccagcagaggggactcaccagagatcactgggccagaaaaacaacaacaacaacaacaacaacaaaacaaaaatgcctctactcatccctccaccccccagaaaagatcaggaactctctgaaggcaggggtcttgtataatacttttttgttttcccagcgctcagcttagagcctggaactcaacattgggaagatgcatggatggacagataagtggatagacagatagatgaatgagtggatggatggatagatggatgggtagatgagtggattggtggatgggtggattagtgaatcggtagatgtgtggatgagtggatggatggatggatgaatggatggatggatagataagtggatgagtggattggtggatggatgaatggatggatggatagataagtggatgggtggatttgtggatggctggatgaatgagtggatggatggataggtggatgagtggatggatgaatgggtagatagctggattggtggacaggtggatgagtaaatgggtagatgggtagatgggtggataggtggatgaatggatggatggatgaatggatggctggatggatgagtgataccaaaaagatactgcatttgtatgtttatcacagcactattcataatagcaaagatacagaatcaacataagtgtccatcaacgggtgagtgaataaataacatgttatattgtatttatatatatatataatgaaatactattcagccataaaaaagaatgaaattatgtctttgcagcaacatggatggaattggaggacattatcatatgcgaaacaacgcagaaacagaaagtcaaatactgcctgttctcatggggctcctggaaaccgaagctgataggtgaatggatggataggtggatgaatagatgggtggaatggtaggtgggtggattggtagatgggtggatgagtggactggtggatggatggatgaatgaatgaaggggtaggtggatgatggatgggttgatggacagatgagtggatgggtagatgggtggatgagtggatgggtggatggatggacaggtggatgaatggatgagcagattcatagatggataaacagatggaattgtggactgatggactgatagcaggtggacgggctgattaatggacatatagatggttagatagacaagtagataaacagatgggtgggtggatgaattgactgacagatgaatgaacaaacaaacggacagttggataaatggacacataagtgaatgcatggtgggcttgatgaatggatagctggatggacaaatagacagacaaatagatgcatgggaaaacagatgaatggtggataggcaagaaaggtttgtaaaccaggagggttagattgatattcaggcattgccaagggatggggaaactgagaaacctgggctggaaacagagccctagggatttgaatgtggtaatcaagaagctgggaggggagggtataagaacccaggaccctcttctggtggtagggaagcccatgtgaacagattcagagggaaggaagaaagcagcactatgctgaagaccctacacctgagcccagcctcagcctagggatagcctaggcagtgggggtgcagggccacaggaagagccaggcctgatagcctgctagatcagagccctcacccaggaaggctgactccagaaagtggaggccccaagaggccaccccttccagctctgaccccaatgaggtgactgttggctacatagggatctcaaaagaagcaggcatttgttgggttagagcaaaagcctcccagtggtgtggcagagctacacgttctccctcccatcctccctccccagcttagcccccaaagtcatccctctcagtcccagcttcctctgggcagggggcctggaccccatggcttcccaggccagccctttgagcaccacctgccccagccggccagagacttcctgtatgtagcgcaagagatttatgcaaacgggttggggcggtgatgtcaccccaaggggactatctcccagcggcaggcccttcgataaaatcaggaacttgtgctggccctgcaatgtcaagggagggggctcacccagggctcctgtagctcagggggcaggcctgagccctgcacccgccccacgaccgtccagcccctgacggggcaccccatcctgaggggctctgcattggcccccaccgaggcaggggatctgaccgactcggagcccggctggatgttacaggcgtgcaaaatggaagggtttcccctcgtcccccctgtgagtaccgggactcctccaccagcccaacccgtggccctcggacgcctgcctgcctgcccacgaacccgccagcccacccactgccctcctggcttgctatcagtgggaagtcagggtttcctccctggaactcctggcctgagacccagcgagggggccattggcttcctcggagcatgccctggcgggctgaggccaggcccacggtggggctgtgatcggtggggcctgaacagttatttatagacagggctcgggtggcaggcggaggccggggctcctggggagggtgctgggctgaggatggtgaaggcggtggtagagaggtagaggagggagatggggggactggcttgggggaggccggtcccctggatgggaaggggttgaaggcaggaggcaatgggcagaagtcttggcccatggccttggggctcctggaaaccaaagctgatggaactctgggtccccaacgcccagtctggggcctggcacagaggacatgattgttgaccaaagggtcagggccatgggcccacaggggtacccacaggagacagggactggtgctggaaaggagccaggagtggagctgagacagtgcagttagggctggccccagggctggagttcagggagaggcgcggcaggggacagggctgggacaaggccaggactgagattggggctgggtgggacctggggtgagcatgtgataagtgagaatgggggctgaggctgggacaaggacagggactgggtcttgggggtgaagaagtgggagccccaggggaccccgagaagagaagggcagatcgccactgctcctcactctcagtgacagttgcagccttaggcaggt

SEQ ID NO: 3209 - DNA, 6000 bp, Homo sapiens
aggatccttttgccacactggttgtcttgtcactaccatacagcccagccacattttggtcgaggtttgagtgtccacttggtaccagggcctgtgccaggtattgtgaatacaaaaaatgagtaagacatgctccctgcccttcagagtctcagtcacttgaggaagacaaatgtgcaaaacagatccttaagtcacggaatgacatgtgaaatggaggtgtgcgcagagaagcacgggggcacagtggcctccggggagctggagacagctgcatggagaaggtggcattgaagctggagaaagacacagaagtgtgttctccaggcaggtggcccagcacctggaagggaaggggtgttggcaactgcacggcctattcagggccaccttcgtggtttgagctgatgttgggcagtgagcaggctcagagattggagggcctggttaagctgaaggcctctaagcagagaggtgacaggagcagatttggaagttgactcaggaggccacgtgtagaagatcagagacagacagactcaaagcagggaggccattctggaaatgttgctgtagtccaggaagagaagatgcggcacaaaccttacagaaggaatagcagagcaagatcacatctccaccactgtcctcagttacccttcagccctgcagccgttttgcgtcttacagaccaagctcagtctcacctcaggacctgtgtctagctgttgcctctgcttggaatgcccaaggttttaatgcaagtggctcatgccagtccttccctgacctctaaattagcccttccctctacatttagactgtcctgacctcacttccagtattgttacatcaccatatcgtccctggaccaccgtcacttgagattttctggtttggttttgtttgtttgtttgagacagagtctcactcttgtcgcccaggctggagtgcagtggtgcaatctcggctcactgcaacctccacctcccgggttcaagtgattctccctgcctcagcctcccgagtagctgggactacaggcgcccgccaccacatccggctaattttttgtatttttagtagagacggggttttcaccatgttggccagggtggtctcgatctcttgacctcgtgatccacccgcctcgacctcccaaagtgctgggattacaggcgtgagccaccacgcctggccgagattttctggtttgtatatatgattgtgtccctctcactttttcactaggatgccaactttttgggagcagacaccttgtgtgcatactcacggccacatccccagtgtctagaagggaggctggcacatagtaggtgcttgataaatatatgtcaagttactggcggggagtgagagaaaagaagataatcattccaaggtttctagctttggtgacagggcagatggcggatggtcagggaatgcaggagaaagaacctagtttttgagggatgatgaggttgtctttgaattgatggaattgaagtgctttggagctactgaaataccactgtaattagaaagacagttctgaaagctctgactaaaatatgaaaccattagagataagaataagagtctctgctgaagtcttaaggcagttgtgcctcagctgccccagagtgccaagaaattctcgccaggcctgggtggaggctgacaatgagccaggatgtgagcagtgcaggaaggtgtgagctggaggctggggccccccaggtctcctctttgcccagagcatggcccctgtactcggcctcaccatgtggtcttagaggggcagattcagccaacagaggcctccaaaagctgtgggattctcagaactgctgagtgtcacacatcccttctcattggcagagaaggttgggagaatgggtcttgggaaagcctggctcctccccttcctcctgagggacctttgagagcgtcggggacccacctgaggagagcaagtcccacttctcccccttactttcccagacgatcgtcaccggattgaggagaaacgtaaaaggacatatgagaccttcaagagcatcatgaagaagagtcctttcagcggtgagatggggactgggaaagccagagaggaaggcagcgggcagggaggggacaccctggggctgagaactgacctagcccttgccctacaggacccaccgacccccggcctccacctcgacgcattgctgtgccttcccgcagctcagcttctgtccccaagccaggtaaggatttccttttgtcccactggaacgacaggttcagctctgttcagctgaggagcagtggagatgaagactcctgggccccattacagacctactgaatcagaggctttgaaaggatggcgcaggaaccagcgacttcctgggatgctaatgcacactgaagcctgggaaccaccgtgccacttaaattctatattgggtatcttgggaatcagaagttaaaaatgcagaatctctgctctcatctctcacttgaattgggggaacaaaaatcacctctaaattagcaagatgtgtgtgcctgtgcgaggctcaaaaactgacaagctctgcacttcaggccgctgctcacttggtgctccatgggctcattgcctctcaggacttagtttttcagctgtaaactgaggagtccagcttatctctccaagtgtcccttcctctaaaaggctggaagagtttcgtgggcttgagtagtcagggaggactccaaggtggaggtgtggctagaactggaccctacaggctgggtcagatggggtaagaggaaggagatagggtgttggcagtgactccctagagagggattgagcctgagcaccatgaagaggggctggggtacagaggacggggtggatctctagggctttctctgacccctgcctctctgtctctctcctccagcaccccagccctatccctttacgtcatccctgagcaccatcaactatgatgagtttcccaccatggtgtttccttctgggcagatcagccaggcctcggccttggccccggcccctccccaagtcctgccccaggctccagcccctgcccctgctccagccatggtatcagctctggcccaggccccagcccctgtcccagtcctagccccaggccctcctcaggctgtggccccacctgcccccaagcccacccaggctggggaaggaacgctgtcagaggccctgctgcagctgcagtttgatgatgaagacctgggggccttgcttggcaacagcacagacccagctgtgttcacagacctggcatccgtcgacaactccgagtttcagcagctgctgaaccagggcatacctgtggccccccacacaactgagcccatgctgatggagtaccctgaggctataactcgcctagtgacaggggcccagaggccccccgacccagctcctgctccactgggggccccggggctccccaatggcctcctttcaggagatgaagacttctcctccattgcggacatggacttctcagccctgctgagtcagatcagctcctaagggggtgacgcctgccctccccagagcactgggttgcaggggattgaagccctccaaaagcacttacggattctggtggggtgtgttccaactgcccccaactttgtggatgtcttccttggaggggggagccatattttattcttttattgtcagtatctgtatctctctctctttttggaggtgcttaagcagaagcattaacttctctggaaaggggggagctggggaaactcaaacttttcccctgtcctgatggtcagctcccttctctgtagggaactctggggtcccccatccccatcctccagcttctggtactctcctagagacagaagcaggctggaggtaaggcctttgagcccacaaagccttatcaagtgtcttccatcatggattcattacagcttaatcaaaataacgccccagataccagcccctgtatggcactggcattgtccctgtgcctaacaccagcgtttgaggggctggccttcctgccctacagaggtctctgccggctctttccttgctcaaccatggctgaaggaaaccagtgcaacagcactggctctctccaggatccagaaggggtttggtctgggacttccttgctctccctcttctcaagtgccttaatagtagggtaagttgttaagagtgggggagagcaggctggcagctctccagtcaggaggcatagtttttactgaacaatcaaagcacttggactcttgctctttctactctgaactaataaatctgttgccaagctggctagagatccgctttttttcagcaaacactgagcacacattttgctagtcacatcaggccagacattggtggtagagagctgggtgaatgcgtgcactgtcctctgagagcttgcagtctgagaatgcccttggaaaccccgagttaccgtccagtggatgaaaacgggcagctaaggcaagagtcctagcacactgagagcctagtagagcccgctggctgtggggatggagcagtttcaggagtcttccaagaggccccattagctccaggtcttagatcagctgagagtggatgtcaaagagggactagccagcgtcagaggtaagagaaacgatgttcgaaagatgtgatggggccaaattccttgggtggcccagggagtgtgtgcttctcttggggaatgtgtggtgccaggtaaagatctacccggcccaccgatgctttgatactctgttctgggaggaacggtgaaatcttcaatccacagcctcaggaagccaaaacaaaggcccagccgcagcccacaagggctacagctggacgtacttccgctttgccccagcgcaagcgcagcagcaaaaagcgctggccggcgtgggcccccttctcgactgcgcaggcgcacaaggagcccgcagcaaccggaggccgggtccagcgtctggggaaaatccccgccgaggccgatggcgtcttcgtttgggcttcgcaccgtcgcgggaggacaatagcaggggaaaaggagttatcgtcagcgggacgcgtcccaaaattcagcgagtctcctaggaacagaaaaggccctgggtgcaggctccgacgggcggcgccggcgagacggcaggccaattccgtcgaggaagtggcgttttccacggggctccggctccgggggggcggccaggggcggggcttggagcgagggcgggcctcggcggaactcccacgcgaggggcggagcccgggctcgcggtggccaggtcaggacccgggcgaagctgccggggagcgcctgggaggcggggtcggggaggaagcgggcggggtgagaaggctcctaacgctgaggaagccgacggctgagctgcgcagggaccccgaccggaggtccgcgacccgaggcccagagggaaaccagggagccaaggccctgcagcccaggctgcgcctccctcctcttggctttctcggtcccgcgacctcccgtgacccacgaagacctctcctggttcttctctcattcgtgaatgaccccatcatgctcatggctcagcagctccaagtcctcgtatccaacccagatctctctcccctgcgcaccagcccctggacatctccactctgacgtcctcgggcctctcaaactcatcctgttccaaatgacctcagccatccccagcctgcctctccttttccctgtcagccctggccctgccaccttccaagggctccagccggaaacctggccactaccgtagatgccgcctcttcccttagtaacttgcgtccagtccttccacgaggtcctggaaaatctgcccacttctccccactgtcactgctatcactgagtttaagtcaccactagacctcccactggactgcggctacagccgcctccctgcagccaaagagctctgacatccagatctcac

SEQ ID NO: 3210 - DNA, 6000 bp, Homo sapiens
attaattaattaattaatttaaaaaatacagaattctggcccagcgtggtggctcacgcctgtaatcccagcactttgtgaggccaagcggggaggaaagttgagctcaggagttcaagactagcctggacaacaaggttaaaccacttctttacaaaaaatacaaaaacttagccgggcatggtggtgtgctcccgtagtcccagctatgcaagaggctgaagtgggaggattgcttgagcccaggaggtagaggctgcagtgagcagagattgtgccactgcactccagcctgggcgacagagacagaccgtgtctcaaaaaataaataaataaataaatacaatacaatacaatacaatacaatacaatacaatacaatacaatacagaattctggatggtggtggccccttgagttttgcaatgggtacatgggtgtttatcgtattaatttaaaagttataaatatacatgaattttaagaagaggatccatgcaaggttcaatgataattgtatatcattaaccaaagattttaattaatccattctgtcacctgaagtcggcctcccccgccccctgccaaaagtaaacacttttctaatcagggccagccactggagaaactgaaatgagtgggcggggtgctaactctattttcacttttctcttcctgtttcttcagagcctgggaaacaagtcagaatttccaatcttttccaattcccacatgatttcctaatttaagacgaattcagagaaaataaaaaagtctttctccatctggagaagactccgccccctgcagtggagcatcctcctttggggatgaggcctggggtgggggtgcgtcagccccagcctccacacggacgcgccttgggcttggtcttgggggagctacctgcactgtggggtcacatgacagaattagtggtcagccctagctggaggtccagggcaaacacaggcgggggcaggggggtggggggtcgtgagcctgctgattcaagtgtccctgtgggtcccgcaccttctgagacacaagcgccaggcttcagagacgaggctccgggatttacccctgggggcctcctgctcccacagccgatgagagccggcagtttggctgtatcgtaagctggcgctttagctggagagggacgagccctcggccagctcgccagcgggagggcctcagtcgtcccatccgggctgtaggctccgcaaagctcttgatgcactgtcaggctgggaggtccggccgctcccattcccccacagccgcatctagattggggtgggtaggacattttaacgtgcttctgagacagccaccaccgaaaggcacctttagcggttaggaaacccgcgcggagttcaaccacccggcctctgcggagcagaaggcccggtcgggcttttccctgcgcggggcgggcggccgcagcccagtagccctggctttgctccagacccggcccagagtgacatcaccaaactccgccgatcggcgggagggggccctgaaatcccctaaaaacaaagtgagtaatcggcggacccaccctccaggcggggccgggacccgggagctagccgagccaccgggcacgccagcctcttcgtcctcggcgaggcgcgcacttggccccgacccccggcagcggctgtgcgtgcagcctcttcgtcctccgcgcggcgtgcacttgctcccggcccctgcgccgggcggcggcggggcagcgcgcaggcgcggccggattccgggcagtgacgcgacggcgggccgcgcggcgcatttccgcctctggcgaatggctcgtctgtagtgcacgccgcgggcccagctgcgaccccggccccgcccccgggaccccggccatggacggtgaggtcgccctctgaccccgcggggtggcatcgccggggccgccgcggctgtggcgggagcccccgcgccgctttccgccccttcctgcgccgacgggcgctgcgcagggagcggtcggcctgccggatggtggcgcggggcggggcaggcggggaggggtctgactcagtttcccctctgggtggagggggtggcccttgactcagcatcctccctgggtgggggagcagagggaaccttgactcagtttccctccacaccgtccatgggggcagctctggcttcgtttccctattaggggagaacgcatctgattcagtttcctctctggagggaggtggggcgtgccctccctcaattttccttaagaaagtacaacaggccctgattcagcttccctctggagaagaaggattccttaccccgttttccctcaagaagcaggtgtttctggttcctttcctccaccccttagtttcaccgcaggttctagggagcaggtcctgactcagttcccctgggagggagcctggcttctcctctccgtggagagcagattcctccttgtgagaatgggcattgggtgtgtgctgaccctgatctccctcccctttcagaactgttccccctcatcttcccggcaggtaagtggcccccgcggcggtcggggaggtgctccctggggtagggcagtgggggcagccgcctaatggggctgcggtgtcccctggcagagccagcccaggcctctggcccctatgtggagatcattgagcagcccaagcagcggggcatgcgcttccgctacaagtgcgaggggcgctccgcgggcagcatcccaggcgagaggagcacagataccaccaagacccaccccaccatcaaggtcagcactgcgccagggtgtgcggggaagggactgtggaaccccagccctctgtgtttgggagtcaggtttggatgtctgggcctctgtactttggacagatcaatggctacacaggaccagggacagtgcgcatctccctggtcaccaaggaccctcctcaccggcctcacccccacgagcttgtaggaaaggactgccgggatggcttctatgaggctgagctctgcccggaccgctgcatccacaggtgaggtccctgcaggctaggaggcccagcatgaggggacaggaggcgggctatgaagtagccgctacagtgttactcctttctggacccagggcagaattcctcactccttgccctgactcagctctgcaagtaaactgcctttgtcttgaaattatctatttgtacgtttactctagcagatgagttccaggggatacggatgggtccctaatcacttctgaattcctgacccctgtagctggaaggacaagtccctcagagtcacgtctcttgtttgaggaagaaaaccattgaaccagcactctcccctggagttgacattgcagttgacagagacaggctgtaaaaaaatatacaggccgggcatagtggctcatgcttataatcctagcacttcgggaggccaaggcaggaagatctcttgagcctaggaattcaagactagccaaggcaacatagtgagaccccatgtctacaaaaaataagaaattagctgggtatggtggcatgcgcctatagtcccagggaggctgaggtgggaggatcgcctgagcccaggaggtcactgctgcggcaagctatgattgcaccactgcacttgggtggcagggcgataccttgtctttttttttttttttttttttttaagaaagagtcttgctctgtccccagactggagtgcagtggcgcgatctcagctcactgcaacctccaccttccgggttcatgccattctcctgcctcagcttcccgaatagctgggactacaggtgcctgccaccacgcctggctaattttttgtattttttagtagagacagggtttcaccgtgttagccaggatggtctcaatctcctgaccttgtgatctgcctgtcttggcctcccaaagtgctgggattacaggcttgagccaccgcacccggcccgacactgtgtctcttaaaaataaataaatacacagataaataaacaaggtgctgtcagagtaacagtttcagtcctgaaaataaaacgaggtcataggatagaaggataacctggggtgggggagttaggggagctggtgtgtgatgactttagattgggaggtcagggaaggcctccctcagctaagacttgaatggtgagaaggaggagagaagtaggaaaagaacattccaagccgaccaaacaagtgcaaaggccttgaggtgggaatgagtgtcctgtgtttagagagtggaaaaggagccccggtggctgtaagcagggagcccacagggaggctggcaggggcaggggcacggaggtgcttgtcagctgagtgaagggacagggttcgttgcagcacagtaggaagccactggagagggttaggcatggagcgatgatctaggggtgggcagagtaggaaggagcaggctgggcaaggcaggaaggtctgggctctgtgagagacagtgggacagacgactgggggcgctcagtttccagaacctgggaatccagtgtgtgaagaagcgggacctggagcaggctatcagtcagcgcatccagaccaacaacaaccccttccaaggtgagggcaaacctgcctgccacacccgcaccctctgtcaccctccccagcccgcctttcctgcatctccctcactggccaagacacagtaaagctggaatcttggtgcccattcagtactctcccactttaccactgggaaactgagtcccaggaggggacatgacattcaggccacagtggagtcagtgctgggttctgcctcctctaggacttgtgtttcacacacgcaccagcggccctcccagcgcagagctccctgcccccactgatagcacctatatccccacttcccctgctctcctgatcgcctgttttcttggcagttcctatagaagagcagcgtggggactacgacctgaatgctgtgcggctctgcttccaggtgacagtgcgggacccatcaggcaggcccctccgcctgccgcctgtcctttctcatcccatctttgacaatcgtgagtagcgagggagacgcaggaaggggagagggtgggcctgaataggaggaagggggttggggtgagtgtggcctgcaagaggcgctctggcttcattcaatcatcttgcgtatttgtctactcttctctgcccagctctttgttggctggggagagagggcaaagaagacccagagctgtccttgaggtgtagctctggcctggcaggaagtctagcagagagtctgatgggagatgggcattttcagtattgtgtgatgagaaggtggtgtgcccacaactgcgataatgactctaggaaatgaactcccaggaacaagatagtgttcgagaatgatgattcagtgatggaagcccacagatgaattgggctgactgatcagctgcagtctttagttaagtaaccagcaggatgaatggaaataaaacgaatctggagccccaaggatgggaaaccaggataaactgggggtcaggagggaagggctcattgccaaggtgggtatggactggccttaaagattgctttggtcaggtggagaaagagtgtgatcagattggcacccactggactataagctccgggagagcagagaggtttgggttttgtgtgtggtcgtattcttgcttagatcagtgttgagtgcacagtaggcaaatacttgttgaatcggttggggtgaggagctaataagaaggtctgactttggctacaaaggtgtaggtggcaagctctgggcaaccttgactctgggctgggcagggaagttgcatctcctgcaggccaccctggggacctctcgtggctcaggtcatcctcccttgttttcactgcctcaggtgcccccaacactgccgagctcaagatctgccgagtgaaccgaaactctggcagctgcctcggtggggatgagatcttcctactgtgtgacaaggtgcagaaa

SEQ ID NO: 3211 - DNA, 6000 bp, Homo sapiens
gtcacttgaggtcaggagttggagaccagcctgaccaacatggagaaaccctgtctttactaacaatacaaaattagccgggcgtggtagcgcatgcctgtaatcccagcaactcgggaggctgaggcaggagaatcacttgaacccgggaggcggaggttgcagtgagccaagatcatgccattgcactccagcctgggcaacaagagtgaaactctgtctcaaaaaaaaaaaaaaaaaaaaaaagtactaactattcaccgaaaacatctacaatgactgactcagtagcaataagtatccgaagtactcaagctgtagtctttaaatatcatttcctactaagagaaatcaggactccttggaaagctgtctgattccagatctggggcagaaaatttactagatgagtctagaaatatcttttcaggccaggcgctgtggctcatgcctgtaatcccagcactgtgggaggccaaggcaggtggatcacctgaggtcaggagttcgagaccaacctgaccaatatggaaaccccatctctactaaaaatacaaaaattagctgggcgtggtggcacactcccataatcccagctacttgggaggctgaggcaggagaattgcttgcacccgggaggcagaggttgcagtgagccgagattgcaccattgcactccagcctgggcagtaagagcgaaactccatctcaaaaaaaaaaaaggaaaaagaaaagaaatatcttttcataccaaacagcaaagaagctatcacaggctactgtaattgcttttttaaaattatttttttaatagacatagggatcttgccatgttgaccaggctggtcttaaactcctggcctcaatcagtcttccccattcagccttccaaagtgctgggattacaggtatgagccaccaagactcatatattggaattgtgtcaaaaggactgaagaacaaccaacttgaagaagttctccctaaccaaagacgaataatttgaatttcaataactatacttgattaaaacacagctaatatatttaaatccatgcattcattaagattttaaaaaactcagccgggtttggtagttcatgcctgtaatcctaacactttgggaggctgagacagaaggatcgcctgagctcagaggttcgagaccagccttggcaacatagcaagatcttgtgtctactaaaaattaaaaaaaagaaattagctgagtgtggtggtgcacgctgttagtcctagctacttgggaggctaaggtgggaggattgcttgagcccaggagtttgaggctgcagtgagcaacgagtcatgccacagcattccagcatggcgacagagtgagaccctgcctcaaaaaattgttttctttttaattagctgtgtgtggtggtgagtgcttatagtcccagctacctgggaggccgaggtaagaggatcccaactgataggggcgttggtgggagaaaaagtaggtttactgatttattctgaaagccagcaagactgagaggacggtgtactagcgttctaaagtaccattttaagtcagtacaatcttaggctctttctatgttaagggcagggaagagaaggagggtgtggtcaagaagtaccccatggcagacatctgggcagcagcgagggtctgaggaggttgggaacttctttgtccttggtccagtcacaatgctcctataaatctttaagaaaacatagttgtttacatacttctttaaccccagactaagttttaaaaactacatgattgctgtttttatatattactcagtgctctaaagcttatggcagcaaaaaattagaagtccaaatgcccatggctgggcacggtagctcacgcctgtaatagcactttaggaggccgagacgggcagatcacctgaggtcaggagttagagaccaccctggccaacatggtgaaaccctgtctctactaaaagtacaaaattagtcagatgcagtggttcatgcctgtaatcccaacattttcagaggctgaggcaggtggatcacctaaggtcaggagtttgagaccagcctggccaacatggtgaaaccccgtctctactaaaaatacaaaaagttagccaggcatggtggcaggcacctgtaatcccagctactcaggtggctgaggcaggagaatcacttgaacctgggaggcagaggttgctgtgagccgagattgtgccattgcacacaacaagagcgaaactctgtctcaaaagaaaaaaaaaatacaaaattagccgggcatggtgatgcatacctgtaatcctagctactcaggaggctaaggcaggagaatcacttgaacctgggaggcagaggttgcagtgagccgagatggtgctattgcactccagcctgggccacaagagaggaactccatctcaaaaaaataaaaataaaaatgcctatcttcaggatgaataaacaaactgtggtatatttacacaacaaaatagtatacagcagtgaaaaagtgaattaactgtgaaacatgaatcatagtaacaggttgagtgaaaaaagcaagtaacaaaggacaacaaatcatatgatgccctcttcataaaagttcaaaactggctgggtgcggtggctcacacctgtaatctcagcactttgggaggcagaggctggcgaatcacctgaggtcaggagttcgagaccagcctggccaacatggtgaaaccccgtctctactaaaaaaatacaaaaattagctgggcgtggtggttggcccctttaatcccagctactcaggaggctgaggcaggagaatcgcttgaacctaggaggcagaggttgcagtaagcagaatgccactgcattccagcctgcgcgacagagtgagactttgtctcaaaaaaaaaaaaaaaaaagttcaaaactaaggaaaaccaaaagatatattgtgtaggcatgcagatataactttttttttctttaaaatacagaattctgggccaggtgtggtggctcatgcctgtaatcccactttgggaggctgaggtgggaggatcgcttgagcccaggagtttgagaccagcctgggcaacacagtgagacccatctctatttacaataaattaattaattaattaatttaaaaaatacagaattctggcccagcgtggtggctcacgcctgtaatcccagcactttgtgaggccaagcggggaggaaagttgagctcaggagttcaagactagcctggacaacaaggttaaaccacttctttacaaaaaatacaaaaacttagccgggcatggtggtgtgctcccgtagtcccagctatgcaagaggctgaagtgggaggattgcttgagcccaggaggtagaggctgcagtgagcagagattgtgccactgcactccagcctgggcgacagagacagaccgtgtctcaaaaaataaataaataaataaatacaatacaatacaatacaatacaatacaatacaatacaatacaatacagaattctggatggtggtggccccttgagttttgcaatgggtacatgggtgtttatcgtattaatttaaaagttataaatatacatgaattttaagaagaggatccatgcaaggttcaatgataattgtatatcattaaccaaagattttaattaatccattctgtcacctgaagtcggcctcccccgccccctgccaaaagtaaacacttttctaatcagggccagccactggagaaactgaaatgagtgggcggggtgctaactctattttcacttttctcttcctgtttcttcagagcctgggaaacaagtcagaatttccaatcttttccaattcccacatgatttcctaatttaagacgaattcagagaaaataaaaaagtctttctccatctggagaagactccgccccctgcagtggagcatcctcctttggggatgaggcctggggtgggggtgcgtcagccccagcctccacacggacgcgccttgggcttggtcttgggggagctacctgcactgtggggtcacatgacagaattagtggtcagccctagctggaggtccagggcaaacacaggcgggggcaggggggtggggggtcgtgagcctgctgattcaagtgtccctgtgggtcccgcaccttctgagacacaagcgccaggcttcagagacgaggctccgggatttacccctgggggcctcctgctcccacagccgatgagagccggcagtttggctgtatcgtaagctggcgctttagctggagagggacgagccctcggccagctcgccagcgggagggcctcagtcgtcccatccgggctgtaggctccgcaaagctcttgatgcactgtcaggctgggaggtccggccgctcccattcccccacagccgcatctagattggggtgggtaggacattttaacgtgcttctgagacagccaccaccgaaaggcacctttagcggttaggaaacccgcgcggagttcaaccacccggcctctgcggagcagaaggcccggtcgggcttttccctgcgcggggcgggcggccgcagcccagtagccctggctttgctccagacccggcccagagtgacatcaccaaactccgccgatcggcgggagggggccctgaaatcccctaaaaacaaagtgagtaatcggcggacccaccctccaggcggggccgggacccgggagctagccgagccaccgggcacgccagcctcttcgtcctcggcgaggcgcgcacttggccccgacccccggcagcggctgtgcgtgcagcctcttcgtcctccgcgcggcgtgcacttgctcccggcccctgcgccgggcggcggcggggcagcgcgcaggcgcggccggattccgggcagtgacgcgacggcgggccgcgcggcgcatttccgcctctggcgaatggctcgtctgtagtgcacgccgcgggcccagctgcgaccccggccccgcccccgggaccccggccatggacggtgaggtcgccctctgaccccgcggggtggcatcgccggggccgccgcggctgtggcgggagcccccgcgccgctttccgccccttcctgcgccgacgggcgctgcgcagggagcggtcggcctgccggatggtggcgcggggcggggcaggcggggaggggtctgactcagtttcccctctgggtggagggggtggcccttgactcagcatcctccctgggtgggggagcagagggaaccttgactcagtttccctccacaccgtccatgggggcagctctggcttcgtttccctattaggggagaacgcatctgattcagtttcctctctggagggaggtggggcgtgccctccctcaattttccttaagaaagtacaacaggccctgattcagcttccctctggagaagaaggattccttaccccgttttccctcaagaagcaggtgtttctggttcctttcctccaccccttagtttcaccgcaggttctagggagcaggtcctgactcagttcccctgggagggagcctggcttctcctctccgtggagagcagattcctccttgtgagaatgggcattgggtgtgtgctgaccctgatctccctcccctttcagaactgttccccctcatcttcccggcaggtaagtggcccccgcggcggtcggggaggtgctccctggggtagggcagtgggggcagccgcctaatggggctgcggtgtcccctggcagagccagcccaggcctctggcccctatgtggagatcattgagcagcccaagcagcggggcatgcgcttccgctacaagtgcgaggggcgctccgcgggcagcatcccaggcgagaggagcacagataccaccaagacccaccccaccatcaaggtcagcactgcgccagggtgtgcggggaagggactgtggaaccccagccctctgtgtttgggagtcaggtttggatgtctgggcctct

SEQ ID NO: 3212 - DNA, 6000 bp, Homo sapiens
gtaatccagtgaagtgcctggaataggggcagatgtgtagtactagctcaatgtctgaggtatcattattattaaatgaggcaagaaatggattccagtttcttggatcccaagctctgactccagcttctggccctcaaccacagccccagacatgcagtcttggcctctctctcacggcacagagcccagctgccctgatgctgccaccccagctgtgtacctgtatctggcaggtactggaattccatgggctcactgagctcccggtcggaaggccgccgcagctgcatggagacacgcacaggagcctgcaggctggggtctgcgtagggaggggtccggaacacaatggccacttgtcggtgcacatcagcttgcgaaaaggagcctcgggcctcccagcctggtcccgtgaaatacacctcaatgtcctctgcaggagatgcggtggcagtgtgggtcagtgtgtctaaccctccatggtctccccctcaacttctgatgcttgtcttctgatacatcacccttcggcccacctgaggcccccgaggcacaggaggaagtatccaaagccagttacctgacactccacttctctgctcagcttcaccccttgctcccaagagcccacccctgcctcctgatgtatacctttctgcaccttgtcacacagtaggaagatctcatccccaccgaggcagctgccagagtttcggttcactcggcagatcttgagctcggcagtgttgggggcacctgaggcagtgaaaacaagggaggatgacctgagccacgagaggtccccagggtggcctgcaggagatgcaacttccctgcccagcccagagtcaaggttgcccagagcttgccacctacacctttgtagccaaagtcagaccttcttattagctcctcaccccaaccgattcaacaagtatttgcctactgtgcactcaacactgatctaagcaagaatacgaccacacacaaaacccaaacctctctgctctcccggagcttatagtccagtgggtgccaatctgatcacactctttctccacctgaccaaagcaatctttaaggccagtccatacccaccttggcaatgagcccttccctcctgacccccagtttatcctggtttcccatccttggggctccagattcgttttatttccattcatcctgctggttacttaactaaagactgcagctgatcagtcagcccaattcatctgtgggcttccatcactgaatcatcattctcgaacactatcttgttcctgggagttcatttcctagagtcattatcgcagttgtgggcacaccaccttctcatcacacaatactgaaaatgcccatctcccatcagactctctgctagacttcctgccaggccagagctacacctcaaggacagctctgggtcttctttgccctctctccccagccaacaaagagctgggcagagaagagtagacaaatacgcaagatgattgaatgaagccagagcgcctcttgcaggccacactcaccccaacccccttcctcctattcaggcccaccctctccccttcctgcgtctccctcgctactcacgattgtcaaagatgggatgagaaaggacaggcggcaggcggaggggcctgcctgatgggtcccgcactgtcacctggaagcagagccgcacagcattcaggtcgtagtccccacgctgctcttctataggaactgccaagaaaacaggcgatcaggagagcaggggaagtggggatataggtgctatcagtgggggcagggagctctgcgctgggagggccgctggtgcgtgtgtgaaacacaagtcctagaggaggcagaacccagcactgactccactgtggcctgaatgtcatgtcccctcctgggactcagtttcccagtggtaaagtgggagagtactgaatgggcaccaagattccagctttactgtgtcttggccagtgagggagatgcaggaaaggcgggctggggagggtgacagagggtgcgggtgtggcaggcaggtttgccctcaccttggaaggggttgttgttggtctggatgcgctgactgatagcctgctccaggtcccgcttcttcacacactggattcccaggttctggaaactgagcgcccccagtcgtctgtcccactgtctctcacagagcccagaccttcctgccttgcccagcctgctccttcctactctgcccacccctagatcatcgctccatgcctaaccctctccagtggcttcctactgtgctgcaacgaaccctgtcccttcactcagctgacaagcacctccgtgcccctgcccctgccagcctccctgtgggctccctgcttacagccaccggggctccttttccactctctaaacacaggacactcattcccacctcaaggcctttgcacttgtttggtcggcttggaatgttcttttcctacttctctcctccttctcaccattcaagtcttagctgagggaggccttccctgacctcccaatctaaagtcatcacacaccagctcccctaactcccccaccccaggttatccttctatcctatgacctcgttttattttcaggactgaaactgttactctgacagcaccttgtttatttatctgtgtatttatttatttttaagagacacagtgtcgggccgggtgcggtggctcaagcctgtaatcccagcactttgggaggccaagacaggcagatcacaaggtcaggagattgagaccatcctggctaacacggtgaaaccctgtctctactaaaaaatacaaaaaattagccaggcgtggtggcaggcacctgtagtcccagctattcgggaagctgaggcaggagaatggcatgaacccggaaggtggaggttgcagtgagctgagatcgcgccactgcactccagtctggggacagagcaagactctttcttaaaaaaaaaaaaaaaaaaaaaaagacaaggtatcgccctgccacccaagtgcagtggtgcaatcatagcttgccgcagcagtgacctcctgggctcaggcgatcctcccacctcagcctccctgggactataggcgcatgccaccatacccagctaatttcttattttttgtagacatggggtctcactatgttgccttggctagtcttgaattcctaggctcaagagatcttcctgccttggcctcccgaagtgctaggattataagcatgagccactatgcccggcctgtatatttttttacagcctgtctctgtcaactgcaatgtcaactccaggggagagtgctggttcaatggttttcttcctcaaacaagagacgtgactctgagggacttgtccttccagctacaggggtcaggaattcagaagtgattagggacccatccgtatcccctggaactcatctgctagagtaaacgtacaaatagataatttcaagacaaaggcagtttacttgcagagctgagtcagggcaaggagtgaggaattctgccctgggtccagaaaggagtaacactgtagcggctacttcatagcccgcctcctgtcccctcatgctgggcctcctagcctgcagggacctcacctgtggatgcagcggtccgggcagagctcagcctcatagaagccatcccggcagtcctttcctacaagctcgtgggggtgaggccggtgaggagggtccttggtgaccagggagatgcgcactgtccctggtcctgtgtagccattgatctgtccaaagtacagaggcccagacatccaaacctgactcccaaacacagagggctggggttccacagtcccttccccgcacaccctggcgcagtgctgaccttgatggtggggtgggtcttggtggtatctgtgctcctctcgcctgggatgctgcccgcggagcgcccctcgcacttgtagcggaagcgcatgccccgctgcttgggctgctcaatgatctccacataggggccagaggcctgggctggctctgccaggggacaccgcagccccattaggcggctgcccccactgccctaccccagggagcacctccccgaccgccgcgggggccacttacctgccgggaagatgagggggaacagttctgaaaggggagggagatcagggtcagcacacacccaatgcccattctcacaaggaggaatctgctctccacggagaggagaagccaggctccctcccaggggaactgagtcaggacctgctccctagaacctgcggtgaaactaaggggtggaggaaaggaaccagaaacacctgcttcttgagggaaaacggggtaaggaatccttcttctccagagggaagctgaatcagggcctgttgtactttcttaaggaaaattgagggagggcacgccccacctccctccagagaggaaactgaatcagatgcgttctcccctaatagggaaacgaagccagagctgcccccatggacggtgtggagggaaactgagtcaaggttccctctgctcccccacccagggaggatgctgagtcaagggccaccccctccacccagaggggaaactgagtcagacccctccccgcctgccccgccccgcgccaccatccggcaggccgaccgctccctgcgcagcgcccgtcggcgcaggaaggggcggaaagcggcgcgggggctcccgccacagccgcggcggccccggcgatgccaccccgcggggtcagagggcgacctcaccgtccatggccggggtcccgggggcggggccggggtcgcagctgggcccgcggcgtgcactacagacgagccattcgccagaggcggaaatgcgccgcgcggcccgccgtcgcgtcactgcccggaatccggccgcgcctgcgcgctgccccgccgccgcccggcgcaggggccgggagcaagtgcacgccgcgcggaggacgaagaggctgcacgcacagccgctgccgggggtcggggccaagtgcgcgcctcgccgaggacgaagaggctggcgtgcccggtggctcggctagctcccgggtcccggccccgcctggagggtgggtccgccgattactcactttgtttttaggggatttcagggccccctcccgccgatcggcggagtttggtgatgtcactctgggccgggtctggagcaaagccagggctactgggctgcggccgcccgccccgcgcagggaaaagcccgaccgggccttctgctccgcagaggccgggtggttgaactccgcgcgggtttcctaaccgctaaaggtgcctttcggtggtggctgtctcagaagcacgttaaaatgtcctacccaccccaatctagatgcggctgtgggggaatgggagcggccggacctcccagcctgacagtgcatcaagagctttgcggagcctacagcccggatgggacgactgaggccctcccgctggcgagctggccgagggctcgtccctctccagctaaagcgccagcttacgatacagccaaactgccggctctcatcggctgtgggagcaggaggcccccaggggtaaatcccggagcctcgtctctgaagcctggcgcttgtgtctcagaaggtgcgggacccacagggacacttgaatcagcaggctcacgaccccccacccccctgcccccgcctgtgtttgccctggacctccagctagggctgaccactaattctgtcatgtgaccccacagtgcaggtagctcccccaagaccaagcccaaggcgcgtccgtgtggaggctggggctgacgcacccccaccccaggcctcatccccaaaggaggatgctccactgcagggggcggagtcttctccagatggagaaagacttttttattttctctgaattcgtcttaaattaggaaatcatgtgggaattggaaaagattggaaattctgacttgtttcccaggctctgaagaaacaggaagagaaaagtgaaaatag

SEQ ID NO: 3213 - DNA, 6000 bp, Homo sapiens
gaacaagtacaaggaggctgcccacctgctcaatgatgctctggccatccgggagaaaacactgggcaaggaccacccagccgtgagtgagggttgggtgggaggtgggggctgtgccccatcccctgcaggtcccagagtcctgcagggcctgagtcaagaagcttccgttctcccacctccaggtggctgcgacactaaacaacctggcagtcctgtatggcaagaggggcaagtacaaggaggctgagccattgtgcaagcgggcactggagatccgggagaaggtgggaacaggcagggctgggcaggctgggggtctgggaggcaggggcccgggcagccctgagcccaacccctggctccctctcccatcccaggtcctgggcaagtttcacccagatgtggccaagcagctcagcaacctggccctgctgtgccagaaccagggcaaagctgaggaggtggaatattactatcggcgggcactggagatctatgctacacgcctcgggcccgatgaccccaatgtggccaagaccaagaacaacctggtaccttggggctgagaggagctggaggatgggaaggagggaggcagggatgaggttggggaagaaggagagaaaaaggcttggctgcatgcatcccgctcactctctgggtctcccgcttccaggcttcctgctacctgaagcagggcaagtaccaggatgcggagaccttgtacaaggagatcctcacccgcgctcatgagaaagagtttggctctgtcaatggtgagtgcgtggtcaccaggtgcctctagcccatccatcccaggcccactctgccatcagcacccaggacaaatccctcagcagggcaggccctcaggctttggcctggctggtcaccagcctcaccctcagatggtgcccagccacctgtgctcacgtttgcacacatgagcacacacccaactcacgcagcccccttggcctgctagggcctcacacgcctttgcatcccccttctccactggcgattcttgctcaccttgagggcctgccccagtgtctcccactctgggaaaccacctctggccccggatggtcagtcatctgctcctgagtccctcggagcctggcccatcattcaggcctagcacatgtcttgggctgtggcctgaggtgcaagggtctgttctgctcatctctgtccagaagagggtcagcagtgttttgggtcttactcttgttcatgcattcaacgaagcccaaccgtggtctcccctcccctgaccccagtcctgtgtccagcccaaccaggtgagacctatatggtaggctggtgacagtcccctttctctccccaggggacaacaagcccatctggatgcacgcagaggagcgggaggaaagcaaggtagctctgtggggcaggctgggcggttgtcaggggaggctgggatgtgcagaggggggcctgctctcacttcttgtgaccattctttcctccaggataagcgccgggacagcgccccctatggggaatacggcagctggtacaaggcctgtaaagtagacaggtgagtggggcggggctgggctggggagcagggcacggcagggcgggctccacattccatactctcacccccaacacacccctcctctgctgctcatctggcaaggcccaactcacaggtcacctgtcccaagaaggctctgtctcccaattctcagcctaattctctggctctgggtctcccagcttttggtcctggtgacaacatcccatgagggccctggggccaggtccccagccctggggtgatttccccaggacagaagaggctgggtgggcccagcacagggcttgacatgggaaggaatggattctggctaccccggaggtccatgcttcctcagggcccactgtgggctgggtgccaggatgggccctgggtctgggggaacatggagtttgagactgtcccatccacagccccacagtcaacaccaccctgcgcagcttgggggccctataccggcgccagggcaagctggaagccgcgcacacactagaggactgtgccagccgtaaccgcaagcaggtggggctccatgcaggagggggtgggcagacacctgtgtggccctgggtgtggtccattcactgcctgatgcccctgcccctccctcagggtttggaccccgcaagccagaccaaggtggtagaactgctgaaagatggcagtggcaggcggggagaccgccgcagcagccgagacatggctgggggtgccgggcctcggtctgagtctgacctcgaggacgtgggacctacagctgagtggaatggggtgagtccggggcctgggccgggtcgggctgggagcctaggtggccagcggggcctagaggcaagcctgtccacctgcaggatggcagtggctccttgaggcgcagcggttcctttgggaaactccgggatgccctgaggcgcagcagtgagatgctggtaaagaagctgcaggggggcaccccccaggagccccctaaccccaggtgagccccccaccaaggtgagcctcaagaaccacccagcaaccccggatgagctcctgacccagagtgtgccccactgaccccaggcaacctccccatccctctcaggctccaccacccaccagtctgttccctccccagccccacccttctccctgcccccatctcccgtgagttcctccttgggcaaatcccaggctgtccttttccctcaggatgaagcgggccagttccctcaacttcctcaacaagagcgtggaagagccgacccaggtaggggcaggcgggtgtctgggcactgggcagctgcggccggggctgcatgcgtgctgccaagcttccctccagcatgcctcttcatccagcaacagttcctggctctgtctcaggcctactttgggctggacaacggggagacacgaggggaacccagcctctcctgggggtggacgtgtaaacggccagtgctaacaccgtcactgtggagatggacgggagtgtcagggcaccagggtgtggccttgggtcagaactgccattgcctctgcccagctcagggattccggctgcctctgccaggtcagaccccttcaggccagggaggcacagactggcagcagcacagggctgagccacctgccccctctgcccacagcctggaggcacaggtctctctgacagccgcactctcagctccagctccatggacctctcccgacgaagctccctggtgggctaatgctgaaggggcagccagtcaccagagcgcccacctggcacacccccctcaccccagccctgcgcatgggcctgctgcttgtcccgcctgtctctcccacagcccctgtcttttctgttcaatctcagggtaaccttctcccttgtcatctcagcctgagccctggaggctgggcctgcccactccagctccatcccttatttattccttccagcagggccctcttccctaggttcgggccagcaggaggtgccggctggagtctccaccatagactcagtggcctggcctccccagaccccagagccaagaacactaagcactcgccggcccttcggcaccctcgccctccctcccgactcaacccggccgttgcttctgtatatagagaaataagttattggccgcgcgcctcccttcagtccacggtactacccgggcctcccctcgtccctcttctagtggtaccgcccaggccttaatcacccccattccgtgcggtggtatctcccaggctctacattctcgggagcggcgcctcccaagggggtcctgggaccttctcgcgctcctcctggcctctgagggatgcgtcctacccgcgccatcgccccgtggcccaggacggggacctccccttagtccgtcctcccaccgccgggccctgccccgcatcccggccttatgcactgcccctcccacccggccccgcccaggcacggccgaccccgccccgggcaccgcccaccgagccatcctgcctcgcctccccccacgcctgcagcttctcgcgaggggcggcgacggtcccctggtggcaggaggggctccccctgttgcgggtgaggcggctgctctcatattttcagatgttgctgtagaaataaagacggtttaaatctgagctgggcttgttttgagacggaggtcgggggcccccagcgtctctagactggggtggagccgggaagggtcgtgcgtgagtgggggacagtgtgtctcgctcaaccgctgtccgcgcagctgggcccagatattgtgccccaccccggaattgcgtgaggggcccacaagtcaggctttccctaaaacactcacttgtggggttctggagaccgcgggctcttatgagctctgctcctcacaaagtttttgaccttgagtgagtttcccgagactcagttttttcatctatgaaatgcgggtgatgacgcgcggctgcgagttaggactgcccagtacacgaagaaccctggacaaatgtacttttattagtcttactagaacccacattctcatttaatgttcacaacgtgggtattgggagggcaaggatgactacctccgtcagacagatgtgaaacgtgccaagcccagccctaaattgagctttctaaacaccgagtcgcggtcaggctttccagcactgtcctcaagcctgagtgcgtccggagtgcaaactacaagccccagaaggcaatgcgccagcagtgatgggagtgggcgcggaggcgcgggctccccgactacgcctgcgcagcggggctgagttggagaacgtcttagactacaagttccgggaatcagcgcggcgaggcctgagaagaagacgtttgcgcctgcgcgtcgcgggcggggcctctggggcggagcggccaccatcttggaacgggaggcggagcagagtcgactgggagcgaccgagcgggccgccgccgccgccatgaaccccgaatagtgagtgagccccgcccgcgccgtccagcgcagcctcgatcccgaatacagggctgtacgcttaccggggttgtctggcccgggtcaggactgtgcggcgcccccacatccgggtccctcttccgctgacccccccccacatccgggttctgcccctccccccaggggccccaggaccccggctcaaaaccccgagccctcgcacccggggcccagacgtggcgacccccaggggcagctcttggagctcgagacatcggtcctaccaggccttatcggtcagatgaccccgcagtcccggtcacttcaggcctcagtttccccacctgctgcttgacaactgtcccggagttttggagcccgtcttgatagtttctggtctcgggttcaggcttgggccctttaggtcgggcagtgaatccctctacccttctctttctcctgaagcccggctcctggggccggcccagaagctagccaactacgcgggaggccccgaagcgccgcttgggtcgcgtctcccgcaggtcctctcttccggggctgcctcctaccctttgcctgggtcgcgctgtcctgtcgctcccgccggtccgtcctttcccgccctctcctcgcttttgctcaggcccccaacgccaccgtcacaccccttcccttggctgtcacactgcctgtgaagtttagatgaatatggaatttgctctcccccttcctgtgggattctctggtcctcaaactctcctcactcttggtcactccccctgcgggtaggtggcccacatctcatgcccaggactaatagttttccccaagtatcagttatcttcttccttttctgccacttcctttttctactccacatccaggtctcagatttccttggggaagggtgaagctctgagctggattgggaggggaacagagaagggaaccagcaggctctcgaagggactttggagtctgagaaac

SEQ ID NO: 3214 - DNA, 6000 bp, Homo sapiens
atgttttttgtttgttttttaaaacaaggtctctctgtgttgccagtggtctcaaacttctgggctcaattgcttgattttcccaccccaggcttccaagtagctaggattacaagctcgtgtcgccacactcagctagaatatttatctatgtttcaaacctaatattcacatattaatccagatggacccaccgtatataattaatgttatattgatttgacatgatggtaatttatacagctacatgatctttgatggtgtaccagaaatgatgttaaggtaagtgttccgcaattcaaagtcttacagctgatgtggattgaatattggggtaaagcctaattttggtacatctctaaaaaagctactgaaccttatagaaacaagacaattagagttttccccattttcatatccctgcacctaccctatcaggcttttgtctaccagatcaaaattttacaatttgctcctttatacattttttttgtgttgtttttccagacagagtcttgctctgtcgcccaggctgcagtgcagtggcaagatcttggtccactgcaacctccggctcctgggttcaagcgattcttctgcctcagcctcccgagtagctgggattacgggcatgcgctaccacgcctggctaatttttgtattcttagtagagacggggtttcaccatgttggccaggctggtctcaaactcgacctcgtaatctgccttccttggcctcccaaagtgctgagattacaggcgtgagccaccaagtctggcctgatacatttttaaacatattagttgtagttccagtctcttatctctgtccttctaggcattctgttctttcttcgtttaattcagtaatacttatagagcacttaaaccctgagcattttatgcatgtatttcagccaagtgaggttttaagactgcctttaaatctcaactcagatgttacctcctaaaagatttttttcagcctcctgagttggaccttgttacatctgtattctcagagcattttaaacttactttgtttgtagcatcacattgtaatataaagaattgtttgagtatctcctttaccagattttgagctccttgaattaaaaaactgttttttcttgttcatttctgtgtctcaaagacacagaatgaggctgcctgatacactgcctcaagtaagcaagtacttggtacaaaggagttacagcacatatgcatttaatttatgggtttacactgtgtgcttaattaaaagataaataattgaaataatcaggcagtttcactggctgttgtacccagtgggtgtatgcctaagattgggacaatataagaagtataaactgttgttccagtatctgttctcatatgcctctcaaaagtaaacatctcaccaggcttgagtgcgtttctcctgttgaagataacttttcatagcttcatacctcaaacacaagccagccactcccactgacactcattccaatgatggaagaaaagccagctgtgttggacttgaggggtggtgtattaatctctaacatagtgcttttctaatgaacgatgaaggataattttgactggactgagtttcacaatatattatacactgacttcagaacctaactctcccccccacacccccgccaagaagaagtcttgctgtgtcgcccaggctggaatgcagtggcgtgatcttggctcactgcaacctccgcctcccaggttcaagtgattctcctgcctcagtctcccaagtagctgggattacaggcatgtgccaccacacccagctcatttttgtattttctgtagagacagggtttcaccatgtccaggctggtcttgaactcctgacctcgtgatccacaccccttggcctcccaaagtgctgggattacaggcgtgagccaccgcgtccagccctgaacctcactctttatatgaaagataggaatgctactatacagttttgttaaatgaatgatctgtcctttttctgcgtttctgtaatactttattattcaaatgacatttttgctgcttatttcatagctgtttacttttgtcttatcccaccagttaaaaaaacaggaatcatgtctttatacctctttgtatttggtatattgctttttatataatactcgtttatagaatgaatagacattttattttattatttatttatttatttatttaaagacagagtctcgccctgttgcccgggctggagtgcagtggcgtgatctcagctccctgcagcctccacttcctgagctgaagcagtcctccaggttcagcctctccagtacctaggactataggcgtgtgccaccacgcctggctaatttttgtgtttttttttgtagagacagagtttcaccatgttgcccaagctggtctcaaactcctgacctcaagtgatctgcccacctcgggtgggtcccaaagtgctgggattacaggtgtgagccactgcgcccagcattagacagctcactgtacagtgatcataaacctcagtaccctttgctaaatgttccctctcagttatcacttttctctctttcccacagctctttcgacgtgtagcagcagctttgccgggaatggaaagcacacaggacagaagcagagaagatagtatcctttttatttcattggaaatttttcattattaacactagtctttagagccctgcttgcttggctaaagaatattgtgccattgccttttacaaccaggaactgatgacttaaaggcatagaaattcatttgttttctatagcaaatgaggtctggttatccaagtgcaccctttgcagcctgcttctcgttgttaatcagtgagaggttttgtgtttgtttgcttgcttttaaatgagcaggaaactcttagaatccctgtgtccttgcctcttcattttgagtcccattgactctaggctttttcctcatggaatatcaaattttcatttctttttctaacacttgagctttctacttgacacaggcaagaaatagagtggagctttattgtagcctctgctttcagaaacaggacataatattagttcatttccaaggattgggacatctaatattagttaattctaaggatttttaatttgatgttttcagtgtttcatattcaccttctagtgtatttccatatgcaggcatttttattaagccatatagtttgtagcactttgtattcagctcttcccacttgtaaatgttatatgttttcataaaaaacataaaacaggccgggcgcggtggcttatgcctgtaatcccagcactttgggaggccaaggcaggtggatcacctgaggtcgggagttcaagaccagcctgaccaacatggagaaaccttgtctctactaaaaataaaaaaattacctgggcgtgatagtgcacgcctgtaatcccagctactaaggaggttgaggcaggagaattgcttgaacccaggaggcagaggttgcagtgagccgagatcacgccattgcactccagcctgggcaacaggatcgaaactccattccccccccaaaaaaaaaaacacaacaacaacataaaacataatatgtttcaaaaacaaaacaacaacaacaacaaaaaatgttctattgagttgaagtatgtccccgcgcccaccgccgtttttttttgagatggagtctcattctgtcgcccaggctggagtgcagcagcgcaatctcagctcaccacaacctctgcctcctgaattcaagtgattctcctgcctcagcctcccaagtagctgggaatacaggcatgagccaccatgcccagctaatttttatatttttagtagagatggggtttcgccatgttggccaggctggtcttgaactcctgacctcaggtgttcggcctgcctcaacctcccaaagtgttgggattacaggcatgagccacggcacccggcctgaagtcccattatttactaaatgtttcctctgctgttggaactatcttgtaggctattttcagatttatattatagatgattctatgaggaacatcatcttcatatcacttcttgccactgtagaataagttccttaggatagatacccataaatagagcttgtacctcattctgacccttgttgcatatagtagatataaacaagtttattccatttgagcaccttatatggtgaggcggctatgtagaaaatagtgagtgtgtaggctctgaagacagataggaatataagggccatcccagaaatgctagtgtttggaagaattgaaattgtactttcccatttatggcttcttaacttttgtttcagtgattgacataaaactggaaaagcctcaggagcaaccagtcagtgaaggaggctgttcctgctaatctcccatgtcatcttcaaccttcttcagaagctcactgctttggcccccttactctttcattgactgcagtgtgaatattggcttgaaccttttcccttcagtaataacgtattgcaattcatcattgctgcctgtctcgtggagatgatctattagcttcacaagcacaacaaaagtcagtgtcttcattatttatattttacaaaaagccaaaatatttcagcatattccagtgataactttaaaaattagatacattttcttaacatttttttcttttttaatgttatgataatgtacttcaaaatgatggaaatctcaacagtatgagtatggcttggttaacgagcggtatgttcacagcctactttatctctccttgcttttctcacctctcacttacccccattccctattaccctattcttacctagcctcccccgacttcctcaaaacaaacaagagatggcaaagcagcagttctaccaagcccattggaattatcctttaattttacagataccacttgctgtaggctacggaccaagatgtccaaaattattcttgagcactgatataaattacggtcttctttgaggtcaaaattcagccatcatggtaggcagtgcttgaatgagaaaaggctcctggtgcatcttcaaaatgagtcctaaagaacatactgagtacttagaagtagaagaacataagatgtatttctgactaaaacaaatggctctttcacatgtgctttattagactctgggagagaaaattaaccaagtgcttcagaacaggtttttagtatttaattcttcacggtaagaaaatgaagttctaatgaactgtttctcccaaggttttaaaattgtcaagagttattctgtttgtttaaaaaataagaaacctctttaagcaatagattttgcttgggttttcttttttaaaaacataatactgtgcaggcaaggcactgtaaaagttttaattccttccagaagaaccagtggaagaatttaaatttggcgctacgatcaaaactactgaattagtagaaataatgatgtctaaagcttaccaacaaaagaaccctcagcagaataacaaaaactttgctcaggacatttgaggtcaaattgaagacggaaaccggaaaccgttttcttgtaagcccctagaggcagatcaggtaaagcatacatagtagagggaaaggagagaatggaaataaaactcaatattatgcagatttatgccttattttttagcattttttaaggttgggtctttcaggctggttttggtttgtattagatctgtatagtttaattaactggtgatttagttttatatttaagctacaattaatcttttttctttggtgatatttatttctttgccttttttttttttaacaactttcaatcttcagatgtttcgttgaatctatttagagcttcaccatggcaatatgtatttcccttaaaacactgcaaacaaatatactaggagtgtgcccttttaatctttactagttattgtgagattgctgtgtaagctaataaacacatttgtaaatacat

SEQ ID NO: 3215 - DNA, 6000 bp, Homo sapiens
atcccagcactttgggaggctgaggcgggcagatcacgaggtcaggagatcaagaccatcctggctaacacagtgaaaccccatctctactaaaaatacaaaaaaattagccgggcatggtggcaggcgcctgtagtcccagctattcgggaggctgaggcaggaaaacggcgtgaacccgggaggcagagcttcaatgttcagaagagctatcttagctctaaatatcatgtccttacacagctacatcaatggcagaaaaatggcagttttttctcatttattccttttcatcaaggaagaaaatatgtctctctatctctcttcttctcttagaataaaaaaagcctctagcacatttccttcatctcccactggctcagatggactcatgtgcctataacttagctgaagggaggctggaaacacatctgtcatttctagtatatatggtggaagtatgtgtgtgtgttatgtgtgcattgctggatatgcaaccactagtgtctgtcactaagaataagatgaaattgactgggcgcagtggctcacgcctgtaatctcagcactttgggaggccaaggcaggaggatcacttgaggtcaggagtttgagactagcctggccaacatggtgaaaccccgtctctactgaaaatacaaaaattagctggacatggtggcacacttctgtaatctcagctactcaggaggctgaggcaggagaatcgcttgaacccaggaagtggaggttgcagtgagccgagatcggccactgcactccagcctggacagagtaagactctgtctccaaaaaggaaaaagagaaatttcagccaagcacagtggctcacgcctgtagtcccagcactttgggagagcaagatgggcagatcatctaaggtcgggggttcgagactagcctgaccaacatggagaaaccccatctctagtaaaaatacacaattagctgggcgtgatggcacatgcctgtaatctcagctactcaggaggctgaggtgggagaattgcttgaacccgacaggcggaggttgcggtgagccgagatcacgccattgcactccagcccgggcaacaagagcaaaactctgtctcaaaaaaaaaaaaaaaaaaaaaattcagtcctcctgcaagaagttttgtgtctctcagggcagaagataagctataattttattacaatttctgtgtgatagattccctacatactcctgggcttcaatttagatatgacctttaaatagataatgaaagctgctttaggtactttgaatttggagctgtgaagactgtcctctcccattgttcctaatttttagttacaagatctgttctcagcatctttttcataagtaatggtttaggaaagaagtatcaaattacatgacatatttttgggtaatgttctctttctccaaaatgctcttaaccttccttctctgcatgcccaaatcccattcatcctttgaagacagtgaaaaataattcctcttttatttgattttgtcagcaaacatctgctgcatgcttactatgtagcaagcactcttcaagcactggggatacaagatgagatctgacctcgtggaggttacagtcaagtagggaacactgacaatgaacagcaattaagaataggatacaataggacaggcaaaggtacttatactgttagtggggatgggagcagatgggagcaagacttgtgtggtagactgaatgtttgtgtctccccaaaattcatatgttgaaactatagtccccaatgtgatggtattagtaggtgggaccctagggaggtgattaggtcatgagggtggagtgctcataaatgggattagttcccttgtaagagggagcccagagagctttcttgctctctttctgccatgtgagggcacagtgagaagatggttgtctatgaaccaggaagtgggccttcaccagacacagtatcttctggtaccttgctcttggactttccagtctccagctgtgagaaataaacatttgttgtttaagccacccagtcatggtattctgttatagcagcctgaatggacaaagacaacttctttaagtggtaagtgatttaaaagaaaaaaaaaaaaagacaatttctttaactgaaggatgagtaggaattggggaagagtggggaagggaggggaagagtgtttgcagtaaagagaagtgagcgtaggaaatcatgaaggtgaaaatgttggtgaaaatactcttgaaaagggcctctctaattcctctttctcctgagtaatttttccatttgctataccctacagcacttaatatgcaatgtttaggccataaagtctctgaagacaaaacttacacagagtacttggtaatatgaaggcagcttcagaggataatgaggctgtgtatgtgtcaatgcaaaatgaaagcttaaaacattaaaacattttaggtaagaggtggactagaccataaggcccttcaaaatgacagggaacagtaccacctgtctaggtgactacagagaccaaagcagcagggaggactgattcataaagttctgtaggaagtacaaagtaattatagttccaatcctcagatgttactttaaagtctatttcaggaagcataatgaaaacttggtacccatcagaaagaaaatagctactcacttttgtttgcataatctttttaaaaagtttcttggtttaagctgctctttgtatgtgccagggttctgggttaatggtggagaggaccctattagatctgacaaactacttgtaaaatcaaatgtccatgctacaagccaggtttttaccattttattttagatgcatgttctacctgcacatggctgggagaggaaccagaagggagtaaattttgatagagatggtttgaggatatagctgttgtcttgataggccagaatagatgatattttaagaactttggttcttccctgtaatttattctaggtcagcaattcatccctgggcctgagaaggcactttttcaatcctgtcatttctacagctaagcaaataactccccaataatgagaaaaagtacataaatgttttgtgaatgatatacacaaatgatatacatttgtgtatagacacaaatgtaaggacatattttttattattcacttagaaagtttttttgttttttttttttttttttaagacagggacttgttctgtcacccagatttcagtgtagtggtgccatacctcagcctccaactcctggactcaagcaatccttctgcttcaggctcctgagtagccggaactacaggagcacaccacgatattcggctattttattttttgtagagatagtgtcttgctttgttgcccagcctggtctcgaactcctgggctcaagcgattctaccgcctcggcctcccaaagtgctgggattacagacgtgagccaccgcgcccagctgctttatggatttttttttttggagacagagtctcgctcttgttgcccagactggagtgcaatggtgtgaccttggctcactgcaacctccgcctcccgtgttcaagcgattctcctgcctcagcctcccaagtagctgggattacaggcacccgccaccacaccacgttaattttttgtatttttagtagagatggggtttcatcatgttggccaaggctggtctggaactcctgacgtcaggtgatccacccaactcagccttccaaagtgctgggattacagggatgagccaccacgcccggctttttttttttttttttttttttttttctgttgagatggagtctcgctctgtcgccaggctggagtgcagtggtgtgatctcggctcactgcaacctccgcctcccgggttcaagcgattctcctgcctcagcttcccgagtagctgggactacaggcgcgcgccaccacccccagctaatttttgcatttttagtagagacagggtttcaccatgttggccaggatggtctcgatctcttgacctcgtgatccactcgcctccgcctcccaaagtgctgggattacagccgtgggccaccgcgcccagcccgctttatggattttgcaagtcatttactccctctaagcttcagtttcctcatctgcaaaattgggaggccatgattctggcagttataacattcctgggagcaatggaggagaatgttatttagtaagatgcctgtgaggaattatgatgagaggatggagaaggtggggtgtgtgcaatggtgaagaagggatctgaggactgtgaggcacggctgagggctcaggaaagaggctcccattacaaattttaaggctataggaccccacccacactttttgggggatcatattccacctttgtcccggccccgcctccgccccacccttctccccctcccctttctttccttcccctcccctcaggctgagaggcgccacacttcttatggccgccacagtgctccgctttccacagctcgagggctgcgcgcgctctcacgctgccacctcactcgcgtgtgggctcgccctcagccccttccgattggctcattatgtaagtgacgtaagggctccagcctcccactaacttatccctggcttgccccgcctcctcctggcttcttttgacgccagtggaaacctaacctgccccgtcgccgccgtgcgggaggagccggtagagctgtccaaaccaggaaggcgatggcgatggcggtggcgcgcacgcatgcacgcacgcacgcacgccagcggccggcggggccgcaggctcgcgcccgggctcgccccgcgccgctccagaggctcgcgcactcagcaggttgggctgcggcggcggcggcagctgtggaagctcaggcgctgcgcgtgagaggtcccagatacgtctgcggttccggctccgccaccctcagcttctcttccccaggtctgggagccgagtgcggaaggagggaacggccctagctttgggaagccagaggacacccctggctcctgccgacaccgccctccttcccttcccagccgcgggcctcgctcggtgctaggctactctgccgggaggcggcggcggctgccagtctgtggagagtcctgctgccctccagccgggctcctccaccgggccttgcaggggccgagagagctcggtgcccgcccttccgctcgcctttttcgtcagctggctggagcagcatcggtccgggaggtctctaggctgaggcggcggccgctcctctagttccacaatgtccacgggcggagacttcgggaatccgctgaggaaattcaagctggtgttcctgggggagcaaagcggtgagtgcgtggctcccctactcctggcagctggccgcagcgtccccgcaccgcccccggtgcggcccttccgtccgcggaggctccctgcccgcctcgcgtccgcgctcgttgccaccgcagcccttcccgatgtgccccccggtgccactggctcttcgccagtggccgagtttttaccctgttccccgggttcttcaatcctcgactccccggctccgttccccgcagtccggccatctccggtcgatctgccctccctccccagacctcaccccgcccagcctcttgtccatccctttcttcctccggtctcggtcattgcccgtaccccggccccctttcttgagccccacccttattccttgctcttttcccagttcctcagctctgtgaggcccactcagggaagccccactcccgagagcgggccctcttcaaccttggccaaggagggtgggatctgggcgttgttttccccagaggcttggccctgcgaagtgctgatgtcgtggaaggtgggaaggggtggtagtagaaaaaattaaatgattttcacctgggtgggaaattagtctgggccatagaggaaacatctgaattggagacgacttgagcatggggtggttgggggtgaa

SEQ ID NO: 3216 - DNA, 6000 bp, Homo sapiens
gggctggagggcacggtgaggagcagcgcttgtgtaatctgaagtcagtgtctggctccatcagtgtgggtgtgttgcttccggagcagggagattctagaacactgtagttcaaagggcctggggactcattcaactgagcctctagccctcatgacagagagacaatgtcaattacaaggcagggggtagcagcatcctgttgcagaaagaactaggctttggggtcagatggatctaggtttgaatcctgttcctgagactaactagctgtgtgattttaggatgatatctctgtctcagcttcctcttctgcaagttagggataataatatgagtacttacatcatagagttatgaggattaaatgagcaaatacatgtagaagagtacccaggacataaaaagcactgaataagtgccagctgttatcaatgttaacaataatagaatataaaatactgcagtagtgtttggtagtagcatatcttgtggcgtgtctactccctagatgaggcatgacttttgttgtcaatttagggctgggtgtaaatgcttttgaatgggtttcccttattcagggggaaacgctgtctcatcacatggggattggtgatgcctgggctgttactttatgtaccaaacagaagggcttcgtcaaagagtagaagtttgcagataatcttgtgatcttttcattcagtaatgtgttttccattagaagcaaaacagtaactacaacagattacctggagtttacagtccagctttacacatagacagcctgcattattaaagaccaatttttacccagaggtccatttaaaaaacatgcaacgtcttggcgtggtggctcatgcctgtaatcccagcactttggaaggctgagtggaaggactgattgaggccaggagttcaggacaagccctgggtaacatagtgagaccctgtctctacaaaaaaaatttaaaaaattagctgggcacagtggcttgtgtctgtaatcccagctacttgggaggctgaggcaggaggatcacttgatccatgatcgcgccactgcactctagtgtgggcaacagagcaagatcctgtctcaaaaacaaaagaaagcaaaacaaacaaacaaaaacacattcaacagagcattagagtaatttcttatagaaaggggtagtgtcttaacttattctgtagcttgctccaggtggtaaccacatgagataatgttcaccatgacaaagccttttttttttttttttttttttttgagacggagtctcgttctgtcgcccaggcgggagtgctgtggcgcgatctcagctcactgcaagctctgccttctgggttcacgccattctcctacctcagcctcccgagtagctgggactacaggcgcccgccactgcgcccggctaattttttgtatttttttttttagtagagacggggtttcaccgtggtctcgatctcctgacctcgtgatccgcccgcctcggcctcccaaagtgctgggattacaggcgtgagccaccgcgcccggccgacaaagcctttttttcaccttctttttctaaaggtgcataatttgggcaccgttaactttctttaagagccctgtttctaaagtctttacttttgacattctcctctggatttcctgctttggttctttgacctccagcaaagatgtagaaatgagtgtgtgtcaaacaatctaggcacagaaaaagaatgcagtccagtcctgtgtttcctgtttcttatgggcttatgaaagcagagagttgtggtccacagagcctcatgccttcctgctgtccatgtgccttccgtgagttttattatttttctttctaatagcgttattgaattttagtttatatatcatgtccctgagtgtttatcaggagtttgactttgattcttatttaaacttctacagggtggtagagttttatatttgaagccagaggtgaagaggaaagggtgatcacattgattaagtgcttgccttcatcatgtaattcatccatctttcttgagcttttgctctgagccagcattgtgaaaggcacttgggtagtggttcaaggacatgaatgtgacagccagattatctgggtatgaatctcagctccactagttaccagctgtgggaccttacgactgcttttttaacttctcttgtgtctcagcagccccctctaccaaattaggatactaatagtatagcgtccccctcatagggttgttttgagattaagtgacttaataatatagaatgagatgatgatgatggggaggggttaggatctggactcaacctgacacgtcactgctctcatgctgctcacagtcatgagtgtacatgtgtgtagggctgaggtgctgaggatggggccagagtgtgagatatgtgaataattaattacaggtagcatggtgagtttatagcaggaaaggaggtcattgtgggagcctagagcagggaggcccaggaccttcgtaggtcagaggagcagactggaggaagtcatgttgaagctgagatctcagggaggcttggggtggtgggggagggtgcgaggttcagttgtgttttgtgttctaggcagatggaacaatatatgtgaaggtctaaggagaaaagcaatcccatggtatttaagtaactgaggaaatccagtgagcctagaatgtggattatgaggagagtggtaggagacagagctggcagtgacagcaggaaccagatcatggaaaatttgagaatccttttaaggagtttgggtgacaaagagccaggtactgcccttaggggctcccattcattctttcatgcatcacagttctgtggtataggtgttattggccccattttgttgatggggaagctgaggctttgaaaaattgtcatttgcccaaaggcacaggcttagaaggtcagtgcagccagggtatgaaccttggtctctctggctccattttttatgataccatatgcctttggaacatgaatctggtgcttagctttatgatttcaggccaccctcttaatttcctttaacctcagttcactaatctgtaaaacagataatgtgttagtaaatacaaaccttatatacttgtagaaacaaatggaaatacacataaagggccaagtataatgctaccactgcttatggacccagattcttgtacagagaaatgtttttccttcacaggcccaatgaactgggatggaaccccatgagctacctacatgttggcttggttgtcagtcatttttccaaggattaattgaaatctacacagacatcatctttgcacatagggaatttactcccctggctacttgacaggttcagctaattgggctctcctctctgccctacaagcctgcaggcatttgagctccaggtctgctggtaggagtgaccctgacgctttcctatctcccagcacccttcccctcatgagctccctaactgcccatttcctctctctccagagtctattgggtctgttctgcctacaccttaagaaaagagctccactcttgcactgttggcgcaaattgttatttagctttttttttttttcattatttaacttttctcatgttggtcttgagggcagacattgtctcttctctgtatttcctgtggtgataacagaatcctatagtaagcacccagtagattacaattgcttttaccaggatagggctttatgtgtatcaaggttggttttttttttttttttttagacagagtctcactctgtcacccaggctggagtgcggtggtgtgatctcggctcactgcaacctctgcctcccaggttcaagcgattcttgtgcctcagcctcctgagtagctgggattacaggggcacgccaccacacctgggtaatttttgtataaggttcttttgtaagttttaaaaaatcttcacagcagtccactgaagtagacagagcattcttttagtatgcccttttagtcacagtctttctagcgcagttggagaaactaaggcctacacataagcaacatgcccattaattaattttttatttctataggatagacatttaaaagagtaactctgtcccaggggctaggaaatagagctgacaggcataatcccatcccttaaggatgaggcagatatttgaacaaacaattgtatacagcaagtgaagttttaggacagagaagtgttgaaagtgtttaactttatttggggaagatcagtgaaagattcaaagagaaagaattgctggcattggaccttcaaggacttcaaggtgcagaaggggtggaagggagggcatcccaggcagaagaaatggcacataccaaagcccagaggagtgaacagacaggcactttgggaggccctgtagcatcagcatggctggcaggagatgtataggagatagaggggaaagatggctatgactaccatttgtaagaccctaagacttccagaagcaggagactaaaagggccctttatagttccttcctcttcattcagtctgcgcatcactagtacttctttccagagtcatacacattccataaacgtcctttaagctctggatgggctcgctattgtccttgcttttttgcaccccagcttgcctgcacagaggtttgtcatctccttttcatgctgaaagaaaacagatttatcacaggaggaaactgcgacatgatagcttggaggaataaaggttaccaggtgaaacgacatctgcgtcatttattctctgtggcatgaggtagctgagaaggaataaagtccgtctgtgaccaaacacctgtgtttctgtctagctggcagggtcaccggaggggagctttaaattgctctttaaatgagtcagacctgttcccccggagagaaggctggtgcagcttgagctctgtgggcaagtctgactgggcctttctcacttttgcctgtgtttgccttgcagctgtgtaaatgagtatggaagattatgatttcctgttcaaaattgttttaattggcaacgctggtgtggggaagacgtgcctcgtccgaagattcactcaggtaagggaactcgtaagggaactcgtaagcccagggttgggtttgtcagtctagcctgaggggttgggggaatctgtcgagatggatgaccagtttcaatgccagggtcttagctgtgagttcctgatgcaccctttgaaagctgcatctgctttgtagccaagacaaggggtttttaaaccacctcacgggagcatggccctgggagtctccaccaaccctcccatgcctcttcttgcttcctttaatgacaaaggcaagtggttttgctgtcagtgtgcagtatcaaaactaaattattggataaaaggaagttactaattaataatccccaggtggaaacaaatgaatctggacgtcaaactgaacctaaattttttaaaactctaatacaaattaaaccaatcaaactctgcctatgcccccttacatcctcccaggaaacttgagtgaatcattttcatttaggaccaaataggccaattttctaaacctcttcagtaggaatgaaatgaaaatagtgaagaattatctgaactgaattgaatggcctctctgggttgaattcaattcttatcatatgatctaagtacaggttccctttgggactgcccttttgagaatcactgctggagattatatactgcttttatatagaaatcattccaaagttgaccttttttgtgtgttttcccctgaaaaatatgaatgataccctttgtaggaccattacatacatatcttgaattttcataaagtacttgttcagcaagttggaacttgctcctctatctaaggcataggataacctggtgctgtggaaagagcactggcttgggagttgagacatgggtcttagtcctggttctgcccctggcttgctctgtgagcctgggtaagttacctc

SEQ ID NO: 3217 - DNA, 6000 bp, Homo sapiens
gaatgaattaaagattttccctagaggacaggcatagtggctcactcctataatcccagcactttgggaggcagaggcagacggatcacttgaggtcaagagttccagaccagcctggccaacatggtgaaaccccgtctctactaaacatacaaaaattagccgggtgtggtagtgcctgcctgtagtcccagctacttgggaggccgaggcagaagaattgcttgaacctgggaggcggaggttacagtgagtagagatcgcgccactgcactccagcctgggcgacagagcaaggctctgtctcaaaaaaaaaaaaaaaaaaaaagtaatctgttagatctgttagcaagattatatgattacataatggtacacttgatgggaattaggaacataccgatatattcctgtatgaactcaagtcacttaaccagaccacttcctaagctgtaaagaggaagctttgaatattaaatgcttatctgaaaccatttggaaaagcaaagtttattaataccactctgaagtatctgaagctcatactcaattatttaaattaggaacttaagctcctctattaaaaggaaaatgtgtattttcttgttgaaacataaaatataaagcacatttcatgtgtactactgtcttaaaaattgagagtccaacattaaaattaaacaagtattgaactgcattatacaagaaatcaaaatcatgacaaaaaaaatccactgtttaaagagtaaagagaaacagtggtgagcttgctgtatcattaaagacactgaacaggtaagataattggattctaattctgccctgcctttgccatcaatgtacagtgtgaccactagcaatttttaatttcactgtgtgcatgcccatttccttatctgtaaaacatgggctgaggaatttgtaagatttctcagctctaaaaaggggtctctgtgacctaaaagatactctattataatatcatttgttcaaagatcataaatattaacatcaataacttaaaaattcaagacttagggcaagaaaatttttattttcagaaaattctaaacaatatattgtctctggatacttcagcttttaagtttctgcataactatcataattttaccacagcgttgagctcttactaggtgtctcttaacattagactttcttaatattaggctaaaccctcattctaagaaatatacaggttagtcaggatatcatggttggtcccttttttttttttttttttaaacgggagttttgctgttattgcccgggctagagtgcattagcacaatctcggatcactgcaacctccgccttccagtttcaagcgattctcctgcctcagcctcccaagtcgctgggattacaggcacccgccaccacactcagttaattttttgtatgtttagtagagacggggtttcaccatgttggtcaggctggtcttgaactgctgacctcgtgatccacccacctcggccccaaagtgctgggattacaggcgtgagccaccgtgcttggcccggttggtcctcttaaagctaaaactgatctcatctcctctcactcccctctccctcccacaattgccatgtgtaaaccgttcaccaggtaaattccttatctacacattttcagaattcattcatgggtataattagcaataaacctaaaatctttctcaaagcttttgttattgtgtgacttactgcaaaaatacaaacacaggatgtagaggactactccacccaactcttgtagactcacctatagttttaaaaacacaatacttggttctaaccctggagatttcaacagggatgggaaggtaacagccatatacttttagagctgtataggttatcctgacacctctactgaaaaaaacccttgctctaacagcaattggcttcatactcttaaatgagctacctataattttaatacaaatccatgtcctaattctctttattatttttttgagatagggtcttgctgttgcccaggctggagtacagtggctcaatctctgctcactgccacctccacctccccagttcaagcgattctcctgcctcagccaccctagtagctggtattacaggcgcacgccaccacacctggctaacttttctatttcttggagatggggtttcgccatgttggccaggctggtcttgaactcctggccccaagtgatgtgcccatctcggcctcccaaagtgctaggattacaggtgtcagccactgtgcctggccctaattcttttttgagagatgaaaagctttacctcctctagatattcctaattccactttaacaatattttcctaagttgtggtgtttctatgggacactgttattttttcagaagctggcctccccaactcctcaaatatcaattttataaataaaatttataatgagtgcaggattttttcatctttatggtcagatgtccattagatacaaggatagaaaaacttcaaactacccaaacacatgacaaattatagaaatcactgtattctagaggtatcacttctcaaacacaagctttctttcttttttaaaaacagacatagtctcactgttgtccagattggagtacagtgacacaatcatagctcactgcagcctcaaactaatgggatcaagtgatcctcctgcctcagcctcccaagtagctaagcctactggcatgcactactatgcccagctcacacagaaggtttctgagtaatctgttgctctttttccctacaatttgtcttccatataactcaaactgacaaggctatggcttacataaagaaatatattataaatcaacaacactcatgataagtttacataagacatgagaatacacctgaatcaccaaccgggaaaaatgattgaagagcttgaaattaagcctaagtgtaagtctctgttaagcttacaacattacaatagttaaatcgaaggttagaaagaaaatggtagacattgctccttttcctgtacttaccaccattacttagagaagtttctgaataacaacaactttgagcctttttcattgttgtattcatggatgacaccaacacatactacttctgcttaaaaatcaaactcattcatcttgacttgttcccagaaacatgacacagaagatcattttttgaaaaagtatttttgtaattaccatctgcatacacctgagagactgtttctaacatgttttggtcatttttaatcattctatctgcctttctttgttataaggatctatttttaattttattcactcctaacatagaggggaagtgcataccttcaatgacgcaaagtaactagttaatgttgtttcagaataatatgcaaaagggaagggaggaaacagcacaaagtatatcatatttttacacatcagacaccttcaggaagaaaggacatttctcatcttagtgtgacagactctgaaaaagaacacacagcactgtttcagtgacacaagaaaaaaagtacagttcattttgagatactgtgcaaaatcactcaaaagacaattaactttggtttcagtcacttagttaaaaaaaaaatttatccatgaccgatgttactctggaatctattgccagacgtcagaaggcctatcatcaataatatcccacccctcccgccttttctgagacacgggcttgctgtcgcccaggctggagcacagtggtaggatcgaggctcactgcagcctcaacatcccgggctcaagcgatcctcccacctcagcctctagtgtagctgcaactacaggggtacaccaccatgcccagctaatttttttgtttaatgtttttgtagagacggtacggggtctccgcatgttgcccaggctggggttgaactcctagaatcacgctatctccccgcgtctgcccccaaagtgctgggattaaaggcgtgagcgaccgcacctggccaatatcccctttgaacatctgctttcgctggttggtaaaaaagtgtcattttaaatttagtgttactccttcaggctattccctctctcttcttacttgcagggccaaagcaacgtctctttccaccttggtcaccttccaacaacgatttcttcggacgcctttgttaatcattcctgtatgaaaaatcagtgaatctgaagctttggggagagtgaaagggggttggaaaacaaacggcaaaacaaaaatgcatttcggaggactaccccaactctgtgggtggaagtgggcttctccgaataaaggcgagggtcgccgcctcgggtcctcgcacctcaacaaaagacaccaactctctcaactgtactgttaacagatctaaatgatactccaagcccaaaagtaaaccgactctctcaatctcttagctaaaaaatggagaaggaagcgtagggccccatgcaaccccttcaggagctgagaccgaggctcactgggcctctggatgccgcttccagtcggtcccgccctacatcagtccccagcatggcctccaccctctggttcccaggttcgtgcccgcggctatccgaccagatcgtcctccacctcaccgtccccactgaaccaccacttgactcctgcgcacccctaaaacctctgcccggctccgcggaatcgtcccagtactcctaacatggcggccgagtcccctttgctccttcactctgggcgcgtcccacttggagcattttgggcattgtagtttcggggattgcctgggtatcccttcaggacgtaagaagactacagttcccagaaagcaccgctcccgagcatggctattggggacgtttggacagagggatgatgtcattgcaaaagccccactgcattcattgtgctacggtctctccaccccctgctgctgctgggcttgcgattgccgctcgctccagctgagctaagtgtagcagcagcaccagggcagggactgactccagcccttggactcaggacatcgcagaccttcccttgcgtgcgtgactcattcgcacatccatttctgtttatgcctggggtggggagaaaaatcccaaaccaggtgagttgaagtgatttattcaaatgcttctaccaagttattcctcccgcttagttctcaaggctttcttttgggaagctgtgagcggtggggaggtgggggggattggggagaggcttgcaggcacagctaaggggaaaagctctgtgccatttgggtcactgcaaagaacaactccagcaaccttcccccgccagaggacgggtgcctgccaattccctagtcgcaactcctctcaacctttttgaggcggagagagggggctgggctgggaaggatgttggggagtgctcttggaaaatctgaggaaggcagaggtgggggactgcagtcctgtcacacacggcccgagagctgaggtttgagtgggaaggggtgatgcgtggggagaaatggagacagtgaattaatgtggtcgcactactttagaacatttgaatgtcgcttggacgagcactagttattaatttttaagatgaacgtgcttaagttttgtagggctttattttatgtgtgtatgtctatgtggtttgtctcgccttttctgctgatttgaggtgacagtgtcctttaatggtgcactccgtgccagtcagaaacatttcacgtgtctggcgaaggttctttcaggctgctggaagcagcgtttttgttaaatgttttccgttctccgactgctggattcaagattgtttggaagtggagccgacagatttgtgcttgtgtgttttaaattacattgcataggctctttgccactgacaatggtaccataatgagctgctgtttcctgaggcatagtcactactcacaaataacggtttgaagagatcgattagggaagaggggttcattttaacacattagagaaagggaaagttagaagcgctgttaaccttcatttg

SEQ ID NO: 3218 - DNA, 6000 bp, Homo sapiens
cccctaccccctagcctagtattgccaaagtacctctttgtacgtgattatttacgtttgtctccctcacctgagtgaattcctccgaagtaaacagtatcttattcaatgttgttttcctagcatggtgcatggaaaactgttataacaaataagtaaactgagtatactgttgttttccatgctggggtaagtataaactattggaataaatacattgtacagatgaggaaactaaagctcagaaaaaaaaatgtgatatgtccaacatcatacagctaataaataagcagtgtccagtgtgagaaagcctcgtccagagctctcttctactccatcatgccacatcctacacatggacagcaagagtgaaagatcttagatgtcttccaggaacctcaaactcagcatgtccaaaggtcctcccttcggaaaacaaaaagacctggttcccattcagtgttctctttctctgaaaacgtcatccccagttgctcaagaaaaaaactcaagtcatttcatgactcccttttctccctatccccccatccaatcaatcaacaaatcttatcaattacaattttcaaagttagtgtcggccgggcatggtggctcatgcttgtaatcccagaactttgggaggcagaggcaggtggatcacctgaggtcaggagttcgagaccagcctggccaacatggtgaaaccccatctctactaaaaatacaaaagttgccaggtgcggtggctcacgcctgtagtcccagcactttgggaggctgaggcgggtggaccatttgaggtcaggagtttgagagatcagcctggccagcatggtgagaccctatctctactaaatatataaaaattagctgggagtggtgggtgcctgtaatctcaactacttgggaggctgaggcaggagaatcgcttgaatccagagatggaggctgcagtgagctgtgatcatgccactgcacttcagcctgggcgacagagtgagactctgtctcaaaaaaaaaaaaaaaaatacaaacgttagctgagcatggtggcgggcacctgtaatcccagacaatagggaggctgaggcaggagaactgcttgaacctgggaggcggaggttgcaatgagccgagattgcgccattgtactccagcaagggcaacaagagcaaaactctgtctcaaaaaaaaaaaacaaaaaacttagtgtctctctaaaccctctgtcaccaccctagatctaagcaccatcatccctcatacagacgacaaaaattatttgctacttggtctctacacattcactctgaccaagtctttccttcaatctcctctacttaacagccaggataatattttaatatcatcctacatatgccattcatctagttttttaaagccaggctaggttctcattagccttaggataaagaccaaaatacacctgtagctcaaagaactgcctactctctagcctctgcccacctctccagcctcattcttcattctagtctttctcctcttgctctgtctctaacttcctttcaaatcctcaggttcaccactcttccctttgaactttgaacatgaagttccctctgccagaaacctttgtcccactataagcatctcccactgccatcctgaattactacttccgtttaccctccaagtctcttgaagtgtcacttcctataggaaacctttcctgataaccctagacaaggggaaagtaccatgtcaggcactcctacccaacccttttggaaatggcattcatcacacttgcaattatttattaagtatatcccctattagaatataagctccatgaagtcagggaaagcatttgttttcactgatgtatccacagtgcttagtacatggtagctgctcaatcaatataaattgtcagaattataggttggggccagattatagagggctataacatcagtaaaccaaagagcaaggatcattatccctttgcaaataagtaaaccgaagcagaaagaaatgaatagttatttaaggtcccagagacagcagtgatgaggccaaatctaacactacattcagcccatttctcctccctaggacaataaaagaaactttggtgggtaaggaagtatttcagaagaagaaaattaggaatgagaagatggtgcataaaaggtctaagaggacagcttctgaatctgcctgttacactagttgcctccagatggatagcagttagactttccacacctagaggagcactgctgttacataaacaaatatagccactatcacactcttcccgttaagagaagagaataaaataacaaacttctttcctgcacagaggagaagaaacaaccagggtgggtggggaactgttgtcctccaagtatcttcaaaaaaccaaatgggcagtttggccacctggattgctactcagcaatccacagggaacaggaagaaagaggggggaaagatcagccttcccaccaccagctgcagcaaggataaggaaaaaaaaaatgtattgtataaggcaagccacttgaagactacttattccttgggaattatgagaacatttcatgtagagcatttaaaaaccttgctaatccataggcaggtgccagtgaaaggaaaagtggcatgagcccaactgcagcatttcattgttcacatgctgctggggctaaattatgtctgtcacaggaactacaaaccagaccaggggtcaggctcattgctgctcatcctgccaagcacagactgcaagaaaaagaaaaggcaaagaaattctcttcaaagaggattctgcaaaaatattcacatagtctacatccacccaggagttcctagttgaagtggaggaccagggagtgtgttctaagattgaagagaaagagatgtgatatgctggtgataaaggaggggttttgaaacagaaaggaaaaatgtaaactgcaaatggagagatagagaaataaacagaatttcaagagatgtgggtgggatggggtggggtggggggaagaaatgaaagtacaggagagaagggtagggtgtccagaagagcagagcgtcatcaacagagagacgcagaggcaaaggctaactgttgatcttttcccaaatccaaaagctgctcattggcatcccaataaatcactctactacaaagcccatacaatggactgtcctttgcattcagcatcaagcagcatttaatgaaatatcacacagctacaactttggagacctaaggatctgaatttaaaatgaacaaaattggcttagcagcagaagacagccagtaaagaatttcgcccatgtctgactcagctaggaaaaggtttagcattctagagttaagcaaatactctggcatttctccttcttttgacattccaagagggggtgtggttgaccccaggcccattcatttccaagggtgtagatctctcagccaagactggccccatctgttgtggagccagccagctgtttatctcaaagtaacatatctattgccctaattatccctataactcttacaagagcatcatgtaagtcagaatgctttctctcctgttaaatgtcagttcgtttaaaaaaacaacaataacaaaacaaccaaaatcactcttccatgggcacctttcagtaatggcaaatgaaggttaacagcgcttctaactttccctttctctaatgtgttaaaatgaacccctcttccctaatcgatctcttcaaaccgttatttgtgagtagtgactatgcctcaggaaacagcagctcattatggtaccattgtcagtggcaaagagcctatgcaatgtaatttaaaacacacaagcacaaatctgtcggctccacttccaaacaatcttgaatccagcagtcggagaacggaaaacatttaacaaaaacgctgcttccagcagcctgaaagaaccttcgccagacacgtgaaatgtttctgactggcacggagtgcaccattaaaggacactgtcacctcaaatcagcagaaaaggcgagacaaaccacatagacatacacacataaaataaagccctacaaaacttaagcacgttcatcttaaaaattaataactagtgctcgtccaagcgacattcaaatgttctaaagtagtgcgaccacattaattcactgtctccatttctccccacgcatcaccccttcccactcaaacctcagctctcgggccgtgtgtgacaggactgcagtcccccacctctgccttcctcagattttccaagagcactccccaacatccttcccagcccagccccctctctccgcctcaaaaaggttgagaggagttgcgactagggaattggcaggcacccgtcctctggcgggggaaggttgctggagttgttctttgcagtgacccaaatggcacagagcttttccccttagctgtgcctgcaagcctctccccaatcccccccacctccccaccgctcacagcttcccaaaagaaagccttgagaactaagcgggaggaataacttggtagaagcatttgaataaatcacttcaactcacctggtttgggatttttctccccaccccaggcataaacagaaatggatgtgcgaatgagtcacgcacgcaagggaaggtctgcgatgtcctgagtccaagggctggagtcagtccctgccctggtgctgctgctacacttagctcagctggagcgagcggcaatcgcaagcccagcagcagcagggggtggagagaccgtagcacaatgaatgcagtggggcttttgcaatgacatcatccctctgtccaaacgtccccaatagccatgctcgggagcggtgctttctgggaactgtagtcttcttacgtcctgaagggatacccaggcaatccccgaaactacaatgcccaaaatgctccaagtgggacgcgcccagagtgaaggagcaaaggggactcggccgccatgttaggagtactgggacgattccgcggagccgggcagaggttttaggggtgcgcaggagtcaagtggtggttcagtggggacggtgaggtggaggacgatctggtcggatagccgcgggcacgaacctgggaaccagagggtggaggccatgctggggactgatgtagggcgggaccgactggaagcggcatccagaggcccagtgagcctcggtctcagctcctgaaggggttgcatggggccctacgcttccttctccattttttagctaagagattgagagagtcggtttacttttgggcttggagtatcatttagatctgttaacagtacagttgagagagttggtgtcttttgttgaggtgcgaggacccgaggcggcgaccctcgcctttattcggagaagcccacttccacccacagagttggggtagtcctccgaaatgcatttttgttttgccgtttgttttccaaccccctttcactctccccaaagcttcagattcactgatttttcatacaggaatgattaacaaaggcgtccgaagaaatcgttgttggaaggtgaccaaggtggaaagagacgttgctttggccctgcaagtaagaagagagagggaatagcctgaaggagtaacactaaatttaaaatgacacttttttaccaaccagcgaaagcagatgttcaaaggggatattggccaggtgcggtcgctcacgcctttaatcccagcactttgggggcagacgcggggagatagcgtgattctaggagttcaaccccagcctgggcaacatgcggagaccccgtaccgtctctacaaaaacattaaacaaaaaaattagctgggcatggtggtgtacccctgtagttgcagctacactagaggctgaggtgggaggatcgcttgagcccgggatgttgaggctgcagtgagcctcgatcctaccactgtgctccagcctgggcgacagcaagcccgtgtctcagaaaaggcgggaggggtgggata

SEQ ID NO: 3219 - DNA, 6000 bp, Homo sapiens
tactactggtgggttaaaaaatgcacttacaatcagtttctcatgataacccgtaaatatcctattgtagtctttttttttctggaaaaaaatctagccagaaatttctcatagactgaagagtatttatttcaagaacatcccatacagaatccatcttggcctctctccaaataacccaaaagttgcttcctacttctagacatctgctgcaatcctgaatcaatactagatgactcaaattgcaagttagcacaggtttcagacaagcctagtgggtaaagagagaactttttgaagacaagaaagaaataagctgcaactttaacttggcagacctatttattaaaattgtggtttaggagaattttccaaagcccctatagctgtagatctcatttgagagcctcaacttctccctcttctttaggaatgaatattctttaggaaagtcctggcttgttcctgttgtttggtgtaattattcatagtgccccctttcactctcaagagtcatagtttgaatgataaaatatatggtcatttcttccaggccttttgcagagtaaaattcatctgttgtaagatatatttcttgtattaatctaagaaaaattagattaccttttctataacagagcccttgggaccccatcttgcagtcatttacatatttcttcagagcaataattaaaagctcacataagctaatgaataactccccatggctctcttaatggcaaaagcaaataatgtgacttcacaggggctcaccaaacacagcagctctaggaggaaaacatgagggtttgtcccttcaagtttacatttgcaaagcaatttgcaatcattgtagtttttccatttcataagactaagtacccacattggacagaaagggaatggagactaagagaaacctaatgctgtgccttctgggatatcattcttggcttgaattctgagcactttgtggtctcacacaccttttacaaacttgagtcatcagccttcccgaccttggtgagaagatgtgctgtggtttagcaatttgagggtagtaagcttgtcaaaacatcaccagagatgttttgagaattactgtggagaacaggtttccatggtgcagtgtggctgctgggagggggacgaatggcacagctgttctctccatggggaggaagcactggatcttttgtgtcagaaaaagctgagatcctcctgataatcctaagccatcttgacaggtatatgttcaggttggggaagataggttctgaagaagcatcataattgcaggggacagggttgaatgaaagaggaggcaagaatggtctagctgcttgataatatcctttccatctattcactgtctggcttgatccagtttatagtttgtccctggctacctggctccctgtctgcagcctagttctgagtgtagaaaataagttcaaagcaaggaaggggagtacatgaaggtttgtcctccaaaaagaatgttcttggattgcctttgtcttgtgggaaaatgtacagcagcagaggaaagaatagcaccatgaaaccagaggagaactatggcatcatgtttgctttgagatggcctttcttccaaacctaaaagaggagagaaaacatcacctctttggcagtggtgctcttgtggggtgactagaatcagctagggtgtcactcctactagacaatgtctagaagacccagaattctgatattttagagtccaaaggactttccagagatcttgcaacctaactccctcattttacccaagggactttcaggttcagagacctaggcgccttttacgaagattttactgaactgctaggctggggtgcttaccaagctactgtaatctaaaagtcttaaaaatataaaccgagagtaatttcttcccactgtgaagaatgatcatgagacctaaatgagtacggctggaaacaaaactgcacatacttcctgcctggccaaggaacttgctcaccatggttggctgctgtccctgagagaggaatctcctacccccagagaggcaataaaactgaagcttcaggaccccttccaaggccctagacctaattatatatttttgattttgcattcttttgctcaaaaagctacttcctccaattttatcagcttcaggaccagaaatcctgaactttgccctgcctgtcctacctcataaatccaaatgtctgatgttccaatatgctcttgctcaaaagagaacagataagggtgaggatgactctgccgggaccaggcttgggaaaacagtacggggctggtaagaaagttgggttgggtataattttgaaggctggcccacaagatgtctcaaactcctaccttgtttctaccccaggagcttgttggccagacaaagcctgtctctcagatttacagacccaggattttagagctggcaaaggtctcattttgtcatcctccctaattttgcaggcatttagaatggcttaagcatcttgggctactgaattcccctccctgggaagtgaggtgacattgttggctaattctttaagcaggtagagtatttgtctcacttgttagatgtgatcttcttggtgtgtcctcgcatgggtggaaaccagtaaatgaggcctacccagctaagcacttcaataaaacacaaacgactgcaattctacacactgtcacttagtgtccattctgagcaaaacttctgagttactctctgaggaaagatgaaactgcacaggacagtgcctgtggacagtattttaagcttgtccctcatttcatagtaatagctacaatttatttaccacctactatggacccagcattttatcaacaatttcatttgtatttatttatttatttatttatttatttatttagagatagagtcttgctcaggttacccaggctggagagcaatggtgtgatcttggctcactgcaacctctgcatccctggttcaagatagtctcctgtctcagcctctcaagtagctgggattatagtcacctgccaccacgcccggctaatttttgtatttttagtagagacgggtttcaccatgttggccaggctggtcttgaactcctgacctcaagtgattcacccacctcagcctcccaaagtgcttggattacaatcatgagcaaccatgccctgccataggtattatcattctcctttcgttgatgtggaaaccaaggctcagaggttatgtgacttgtcccgggtacacatcttcagcatccctctgcttgtttggggcatgtggaggctaaagtttagggagtgtcaggccagaagaggaaggcagaaagacaatggccttgccaaacctcctttctccctttcacacaggcctgtgtttaagtcctagttctaacacatactagttatgtgtgcccttgagaaagctgctgttaatcttggtttccttatttataaattgaagaaaataacccacttcataaagcaattgagaagatgaaatgatagaatgtgagcagagctccttcacagcacattcaggtacaaaatagctcattttggtataaactgctcaccccctagccctgaatgcccaatttctcattttctttatgtctttactaaattgtctccatcttactgaaaccttccctggccaccctatctaaaaggcaaaccccatataatctcttcacatcccctttctgccttattttattaccaattaatatatgacaaattgtatttattttgtcttgtcctgtctccacccacaagaaggtaaatttttcttaggccagtaggcattgtctgcgttaggaggatgatacagaaatcctaacgcagacaatgcctactggcctcaaaaaaatttaccttcttgtaggtggagacagacaagacaaaataagtacaatttgtcatatattaattggtaataaaatgtatattggtcaaatgaatgaaaacaaacaacaaaaacaacaaaaagaagttgggaacctaaagacctatgtttgaatttggtttttttccttactatttgactctgggtccattacttaaaatgtctggtccttagcttcctcatttgtaaaataggaagaaaaatggtatctattattaagacagctgggatgactaaatgacataatttataaaccctctggcatatagcgagtgctcaataaatgtttgccattattattatttgtaataatctgaccgattgttaaaactgtctttctgtgcagctctgagtttttaggatatgggaagaggctaaaagtcaccagtgcccttggcattttcggcccagttgtcctccttgttaactgattaccagttgaatgggtgtgaaagtgctcagtgttcccacctccaagctgctcagaggtcagcattgccattcattgagaaataacaggctgtgagagctcaaatgacttacttatggtccctcaacttaaaaaccagggcacgcaggaaccaagcccagccagtcttgggcttcctaatactgtaatttctctctacagtgtggggtagttaagagcctgtgacttcagacctgtggtcaacggggcctttcaccggccatctcccgcagagtactttttcacaatcagttttctcgcaagcaaaacgtggaaaataagatccacacctcacaagtttgtggccagggtcacaggtgaaaacagctcttcggaaactctaaagcgccggataaataagcgctgcaacaggcaaccacacgcgaacccctttcagctgccagtcccgggactcgctcctgtctcctcccctctccaagaccgcggagtaggaaggaggattaacccctaggggaggagttccgccccccagcccccgccccgccgcccacgcctctctctgcacctacacttgcgctccccaagtctctctcgtgcgcagagcccaggctgcgcttccctggtcaggcacggcacgtctggccggccgccaggatgcaggccccgcacaaggagcacctgtacaagttgctggtgattggcgacctgggcgtggggaagaccagtatcatcaagcgctacgtgcaccagaacttctcttcgcactaccgggccacaatcggcgtggacttcgcgctcaaggtgctccactgggacccggagactgtggtgcgcctgcagctctgggatatcgcaggtgagcgcggggggagggggtcagggggatagagcgcctcgcggccggtttccagtctcgaggcagcggcttgcggccaagcgtgagattaaaatcactaggtcgcgaggcagtttttcctggtgggctggaaacttagtttcaaagaaaagaaaaacgtctgaaacttcaagtgcattccctggcgcttttgggctattgctttagctccttcccgcacagtcccctgggatctctctgcccagagcaggcctccccagggaaccagaggaagattgtctgcaattgcattctgttctccactccagctcgttttctgggcgcgggcagttctgccaatgacgcagcccagtgtcacgcacgtccttccgtgcaggggcggaccgaggggaagcccctaggctggttcacagaggaaaccgggatagttccaggctagctggagtttgcccattcctgtcttcagtggctcactttatttcaaattttgtcacctttctctctgcccttaagacaaaggagtttgagggtttttgttttgtttttttttttttttttttttgctttttgcttacagtaagccaagtacttttgtgtgtatatgtcaggggcaaagtattctttctccctctctttctgtatttctatctctctggctctctgtcttctatgaaaaggaggttgtgtgtatattttaaggccatttttatgtaagggcctatgatagccttatgatttcttgatttggccctaaagttttcattgagagatctgaaaaatgagagg

SEQ ID NO: 3220 - DNA, 6000 bp, Homo sapiens
caggaaagagtgttctgcagagcactccttgacagcactgcacgaggaggacattaataccccaaaggccaggtaacgtcagataaaaggccaaacctggctcaaagcctagaggtttcccattctacagctaacattgctatgtatttatctcatattatattcatataactttaaacgctttttatgggaaaagttcaaaatttctattcttacacttaatgctctccatacacctagctcttccaatatagttatccttattaacactgtattaaacaatattctcgtttcctttactgctaaactaatcccagcactttaggaggctgaggtaggcagattacacgagcccaggagctcgagaccagcccagccaccatgttgaaaccccatttctactaaaaatacaaaaattagctgggcatggcggcacacacctgtagtcccagctacttgggaggctgaggcataataattgcttgaacctgggaggcataggttgcagtgagctaagatctggccaccacacccagcctggatgagagagcgagattgtctcaaaaaacaaaacaaaaccaaaatttataaaaaagtgattactagcttcccctaacacctacagtgccaaaggcatctttcctacatcctaggcacataatggcccagtctaagtgtctccttgtaactaagatctccccaatgaattgagagccgaaagaatctataccatgttggcctcacttgcttaaaagaaactttgcttggtatagagctgctctttctccttcccctgaactgacacacagtgtgcttataacccagctttgctcatgtagatgatggtaacatcctaggcatggcagaaaattaaggaagaaggaaactgaatgatggtctggtgcagaaccactccaccaacttggaccactctatacacaagagagaaataaactttcatctttaatgaaggcactgtaattctaaatttctttaatatacaaatctacagttatgttcacatatacattatttttctaaatctttttcacttggattttgtccctttttatttcaggcaagtagttagcctctattagcatgttagtctgaacattgaaaactaaggctggcctggcgcagtggttcaggcttgaaatcccagcattttgggaggccgaggtgggtggactgcttcagcccaggagtttcagaccaacctgggcaacatggccaaaccctgtctttacaaaaaaagatacaaaaattagctaggcgtggtggtgtgtgtctgtagtctcagccacttgggaggctgaggcaggagaattgcttgagcctgggaggtggaggctgcagtgagccaacattgtgccactgcattccagcctgagtgacagaccctgtctcaaaaaaaaaaaaaaaaaaaagaaggaaagaaagaaaacgaaagctaatcacgatcataattaccaactcactaacctattgttctgtaatacatttattatgctttcaagctacctcatgagctaagtaggttcctttttgtcagtttatatccaatcaccaataaaccttcaaacatgacatttcccacaaattcttcatgatatgattatgactaatgacaggaatacatcttcatgacctacagtacctttctataaaataaaatatgcaatgatatctattattcaaaattagaatctgtaatttcttgatgaaagatacagaatgatttaatagtaattgttttaaatgcaatcttaaggtaaaacattctggtaaatgagagaaaagcaagtatttggaggtagctactgaaatacgtatgtatttacaaacagaactttggtaaagagccaaacaaaataaattatgactcactgtcagtaaacattccctaaatgtccttgcattataatgcgagagttactgtttggttttaataatgtacataaaatgaattattatttacattcttcttcaaggcattaaaaaacaatcatctaggccaggcgcggtggctcacgcgcctgtaatctcagcactttgggaggctgaggcaggtggatcacccgaggtcgggaattcaagaccagcctgaccaacatggggaaatccccgtctctactaaaaatacaaaattagccaggtgtagtggtgcatgcctgtaatcccagctactcgggaggctgaggctgcagaattgctggaacctgggaggcggagtttgcagtgagcagagatcgcgccattgcactccagcctgggccacaagagcgaaactccgtctcaaaaaaaaaaaaaaaagttaaaaaacaatcatctctatcatctatttagcagaaaggtctttaaagtctaacaaattaattatcatttaatttcttgtcaataagttgagctacttatttatttatttatttatttttgagactgagtctggctctgtcacccaggctggagtgcagtggcgtgatcttggctcactgcaaactctgcctcccaggttcaagcgattctcctgcctcagcctcctgagtagctgggactacgggcacacaccaccatgcccagctaatttttgtatttttggtagagacagggtttcaccttattggccaggctggtcttgaactcttgaccttgtgatccacccgcctcagtatcccaaagtgctggaattacaggcgtgagccaccctgcccagccaagttgagctacttttaaggaactaattaaacacaataagattttattacccatgtgtcttgtagttgcaactcaaagtagctgttagaagtttaagacataaaggtttttattgtattcacttcagagggggggtcaagagctaacagcaaatgctttttttctgagcctgatatatcgcaaagtttacctctgattgagatcacatgtgaaggaattggcaatcaacttagaatggtaaaactggaaggaatgttagagatcacgacgactttcattttacagatgaggaatcaaacatttgaaaaattattttaataaaaggaggcttcttgaaaaggaaaaacatttttcatggaattctacgtgttgtacaaatccaatcaataatcttttaacacctctctgaagcgctggccttaccatctttccacttcacacacacgaaaactaaggtataagcaagctaagcagttcactcattatctctatgaatcagcatcattgctaggaacggaagccaaaactttgaatgttggaccattctcacagatgtaggctgatctcattcgcagtgatgctggctgggggcgaggggaagccatgtttgggaagtcccctcatggaacactgcatttcacaagcagagtacttgctgactaacgcaaaatgcttccttaaatgagttccaatggataatgcagtctttaagaaacagaacagtacaatacatcagtttcaccatcttcctctaaaacgaagtgcctttgaatcctagacatttaaaatttgctttaaacctgcttccatctcaaatattcaggaaatgcatataatttcatttactttttatttacacaagtcgcctttgtgaaacccttcatgtccccagcggatatttaggaggagactattcatttggatccctccttctgtctttagaaatattatcaccctggaacgttaagtactgatcataagcaaaattaaagttcctggcgaatctcaatatatgtctttttcccaccaaacatgacaaacttctaaagacaactcaacccttcacatacacacacacacacacacacaccctcagctgtgccagtgtccctgatgttgcatctagttaacctacaagacccattcccacgggtcatgacccagtatttctgatgaccacattcagtgctgtgaggtgcccaaaccattaccgcatccacctctctgtgaaccatgcccagtgagctcatgcaggaacctgggttggagcgctccttgctgtgaagctaaaggatccatcacgaatctgggaaccctccctcgcggttctccccggccacacagcgtgggagccgctgggttagggtaggaaaaggggcgcctgcttggaggagggtggtcgggtcatgctgtgcgcagccagggaagccgagtttgggaagaaggcagccggggagccggaggggataaaaatacccacaggggctgaaagagttggggaagagggggcggcgaggacgaccccggttcaggcgggaaaggaaagatggaaagggggcgcaggaaatgggcgccaaagaaagaagtgagaaattgcggaggaggaagtcgtccctggaagaggaggggcaaaggggaagcgagaatggagtgtttgcactttcgagagggaagggccagagcctctcccgaccagggccggcggggcggacgcctggggaaggggcgtccgggcgggctgagggggcggcgcggtgcccaaggtccccggggtccctacctgaaccgctcctgtcccgccgtgtcccagagctgtagcttgatcctcttgcccggctcgatctccagcaggcgggagaagaagtccacgccgacggtggggtcgcaggcgggggagcgcagcccggggaagcggccctgggtgaagcggtgcaggaggcaggacttgcccacggtggagtccccgatcacgatgaggcggaactggtagatccagatggtctccatcgctcacgtgccccgctggctcccgggccgccccacccgcgggctaagttcggcggcgggaactgtcctttcagcacctcgcgggcgcccgcccgccgccttccagcatattcctgcggctgcggccgccgcctggtgcccgccctctcgggagagagaggcggggccaggcccggctaggggcggggcctctggacgggggcggggcgggggcggtggcgcgtgggagggggaagcaggtttgctgccgcgaactcccgcccctgaccggctgcaaatcactctccctcaacgctcactgggcgccggcaggaaagtgggcgtggcgggaagacgtgacagcagcaacaaccaaggaaaatgaagcaaggtctcaactccgggagggtcagccaatgaaaagtgagagtcgttttcttacaggcgtcagggcgggttggtcagattagggctctgattttggaagtccctgaggccataacttgggtcattgctttgattcctcttttttttttgtcccccaggctggattgatgtggtgagatctcggctcattgcagcctcaagcgatctgcccacctcagcctcccaagcagcggggaccacgggtgtgagccatcacacctggctaattttcttctgggttaaaaaaaaattttttttttagagatgtggtctcgctatgttgcttaggctggtctcaaactcctaggttcaagcgatccatccacctcagcctcctgagtagctgggactacaggcgggggccaccacatcccgctaattttctaactttttgtagagatggggtcttgctgtgttgcccaggctggtctcgaactcctgacctcaagtgatcctccaggctcagcctcccagtgctgggattacaggtgtgagccaccacaccctgctttcttgtcttgatgagagccacctccaaggcattttaaggtgaaggagttttgggcaggattgaaataaatttgcacagccagttctgggtgcttctagcaagggctctggctgttgctgcgtgctgccactgtctgttcttcactgctatgagtaccacagaagagtgagaaacgccaagtatcatccccataccctctggggccctccaaccctggggacagtggcaaaaaaaaaaaaaaaaaaaaaagccggggaaatgttgagaagctcatgaaattttcagctctccttggtctccattgtttaagtcagaaaaaagcgaacaggtggtctcttagctcatgtctgattaatgat

SEQ ID NO: 3221 - DNA, 6000 bp, Homo sapiens
aaactttctttggactggagtcctcagttttcattctattggcttataacttccttctccttccccttcccctcgtcctcctcctcctcttcctcctcctcctcctcctcctccttcttcttcttcttcttcttcctcttcttcttcttcctcctcttcctcctcttcctcctcctcttcttcttcttcttcttctttcttcttcttcttcttcttctacttccacttcctcttcttcctcttcttctttttttcttcttcttttttaatagagattgaggtctcactatgttgcctaggctggtcttgaactcctgggctcaagtgatcttcctacctcagcctctgaaagttctaagattacaggcacgagccaccacacctggccattatagctatattccgctccttctacccagtccctttaagaggtttcagttgacctgccagctttccattccgttttattagttttgccttggatgctgtctatgaaattatctttagctctacactcatccacctttattccattccatctctctgctatacacaacaaaaacccccaccctccagctcagattcagtacaagccctcacttgtctagggagctagcatagatactaaaagccattaaccaacctataaaatatagcaaaagaagacatggcaagaaagctactaagttcattttctgacattctagaaaataaatttttgatccaaagagaagccattgatccaccctttctctaggactgcaaatattccatatatcccatcaaaatagattgacctactgcatatgcctgtcccactgtatctctttggtacaaacacctgttccaaactgagacaactaggttgtctttacagagaagtgaaaataagtgtctgtgtgtgtctagatacctaacaggaaactgcagcagctagtcttccacatggactaagcagcagagaaagtgggcctgcagaaagtcaagaattagcagatgtcagaaggaagtggagatgaaagagacagagagacattctcccttgcagctttctcttttttttttttgagacagtcttgctctgtcactcagggtggagtgcagtggcacgatctccgctcactgcaacctctgccacccgggttcaagcaattctcctgtctcagcctcccaagtagctgggactacaggagcatgccactgcacccagcttatttttgtatttttagtagaggcagggattcaccatattggtcaggctggtctcgaactcctgacctcaggtgatccacctgtcttggcctcccaaagtgctgggactagagacgtgagccactgcgcccggcagcagctttctctttcccagttcaaatacctttctgatgccaacatcattcctgcctgcggattctgtaaaaacactctatatctttagaataagtgctctcatcttttaatatcaccctaactgaagtttttttcaaagaatcctaaccaacacagatacgtagagtctgaaatgcatatccaatatctaagagaagtagttggaaatgcgggtcctgaatacagagcagagattgggggaagacatttgatatgggtaagggggtaactgaagtcactggagtacatgaggttgccagaaaaagcccaaagtgaaggtaaaagtggggagagggaaaagagatgaaggaaggatctcttaagatcttcagtattgaagaaatgaatcatagaaagaggagtcattgaagaaggttaaaaagaacagaaaattaggagagaatgcttttgtggaagccaaggaataagggtgttcaggttgtgcttacagaaaattcagtcatggccaggtgcagtggctcatgcctgtaatcccagcactttgggaggccaaggggggtggatcacttgaggtcaggagttcgagatcagtctagccaacatggtgaaaccttgtctctactaaaaatacaaagattagctgggtgtggtggcccacgcctgtagtcccagctactcaggaggctgagacaggagaatcgcttgaacccaggaggcggaggctgcagtgagccaagatcgcgacagagcaagattccgtctcaaaaaaaaaaaaaaaaaaaggagaatgacaactaaaactagatgacactgcagtggggtggtggtgaggatggtgggggtgggggcttggatttaataattaggatgtccctgacagccttatcaaaagcagtggtatattaggcacagagagtatgttaggggtatataagcctccttgaagactaactggtagatgagaaatgataatagatcatcatttctgatatttgaaaaggagaatgatggaggagtcaacaatctgaaggggaagcgtaatgaagaggtgttttgcttagttttagaattgtagataattgagcatgtttataggctgaggagcagaagccactggagaaggggagattcaaggtataaaaggtatgaaataaaagtcaactgttgggaaaagccccaaaaagataagtgaaaggggattaaacacagccaacaccaattcctccaaaacagcaaaggaaatagggatgaatatcgatataagaatttgggatgtgcacaagaaaaaagtggaattgttgaaaattttgttttggtaaacacacacttttttttttgagacggagttttgctctcgttgcccaggctggagtgcaatggcacaatctcggctcactgcagcctccacttcccgggttcaagcgattatcctgcctcagcctcccaagtacctggggttacaggcatgtgccaccatgcttggctaatttttgtagctttttttttttttttttttttttgagacgaggagtcttgctttgtcgtccaggctggagtgcagtggcaccatctcagctcactgcaacttctgccccccaggttcaagcgattctcctgcctcagcctcccgagtagctgggattacaggcgcctgccaccgtgcgtggctaatttttgtatttttagtagagaggaggtttcatcatcttggccaggctggtcttgaactcctgaccttgtgatccacacacctcggcctcccaaagtgctgggattacaggcatgaactactgcacccggccatttttgtagttttaataaagacgaagtttcgccatgttggccaggctggtctcgaactcctgacctcaggcgatctgcccgcctcgtcctcccaaagtgctgggattacaggcgtgagccactgcgaccggcctaaacacacacttttatttatttatttattttctttgagatggagtttcgctcttgttgcccaggctggagtgcaatggcacgatctcagctcatcacaacctctgcctcccgggttcaagcaattctcctgcctcagcctcccgagtggctgagattacaggcatgcaccactacgcccggctaattttgtatttttagtagagacggggtttctccatgttgaggctggtctcgaactcctgactcaggtgatccacccgcctcagcctcccaaagtgctgggattacaggcgtgagccaccgcgcccggcctaacacacacttttaaactgtttcactttttaaagataaaccttgacgtcactattactcaatttgaggaaaggcacaagaaagtagtaagatctcaccagaatttaagttctgctttgtttacttacatcattaatcagacatgagctaagagaccacctgttcgcttttttctgacttaaacaatggagaccaaggagagctgaaaatttcatgagcttctcaacatttccccggcttttttttttttttttttttttgccactgtccccagggttggagggccccagagggtatggggatgatacttggcgtttctcactcttctgtggtactcatagcagtgaagaacagacagtggcagcacgcagcaacagccagagcccttgctagaagcacccagaactggctgtgcaaatttatttcaatcctgcccaaaactccttcaccttaaaatgccttggaggtggctctcatcaagacaagaaagcagggtgtggtggctcacacctgtaatcccagcactgggaggctgagcctggaggatcacttgaggtcaggagttcgagaccagcctgggcaacacagcaagaccccatctctacaaaaagttagaaaattagcgggatgtggtggcccccgcctgtagtcccagctactcaggaggctgaggtggatggatcgcttgaacctaggagtttgagaccagcctaagcaacatagcgagaccacatctctaaaaaaaaaatttttttttaacccagaagaaaattagccaggtgtgatggctcacacccgtggtccccgctgcttgggaggctgaggtgggcagatcgcttgaggctgcaatgagccgagatctcaccacatcaatccagcctgggggacaaaaaaaaaagaggaatcaaagcaatgacccaagttatggcctcagggacttccaaaatcagagccctaatctgaccaacccgccctgacgcctgtaagaaaacgactctcacttttcattggctgaccctcccggagttgagaccttgcttcattttccttggttgttgctgctgtcacgtcttcccgccacgcccactttcctgccggcgcccagtgagcgttgagggagagtgatttgcagccggtcaggggcgggagttcgcggcagcaaacctgcttccccctcccacgcgccaccgcccccgccccgcccccgtccagaggccccgcccctagccgggcctggccccgcctctctctcccgagagggcgggcaccaggcggcggccgcagccgcaggaatatgctggaaggcggcgggcgggcgcccgcgaggtgctgaaaggacagttcccgccgccgaacttagcccgcgggtggggcggcccgggagccagcggggcacgtgagcgatggagaccatctggatctaccagttccgcctcatcgtgatcggggactccaccgtgggcaagtcctgcctcctgcaccgcttcacccagggccgcttccccgggctgcgctcccccgcctgcgaccccaccgtcggcgtggacttcttctcccgcctgctggagatcgagccgggcaagaggatcaagctacagctctgggacacggcgggacaggagcggttcaggtagggaccccggggaccttgggcaccgcgccgccccctcagcccgcccggacgccccttccccaggcgtccgccccgccggccctggtcgggagaggctctggcccttccctctcgaaagtgcaaacactccattctcgcttcccctttgcccctcctcttccagggacgacttcctcctccgcaatttctcacttctttctttggcgcccatttcctgcgccccctttccatctttcctttcccgcctgaaccggggtcgtcctcgccgccccctcttccccaactctttcagcccctgtgggtatttttatcccctccggctccccggctgccttcttcccaaactcggcttccctggctgcgcacagcatgacccgaccaccctcctccaagcaggcgccccttttcctaccctaacccagcggctcccacgctgtgtggccggggagaaccgcgagggagggttcccagattcgtgatggatcctttagcttcacagcaaggagcgctccaacccaggttcctgcatgagctcactgggcatggttcacagagaggtggatgcggtaatggtttgggcacctcacagcactgaatgtggtcatcagaaatactgggtcatgacccgtgggaatgggtcttgtaggttaactagatgcaacatcagggacactggcacagctgagggtgtgtgtgtgtgtgtgtgtgtatgtgaagggttgagttgtctttagaagtttgtcatgtttggtgggaaaaagacatatatt

SEQ ID NO: 3222 - DNA, 6000 bp, Homo sapiens
catctatctactcccatgtccattgtatcctgtcttgtgtctcaagggtgtctggtacttctcctgccaaagtgaaatgcaaagtaaatgcaaggagatgccagggagagaactgctatcagggcatctggttctagtactgacactgacttttttagattgtgtggccctggaaataataatttcctcactcacactcatttttcacctctggtaaataggagtgctggacttggagagcactgataaactcccattgagctctaacatgtgacaaatccaagacctaaggttttgtctccaaagaggcactacaaatgtgatcttctttcagaatttaaactgtcacttttctgtgactcaaaacaaatataaatctagttctcttctccaatcaggtagttctcgaatttctcaagtgaggctgatgctgggcaggttgccagtttaagaactgaggaagggtcttgaagagatttttaaatgaaatgtggtgatagttgttctatctctcgctggagatcgttcaggaaaattgagcatccaagctattctgcaaagagatggctgtagacagacatttaatgtgatttcccacatattctaccgtatactagatcttaataacaataatcaaatactaattctcacctagacactgtgctaaattctttgcatacattatctcatttaatcattcaaatagccttaaaaggtgtgtgctgctattatccctagttgaaacatggaggaactgaggttcgggattgtttaaatgacttacctgtggcaattcagctggctagttggtagagtaagaatttgaacctgagtcttattccaaagcccacactactatcctctttgttttcttatattgagctttccagggcaaacaggctcccaagtcctcccctctcccccaaccccaccccaccctcccttcttccctcctgactgcagctcctcctaccctcattgtttattgtgccttctaaacaatagccaatgagtctgtgttccattctagggagagctagggctgattttattccctgaaacagagatgaggttgtgacacaaaaaggttaagtggctttggtgaggtcacagagccagcctgcagtcagcaacagtaccatctgagtcccctggcttgggtcccttaactgaccctaaggctttttggcatccaagtttaattaagagagttattttaattttccttcctatctctaattttccattttattgctgcttgataatgtagatattgaagtgccaggcatttttcttccctagtgtgacttttaatgactaaacttctcacatagaaaccacttgccttagaagtaagctttcaaagcttgtttctgtgtatgacagagactgttgccttttctcagagaaaaatgagaccacaaatgcagctcagacaggttgttgttaattgagggcttttttttttttttttttttttctaaatcttacatttataccagtaaatcaacatctgtgagtcataaactggttctggatcagccgttagtggtctgaatgtttttgtacctaccttcagtaaagcatattttagctcaaaactcagagattctttgttttgttgaagttcaagactcaggagtagataacatgctaggacacttctggagagggaaagtctgtcttccatgattgttcaacattaagtgtatatttatatttcttttttattgaagttggggtggagttgagggaggagtataaataaaaaagaaagtatgctttttacatactccatgtgcttgaggaattcctgtatgaaggtgactattttcttaatattattgtctagctccactcttctgttccccaactcctgcggacttttcttggcccttattgacttcacgttcctagtgtaaggcaattcagcacttggtaggatataattagccgaagtctaaggaatgcttaaaaatacaattctgttttttcccaaatgcaggaggaacagactgctgcagtacaagcacaagcacagaagtatttatttgattgatttttttttttcctgagtgccttaaaaaccagatatggtattgaagtatcttgcccaagtggatgaaaggcaacgcttggctgctgttgtttggctggtggggacactgaggcatacatgtaaccgagtggacgtgagtgctggggatagaggttctgctctactatgaagggaaaagggcacagcctctgacactttttagttcatcttcacaagccagagcatatcaaactcacttaatcattgaattaggaagcccatagtgaccaaaaagttgatagttcatcattcaacacatatttattgagctctgtaatgtcttaggcactaggctaggcatcaatgttttagcgtatgataacatagaaatatcatttaaagtccatatgaacatttagaaaaatctacttgtgtcctaaagagaatgaataaaaatttcatttatcaacattgattagattaatgaaacatgaccctggcagacctgatcagattattatatcttaaatatgtaaaaaatattttaacatgaccttattagtgctcttcatccaaatccagggttcgatgcataacttctgatggcataaatattcataattaatatcatctggaggtaactttcctggcagcctgtggtggcgcctggctatctctccaaactgctgctttacgcaaccctattccttgatttggacattcactcattttgtttctgtgcttcaggactggattaggaaacggatgattgactatctgagttgtcactatggaagaattagaaagaataattttcctcattgctagagtggaaagtgtttacagtttaatcatggtgggcttttttagtatctaatttgggtggatgttagcagcagtgtttaggctagtctggggaagaaagttgaggagcaaactggggaagagagaaaggagttgctctgaggaatctgcatttgaaaatagagaagtactcacacttggattaaaaaatgccaacattttctcaatacaacatcaacaaaacaaaattccccaaagcaactctagatttgttcacttcttctcctgatgaattcatagtgagtaaggcagaattgattcaagaacctttttttttttgtggttcatttggacgtgtaaatgtacaattcattcatcagctgtttctctaggcttttcccaggaccagaagggtctgttcttgtcatctggaggccagcattgttttctcataccttgtggaaacacagctggattgcaacagtctttgttctttcaaaaattaggactatcacatacaaatattttcctctggtcactaaggagggatttaatctggagtttagaccaggagccacagatttttctgttcctggcttcctccccgatttgctgtgggaaatctgcaaattactaaggcttcaagggcacaaaactgggattagatgaaggtaagcctgtgtgtcaaaacttaccagaggcagaggttacagttacagtcaaatgctgggagttcaaatgtgcttagaaatcaggaaacattaaaaatagctttctctgagattgctcaggaagatttatgtttaatctttctgttaatcaaagatggagctcagtgcctggttctagctatgtatttagatatatacatgtactggttgatttgttaattaggacaaactatctctattacaaccaatgtattagtggcaaaccatgaattattcgggttcattttgttttatctctagtgttgggggttcccaaatggaacagaaactgtgcattgtgattctgtcatggctgccaatgatgtactccagaaattcaaaaccacagagcctctgcatcacttttttggtggcggtcgtgggagggttgttagttttatctaaaagaggagagtctgtgaaaggaaagacaaagctttggccaatggtgacataattagaggaacagaataattagaaataaatcataacttccccttcaacccaaccactgctggaggtaaattggaagcttacggaagctcatggctgggttctagtttggggtcccgttctggactcccctgccaacgcaggagcattacatgggtgggctctgaaaaactgaagcctccttcagaaacacacgccctgactcaagatccggctggagtccaatactcctaaagccctttgaggacacgggctcacgaatcccctgcgcctgcctgcacgctcgccttcatccacatgcctcacgtcctgtgtgtcagtctttgtgaatgaatgatgtacacgcacttggaaaactatgctgctactgggagggggcgagagcgggtgaccaagccctcaagaatgcgtggagaatcagacggactttcccgaaacggtggaggcggcctgtgcacccagcctgcacacccgctcccggcccttcccgcccctgcctgggctccgaggcccggggctccacgcactgctcctccgcggtcgcggcccggccccgcgctcgccagcccttcctttcgctttgggccgcgggcggagattggccgcggtgctcggccccgcccccggctccccgccctgccccgacgccccgcccctcgctcccccaagcggacatcgcccggcccagggcgcgcggacccagcggccgagacgcggcgccgcgagaaacgccctaaagaggaggggagagcgcgggagggcgagagggagggagagcggccgggagatcgagagcgaacgaggcagccgccggcggagaggagggagcgggcgagggccgggcaggaggagcgggcgcggcgcgggcgaggctgggacccgagcgcgctcacttcgccgcaaagtgccaacttcccctggagtgccgggcgcgcaccgtccgggcgcgggggaaagaaaggcagcgggaatttgagatttttgggaagaaagtcggatttcccccgtccccttccccctgttactaatcctcattaaaaagaaaaacaacagtaactgcaaacttgctaccatcccgtacgtcccccactcctggcaccatgaaggcggccgtcgatctcaagccgactctcaccatcatcaagacggaaaaagtcgatctggagcttttcccctccccgggtgagtggcgacggccgaggcccccacccaagctctcggccagaggccgggggtcccctggacttcttccccctttcgccgttcccttctgggcggtgcatttcttcaggagcgggggatgctgttggcagctggatctggaggacgaggaggagaaggaggaggaggaggaggaggaggactgttggtggccctagacccttggtttggggggtggtatttattttcacagctgtgtttttgtgagtggtggggaaaagcttatagaatttccagcgccccattcctgctttttttattttcccaaatgagcgagaaccctctggccttattccttaatgttaaggggagatggacgctgcctcagaggacatcatcgcctgactccacgtcccccatagaactgaggctgggtggagggccccgggcagtctaacgggttggccttcaggcagattttcaaataaggtcttgcctccccaagcgtccctgtcacatgccttgcccctcttttctgggttgagggtaaggagatcggaggagaattgaaattatcctcttaactttgagaaacgtccgaccctattcatgtaggttacttactttacccatgtttctaatctgccataaatttttcttctggtaccaaaggtccgttggaaggaaagcatcaaacacccaaatgtgactttgtgtctttggtacatggtgttgtccaactctttcatttatatgcatttgaagaagagaaggataggaagtaattttttttttttttgtctttgacacaaatattggtgctaagcaacttaa

SEQ ID NO: 3223 - DNA, 6000 bp, Homo sapiens
ggggattacgggggctggctgagatgattgaggcagctccgaaggggccaatctggaaagacatagctgctgaacatactgccggatgcatggtagaaggtcccagaacaatacatcgaacacaatcccattaaaaaggcccagtatgggtataagaatagaggaaagactggagggctggatatcaaaccctaaatagtagttagctttttggtgtgagactgggtggaaggggacccgaagtggtgattctcatttttgaattcatacccttctgtatgacttgaatatgctacaaccgcatattcatcctgtaattaaattgagattgaaaaataactttgtaggagttagactgacagagagaaaaagtgagaagtattttgagggagaagggaccagggagacagagtgacaaaaagtacatagaaaggaatgggggtggaaggagggggtggcaagatatggggttttcagtgggctatcatacatcccagaagggtccgttctgctgaaactctctgagtttgtggagtccacaggatgtttagcaggcccagtggaaccaggatggagaagaatttttgaccgacattagctaagctactttgcagggagtctacctgggggcctgtgcccagctcattctacattctagagaggaagaaaaaaccagaaagttggtgcaaggactaatggagcagcacatcaggggttgtgggaagactacgccaagaaatccgggtctccataggctctctggcacacacagaaggatgagcacctgtgtgccagatgtgtgcacacgtatgtgtgccattgcagtctcagctgtggctcaagacaaaggctttgcttttgatcatgggaaggagagagagtcattgcaaagtacaggctaagaagttccagagctggagtggcaatgcacaatggttctctgctctttgctttattttcagcatattttctttttcttttcaatatttggtgataaccacgcttgtaatagtatctgggtttcactctacttggttttggtagtttgtttagatactggttctctgcacatatgaagtcttctgaattatcacgaggcttttttctgagatggaaggaaagttaatatggaaaatgcaatacgtgtgtaatgttttgctttgcttttccttaaatttaatgccatttttaatttcaaacttcacacttttcctgcagcgggtggttttacagaatcattataagttgctttgaaggggacttctgcactttagggagttggggtggcagtgagggaaggttgctggtgggagcgttgaagacctttgcagagctaagattctgggaatttacttccatttttcctcttaagacatactaacttacaaggtaacttgttatactgagaaaaggaaaaaggtttccttacagtaagaaaagctattctagaaattccttcatgctctgtctcacttgtatccaaactatattgagactacgattgtttaggtgaggctacagagatactccttcaaagaagcaaacaactcattttgcatatcccttttacatgggatcaaaaggtacccatgtccctggatcactgagttttaattttttccttgagaatcataatggtcatattgccctatcaattgaggtctttcctcatagagctatctatggacatgggaaagaaaagcattgcttctactgtttacacagtcatctaatcgcatggtgatttcagcaaccctgtgaagttgggctggtattactacaccctcttcaagagccggcataagggaggggctggggagccaccaccgtgcagtggagggatcctccagggatttcataccttcttcttctagagcatcattttcttttgtcctatattatccatgtggatcagaaagcattccttctgcggaagcctactgacttctaatgctatatatatattttttttttccctcgggacaacatattcttttattgtggtagaatacatgtaacgtaaaatttaccatctgaacaatttttaagtgtacaattcaggggcattaagtacagtcacatgttgtgcaaccatcacccacatccatctccattccttttttatcatccccaaccgaagctctgtccccattaaacacgaattccccattctcctttctccaacctgtgttaacttctatccctttttctgtctctataaattttactattctaggtacttcatacaggtagaattacacaatatttgtcttttctgtatttggtttatttcatttagcataatgtcctcaaggttcatcatactgtagcatgtattggaatttcattctttttcaaggctgaataatgttccattttctgtacataccacattttgcttatccatttatctgtggataaatagttggggtgtttctaccttttggctattgtgaataacgctgttatgaacaatattgtgcagacatctttttgagttcttctttcaatgcttgtggctatatatgtagaggttgaattgctagatcaaatggtaattttatatttaattgttttgaggaactaccacactgttttctacagtggctgcaccatttgacattctcagcagcaacacacccttattcctatttctccttattcttgccattattttctgtttctttgataataggaaccccaatagatgtgaagaggtacctcactgtggttcgaatgtgcatttctctgatgattaatgatgttgcccttcttttcgtgtgtttattggccatttctgcatctttggagaaatgtctactcatgtcttttgtccacttttagatcaggttatttgttgttgttgctgttgagttgtaggagttctttatatattttgagtattaagtccttattagatatgtgatttgcaattttttttctcattctgtggacttccctttcactgtcttaatagtgccccttgatgtacaacattttaaaactttgataaagtccaacttatctattttttcttttgttgcccaagttttttttcctgggataagctgtcatatcccaggaaatcattgctaaatccaatgtcatgaagttttcttctttgattttttctaagaattttataattttcattcttatgttcagatctttgatagatttttgttaatttttgagtatggtgtaaggtaggagtccaatgtcatgctcttatatgtggatacccatctaatgttatatttttgaaaatactgtttaaaacaaaacttactgttttcctgggcattctctaggcaatttatgacagtggtggcttattttgcactattaagatttctagtttatgttcttccacaccgtaaaaggccgtgtcagaggagggagctaaggtcctgaagagttgctttctatataaactcagcatagacaactccagacttcagaaccccttgacagccacactgtacacccttatagagcaagaatccaagtcttctcaactttgtttttttcaattatcctgcaaacatagtgaatacagttgtaattagttatgattggtataattgaccgtgggctctttaaatggggcagtgtgctgaaattgactgggttacaggggcaggctgaagcttccctagctctcttcatagacttcttttgtagcatgtattacatttttggggggagatcgttgatttatgtgtctgtctcctcactacaatgcaaacttgctatctttctagtgcctagaacagtgcctggcacaggcaatttattaaactaaagtgaaccaatagcattacctcttccttacttccaagttaatgtgcaaaggcagaagatgagcagtaaaatcttgctttacttacaatgtcatcttaactgcattgccagctttatacaatgaaggctgatgatgatatggctccaaatgacagttattagattttcaaggattttctaagtttgtatctttattaaaaagagaaagaagccaactatgacaaatcttaactcccacctcctactcaaagaagatggaatcttttaggataaaagtcttagattaagcagccaaatactgacttctcaaaaaaaattgtaataactccattcatagaaatgagattatgctgtaacattcttaccatagtcctgaatatgtgaataaaagatgctgtgtattttcacttaggacagatgtaagattttcatattgtttacattttccctaaatgagaaatgtatgaacacttctgcccttttattcctgcaccacggaccatgagtcagggctgctaaaagtatccttattttagagattgcctaaaaccagacttatatgaaaaggggatttttagctttacttttcagaaatcccaagtccatatccagtcagctctcttccacaaaattattttcttttctttagaaaatatcacatttcatatcaagttattagagagaaacgggaagcctgagcaggtgactgggtggtggacgtcctgtgtttctaaagcaatccctttccctcacctgagaccttgcctaggttaatgggggctccattgagaaagtcaaggaacatgaagcatgaatatttacatattcagcagagagtaaatgcatcagcaaatgatgaggtgagatacagtgttatcccactgaactagttcccttttgctcatctccctccctgttactctccaaggctgagttatattcagctgaagcacaatttgaagaatacgaaataatgtgtgatttggtgccaccactgtcaatcaacagtgctttccacctagactgctgtgcctgtgccagtggctgctgtcctggtgccaggggcaagaggaagactgccttttttccagctttccctggcttgaccacaccccccaatttaaggaggcagctctattagaaacattatggtctttgcatcctcttaagctacggagcagaggattcccgcaggtagttggaaagagaccacagactttgagggaagctcactcaggatctgctctccggcaaagtagtaagtgaggtgtgtgtcagtttctgcctaaaacttttcagtccattttccttttcctgctttaaaaaaatttctgtggaattaaagagtaagtcggtagggagattcaggatacaagtgagttttctctttctcttttcacgtctttctatattcccatttaattgtttaacaattttcaaaaatacttcctaacctcgtcagaatagtctgaaagcaagactatgtttttaaaaatgttccctgcttcacaaaagtaaaaccatgcacgttttagatacccgtagattacttgtcagaaaccctgattttttttttttttttttgcaaattggagcacttccaaagaaataaagctgtagttaaatatataaatttctttttattctctttcactcctagtaaatctattgttttacttttttctcctgctagtagtttaatgaattgcttttaatagagaggaaattgctacaggtttgaatcttgctagccaaactagcctgtttggtgtttttctctgtcttgggactgacctgcagttgtccaaagatctacaagttcctaagtctgttgttgagacatggtgtgggtgtgggccgcggttgtctcagagttagggaggtatttcttgtccccacggtagagctggactcagtggcaggagatgtcgatggcaattcctctgcatccggtgattttatctggccgtgacactttgtatgtgactcctcacccaccgttaaaggtctctgttaccaacttttaaagtagtattttcttcaggcaaacttaaaagggtgctgggtcactgaaatcaatgcattctattgcaggatttctttatcaccttttgggtaagtttttgtttttaatctcaagtccattttccttcttactttagaccactgccatgcaactgagaaaaaagtatttgt

SEQ ID NO: 3224 - DNA, 6000 bp, Homo sapiens
ccccgtctctactaaaaaatattaaaaaattagttgggcatggtggcagtcccagctactccggaggctgaggcaggagaatggcgtgaacccaggaggtggagcttgcagtgagctgagactgccattgcactccagcctgggagacagagcaagaaagtaaataatgaattacataggcttaacggtaaattggaaaaaatcagaggaagaaaacttagaaagaaataagtagaaagcgttcaaattgaaacaaggcaggtgtggtggctagcactgtaatctcactttgaaagctaagacaggaggattgcttgagaacaggagttcgagaccagcctgagctgatctcaaaaaaaaaaaaaaggaaatacaaggaaataaaacagagtatttgagatacatggaacaataatatatggtctaatacttgtattaagaataaaaaaaggaaacagaatgggtgtaaaaatattcaaacagataataaatgacaattttctaaaactaatgaaagataccaacccacagatccaataactgcagctgacatcaaggtgaataaatgataaatgcaaagaaaaccactcctgtgtacatcatagtcaaaattctgaaaacctaatttaaagagcagatcttaaaagcagctacagaaaaaagtgtacactgtacacaggggcaccaaaatatgtactacaagtgattttttagcaaaatatgaagtcagaagaggaatgacatgtttaaagtgctgaaagaaaagaaaatgtcaacataaaattttacgtacagtaaaaatacccttcaaaagtgaacatgaactaaagacatttagaggcagacaaaagctgagagacttctccaacaaacagcacacaggctatgctgagtgaagttcttgaggccaaagggaagataccagatggaaaaccagatctgcaaaaaggaataaaaaagtactagaaaggataaatatctgggcaaattaaaaagagacatactttaatacattcattatatgcatatatttacaaatttctaaataccataaaaatacaatgtaaaatgaattttataacatatagaagtaaaatataacacaacaatacagaggatgggagagggataaatggaattacattgtaacttttttacagattcataaaatagaataatattatttaaaggtagcctgtgataataacatacgcaaattgtaatttctaaagcaaccaccatatttaacataaagaagaaaatctaaaaagacaatctagtaatttaaatggaatatgaaagaaaaaaatccaatttacccataagttctcagaaaacaaggaacagagaaacaagcgacaaatggaaatgaatgaatgagaaaaacttccctcaaccactgttattgaacactgaatggctctgcaaataagcttttactacagactcaataatgtttctttatgaatttaacctaaaactacaaggcaaaatagagcttatatgcaaaacttaaactgcagtaaaatcattttgacacaactaacattgtttgaatcacaaataatgtcaagctgttttacacacttctcatgctgtcaaaagttaaaacaagaagcaagatctccattccaacacaaatttgcagcagttatgtttttctgaactcaaactacagtaccaacagtgttttctgaatttcaatgcaagtgcaaaggaaattttcatatttaaaatttacttaactgtgcaactgagaagcttccatttaaccttcaactggaagtgattaatctgcaatgtaatggcatgctaaaggggaaatatcaagagaatttatagaattctaatagaattttagaaatgccttctaagcaatgaatacactcaagtaaaatcatgtgctcatgggttggtatcagtatttggcggtatctgtctgggtagaaagacatttcaaaaatgaagtacataaaatctcataaaaaatcagcattaatagatgaacatctgcagtcaatttttatgaaagaacactttgaacaccaagtgaaatgttactttccccccaaaagaattccatgcctttcattattatacctgtattaaaattgctattattacactttgaattgacaaaataaaaaactgtggacttttttttcttcgtgttatataagtatctacctgacattctcaattttgtctcttggcccacaaagactaaggcatttacagctgggccctttacagagattggcaacccctggtctaaatgtagtttttgctacagttgtcaactatgttttttgctttggaaccacaaacattctacttcaaactactacttctatgaatcacttgtagacgttgaggaggagttaggaagaaaagtcgagaactaatttagtcctggggttaaataataattgtagccaacttgaattgagcacatatattgtgcagctctctgctaaggaggcatttgtatatattttcttatttaataagataatcttatgagctaggtactatttctccccattttacagaagcttagtgactgtgttgtcagggatcacattgctaagtgatgtggaagacataacctagcaatgggacatctaaaccaatgtctgcaacatcaattaagaaaagcaaaagaggccgggcgcggtggctcacgcctgtaatcccagcaatttgggaggccgaagtgggtggatcacgaggtcaggagattgagaccacggtgaaaccccgtctctactaaaaatacaaaaaagattagccgggcgcggtggcgggcacctgtagtcccagctactcgggaggctgaagcaggagaatgacgtgaacccgggaggcggagcttccagtgagccgatatcgtaccactgcactccagcctgggcgacatagcagactccgtcttaaaaaaaaaaaaaaaaaagcaaaagaatacagaaaattgttaaaggggagaagggggtggtcaaaggcagaggagtcggtgtggacaagacagagatctcttggagagagggcaggactaccagttgacaaaacctgttcaggttcctggaggctcacaaccaccagttcccatcatcccagcaacagcactctttcccaccctagcctcgttcgtaatgatctgatcaatgtgtgaacaaaaatattgtgtgtacaagtctcaacacatttgataatgtgaagaggtgaaggaaagtgggtaggaaaaatctgtagggtggggagactcggggaaatgtgtcctggtccagtgcaggtaacatatatgggtatatatgcgtatatacatatttataccatatttaatatattactctattaagaaattataacaaatttccttttacattacacatccacatattaaacccccaatatgtgctaacaaggttagaatttaagtataatgataatgttctcagttttttgtggtggacactttaagagagtgtaaataataataaaaataatagagtgatcagatcacttgtgctcagggctagacccttcagccccaacggccttaacccccctcaactgcttttccaaccaaatattcctccccctgcaggatcccagggccatccaatcaaccggccaatgacggtttcagagaagcggtcctggggaggggtattatctgcaggaacacgtcctgccaactttgtagtcgagtcacctatttcggttggtagcggccgctatttctttaaaagggcagtggatttcgaaacaggagggggaggtcaggaaaaggaactcagctgcctttgataactgccctgcagccttcccttcccggagcgcgtgctcggctcgggaagcgcccgcggccgccgcatccccgagcgggcgcgtggcgccacctctttccggggcgcccaccttccccgggaatccccccgcccgacggtcccccagcgtctgcggcgcggccgccccggctttgtctccggcgtcgcgctcgggcgcccgctctccccacatttccccgtgtgcaggctgtaacccgatctcccatttcctggtggattctcttaaagaggcagcggtcgagaagcagaacaaaggctattgttttatttcctccttcggattccgcgtcctaaccggaatggcccttcatagataattactttcgttgcatctgcgcttagtgaaacgtttcaaaacccttgtgcacatcgatgtatccaagagacggagccaggggaggtgggaggagtttaataaaacctgttttgtggtgtctggggccacaatgtaacgttttttaaaggtgtcttccttaagcccggaaattggctcggccagcgggaggtctcgcggcgtggagggcgggcgcccgcaccgggggccggcctggggggctgcgccgctcgccccgctcgcagccgcggccccacgcggccccgctacccgggtttcctccgcccgcgcccccgcggccgcccctcccccgcgcagcttttatttccccgatgccgggctgtaacccgagcttttatttcctggtggctcctttaagaggcagagctcagtgctgggaattcacgtcagtttctgcactgaaactctcaagatcaatgagcaaagagctttctcagttctgcctttcagtttctctcttccaggaaggaaaacattcgagagagcgagggagagccgcgggagggcggggggcgggggcgccggctgcgggtgggaggagagaccgggaggccggccgggctgcgtcccgggtccccgcgccgcgccgcgacctgcagaccccgccgccgcgctcgggcccgtctcccacgcccccgccgccccgcgcgcccaactccgccggccgccccgccccgccccgcgcgctccagacccccggggcggctgccgggagagatgctggaagaaacttcttaaatgaccgcgtctggctggccgtggagcctttctgggttggggagaggaaaggaaagtggaaaaaacctgagaacttcctgatctctctcgctgtgagacatgtctgagactcctgctcagtgtagcattaaggtaaaaatcttctcccctccttctacgtggtggaaaccctgagctgcaccggccagggcagtcgtgctgggctcctcagagcaggctgttgcagttgctctgttcgcaggaaattatttggggcgagagggaaagagatgcagctcgcggtggctgctgtaccctttagcgtaaccttgctactcccccccaccgccgagcccctgccggctcctcggcccccacccccttgctttttgacaatgaaatgccggtcacaattggtcagagcaacccggattgtctccagaaccgtaaaacacccccgtaattagtgcgcttaaaaaaaaaaaaaacaaaaaacaaaaaaaaaaaacctgctccctattcctacacccaacatgtgactgaaatataacttttgttcccgaggggtggtcgtcttagaaaaaaagttgttcagtttccactgcgatagaatctttttatttttttaaaggactctctgggtctgatcagacaggatttttttccccctcgtctgattgtaattgcaagcgctgtcggagagacagtcctggtgtcagcttttcctaggcattgcacaatgaatttttttttaaaaccaaggtgaataaagttgctgaatagttattttactccgatccatatgaaagttgagcaatcccaaagtagaaaactcctgtgatggagggagaggaagaactaagcaaccaggcaaaatgaccttctgtgtttgacagtgcagagaggctatctaagcagcactctgtaaatgcagggcggtagatgtttgtaaacacactgctgggctacccagtagttgtgtgtatgcatgtctatatatctgtaaagactgtggtgctgcggtttgttgcttctaaaaagttgttgtaaagtttgccaccattgggaggcaggatg

SEQ ID NO: 3225 - DNA, 6000 bp, Homo sapiens
caaagaccacaataggaggattccctggcccttctgcccctacgtatctgcctggtccctcatggtgcccatgtgcttctcatactgattgaggtggatccataatgagaccggaaaagtagcatgaggaggagatgacaaccccattaaggactttcacaaagtgttctctaccatttctctggagtctggactagttggatggtggaagtctgcaggaagaggggccttttaatgtctgtgtttcctttgttactgctgatgaaaattcttggaaaaatcttccaagaaaaacatgtttatgcaatgtgaagcacattcaaatataaataagatgcactaaatgtccacttctctcacccacccactatgggcttcatacggtccttacatcaattgtcagatggtgtcctcctggtgcagagagttgtcagtaacagatatttcttctgacttcaaaggtactcctactttaaaaaaacaacaacagaaaactagctaaggagggttaaatccagacttacaatcaaaactattggtataaaactttttatttaatagctaaagcgaaaaatcatatataacaattacccaacaagtactatggttctggtattaacttataatcatcattagtaaggaaactgactgaaatccaggctgtgtatattagttaaggtctgcatttcagccaaaataacagcaactgaaattaggaagttcttttttggtcacataaaagaagtctgaaggtaagcagtccaggggtaacgtgaagtggtaaaagtgccatcagtgtcccacacttctgcttttccactctccaccagcgtctatctgcaagatcaccccatggtcagaagatggctgcaggaactcctgcagggaaggatgaaagggtgcctgccaactgagcaaggtctcttaaggagcttttttttttttgcaagctccacccatctcattgtccaatcccattacaagaggttacaaatgtagttttcaaagctgaggctccacagcaatataggggttcttttagtaaaggggaagtggagactagatactgggttggcactagccatctctgcagtgatgtgactaaaaggaaatggcttgtccacgtcctcttcttttttcatcagtgagtctcttcccctctattatgccatatgagttggcagcatcattttattgtattagggtatttaattccaatttcagaaaaatgtcaatcttcctgtctgcaattgcacaaacttaactaactccttaagcacatggtccttaacgtctgtatttttaagttctaataattgtagaaatctccttagggaggaaatttaatagagtttgctcttcttcctgtagaatgcaaatttcagctgcatgttttcttggaaatgattgtctgtctttttacgtagcagacctgtcctgtggttgtcctgtccctgcagctgtgccttctgcctctggcagttggcttgaagagagcagcttccaggagaaaggcattctctgatagttccttgaatgcatctaggattttgcacttcattcacttctagccacacttatgtagcatacaattgctttagggtcagaagattgtgggagggctatgctatccagttgggttctggaataaatgagggaggaaagaagaggtaagtgagtgcagtgcaatgggagaagagggactaatttctaaggctgggattgggaggtgaatgctggaagagaatctatctttggagcattttactatggacaggtattaaggcaggtgtcttataaacaatgtccagtgctctcaattcttagaactaggcaccatcaactctaccttacagatgaacaaactcaggctcagagaccttaggtaacttgtctgttgtcatgtagtaatggcaaagccaggcaatagggacctaggtgtgctccagggtgtcactggcaagagtcttgagttttaacagttaattaccttctcccctcagcccctgagaggatctcctatccaagcatttcaccttccttggtgaagctctgcttcaggtcatgggagcccctgccagagggttgatgtttagaggagttgttgagagatgaggaagatggtaggaggggaaattcttaaccccattctagctgacttggaatttctgatgtttgaatgggaattttgcatgtatttccctacagacagacacaagggtaagggtgtggttagctcactgaataaagctgccctgtgtctagcatcttgggatctcctatccaatcctcatccactgaatgaatatttactgtgcttatatgaactgtgcactgtgatgggttttagggattcagtagtgaacgttgtcttcaataagtttacaatttaatggattaaatttctcttaagagaaaagatcactaagaaagtggaataattatcctaaagccattttatgttccaaaaaagcctgctttttggtacatttgagatacacttaaacagctctacttctctagtattgcacgttagaaatcattccagaaaatgtagtcagtggccttggtctgtgggtaaggcttgtcctgtaaaggccactagcaaagaaaatgctttctcccttgctttcctgagccatctaggccttcattatatctacctccccaatttgccctagctccctgatggtggggatgcctgttcaacacccaccccttccaagcatatacaatttcactgtatggctcctgttcggctctccaccctcccctgggattctcccacctcccttgacaagtatgatcttctcatggcttagtgtttaaactttctctctttggtgtttgaagctaactttgctctggattgtaacttggtctactccttggtgttccacatcttctgtagtgtctgttaggaagcttcttctcatccccagcccctcagccctcaccctgaccccagttgcttggtcattgccctagcaggtttcttttagggggagattaggacagggttagacttagctaatttcctttgttccagagaaggctggaatggtttcatacaagaatataactcattacaatgacccataacctccaacacatagattttcacatcctgaaaaggacaacttcctcatcatcatatacttgactccctcagctctttgacctcagcagttcaacctggaaagggacctgacagggctggcgaatttggtcagcttaatgtctacatcactttcaggtgcagggactggatggcaaatttagcaagacagcctgacctttaaacgaagaatgcggtgatcattctcaaccccttcatctccctcactcccccatccaattaataacaatatctgagaattccacctcttaaatatctgtaactccatccccctttcatcctaactgcccacactccagaccaggcccccataatctctcaccccaaatgttgcaagagcttcttccctgcttttaacagttagggtctagtaaggaagataaaaaccaccctagatatttcaagtaggaggaatttgacagaggagattaaaggcataatcataaactttggaaaggctgggattatcagttttgggaaaaactgttactgacttccagaaaatcttgacaattggttcagggaaacctgaatcccattgagctcagctgcctgccatgtggaagaggctgacttgcaggagcttgtccagaagctactgtaaacctcacatctgcacacagctgccaggggagaaatatggtgtgtctctgccactttccacatcttgcacaagggcctctcaaaggcagaatctaagttagaaagaggtggggaggggattctggaaaaatgtggttccaagtttttattatgcaatgaggacagagtggagaaggcagtggagctggtgctgagttggcatcaggtatctcacacttgtatccactgtgtatgccttctatccccctccaccacactgaattcaatcactaagttatagccagagcaatttttctgttcgtgtcattctcttgatcaaaactctttaatagcttcctatttccattaagttaaaatcaaacttgaaactcttcagtggcctgaatatgacttagttcttgcctacatctcagtctcatcactcatttctctgcccccctttctagaatccagcataccagctttctttcaaaaaatattttttaatgtaccctgctcttgctgtctcaggtccttcactcacactgttttgattgattagaatgttttgttcccacttccccaatgtctttcccttctcttcctcctactcaaccttcgggtgtcatctgaaacatcactgtctccaagaagccttctctgagttcctggaccagatttgtctccttctatcagctccctttgtgcctgtctttcataacttctgctgactgaaagactcatatgacttttcagcatctgtcttccccactagtttgtaagctccatgaagacagacacctgaattgtttactgctgtatccccagtgtctaggacagtgttgagcacagaacagacacacaactcttctgaatgattcctaaatgtgctccaccaaatcatctatacactgaagttggctttgttccaggaaaacacttgaatgacaagtcataaccaagccacataacatttgaagtgtccttgtacctgttgagggtggggaatataatgttggttcccaccctcccatcccccactaggactttcctatattggtgtggcttttatgggcagggacaccctcactatacttagagtactgcatatttacttcttggctttaccaggcacatggagattagaaagtaggtaccatgaaggatcataaaatgctcctgatattgcaggaaactcagtagtctggcagggtctttagtgaagtagtgggaagttctgtcagggggtagggcctgtggctgtggaattgctgtttgtcattgtaccaggattgatgtgctcggtgcccagaaggcagtaagctctgctccctagcagccttggtaagttgagtttctcacttgcagaacttttacttcctttcgcagtgtgcattagcaaatcagagagactgtaaaagctggagccagtccagtcgaattccacaggtgctccagagaccgtgggttggtgaggtaacatccagggcatggctctcagaggccagaagtagggaggggcgcagagtttggcctggcaagctgtgtttacaggtttgctgggctgagtggatcacaggagggggtcctggggcagagccaaagagcttggttaccaagagtgcagaaagaaacaagcactgtgccaggatgtaggagtcaagcctcagactccggaacaaagtgggaggattgagagccagtgaagccagtccatcagaatgccaagctggtaggcacagaggaggcaaggagcaaagggtcagtacagacaaaagagagctggggcaagatgcaggaggcaggaaccaggtctggaggatgcgctacgaatgtggaggaattctcctggaggtggtcagtcagtcgtgcccttgataggctggaaatagggtcagaaacacatcaaccctcaccctcaagccaactttgcatttcctcctggcactcgtacttgcaaaaacacatagctctcatttctctaattatgtattcaaaaagaaagttttgatttttctggtcaagggcttcttgcaaaatcaaactacgtttgccaaatatagccccggtgaccacaagccatcagcaggcctgggtctgagttcacacctgctcaacattcctgcattgccagtggtgatccagctgagatacaattctgagtcaattttgtcattggataatggcactactgatttttcctaggctttttattctgttttagaaattctgcttcagacataccaaaggtaatgaaatagacatatctcatatttctg

SEQ ID NO: 3226 - DNA, 6000 bp, Homo sapiens
tacacttttaaaaattgagatgtcattgtatacaataacatgcacagatcataagtgttgttcaatgacttttgacaactaagacccatatgatcaccaaagatacagaagacttacttccatcacccagaaagtcacctcttactcctttcgagacaattctctcatcccaactcctcaatcactttttaaattaccatagattcattttgccttctaaaacttttatacaaatggaattatgcagtatgtattattttgtgtctggtttctttcactcagcacactgttaatgagatttatccaagtcattgcctgcatcaatagttcaccccttttcttattagcaagtggtattccactgtatggatatgccacaatttgtttatccattcttctcctgtatttctcaattaaaataaatttagttatttctacagtatcatatgcagtggaaaaatcaaaattacatgtagaaaaatttggtattataaaaagcaccttaaaaataggtgaaatgcatgattaaatgattgaaatttatcacctctatagccctccagagaatgaaaaagttaagccaggtatggtggcatgtgcctatagtcctagctgctcaggaagctgagctgggaggtttgtttgagcacaggtttgagtccagcctgtgcaacatagtgagaccccatctccagggaagaaagagagagagagagaatgagaaagtcataagccctttgttgaccataaagattgcattgtccatatgatatttaacttgaaaatacaaacttgcaagcaaaaattataaatgggtcaattctgctgagaaaaaaattaagcccaaaggcacatttagaattaatgacataggaataaagaaaataaaaaaaataggagttgctttaatttgttctacacacacacacacacacacacacacacacacacacacacaaatacacacacagaggtcagcaatatccctagagtcattttaggtatggcggccagcaaggcatatgggggcagtggtcctgcatatcacaaatgaattcccaattgttttctgcagagtatttgatacttctttaaatcaaatctaattgaacatttcagatagatttagttacatatgaaaaagacttgatatagaccttggaaatgtaataatttttttctgaaatccttttttgttcttggggaatgtaagatcatgtgtttgagaatatgttggtttaaagattatttctagttgggtttcctaagacattttgttaatcacactagttttaaagagttatcatcttccccgttctgaacttctgatgcataaatacttcaaaataatgttaagtttgagatagtctgcaaagatagagatactggcttgattttgttttctcccccaagaggatcaaaataatctaaaccatatattaactactgtcctgcaatttctaatttacaatctttgtcagttttgaattatggaagcagccaagagtatccaaaaacattttgtttctactgcgccttttttcccggtaatataaatatctgaagaggttattgcttaacctataaaatagtgacatcataatttatgaatactgaaaaacccagttcatttctgttaaactctatgatgagctagacgtgatgattttttctcagtggaaaggacatgtaaaaggaagagttttctttgttgtatccttaatgacagtcttatctattttagccttgattactctctatcactatttgacagtaacttttctttgtttctactttcaaatatcaattaagtgaaaatgacatcctcgtcactatcatcttatgttattaccaaagaccaggcctcctcaaacacagattcaaccatgctgttgggaagctgagcaggtgtgagtttccctagaccaccaaaggctgaaaattgtagtctgcagttgtaatcagactagaagaatttcagtgcgtctgggatgttgttcatttacattgctttcatttgtaatgtgtctcagtgaggcaatcaaaagtaagcttttttaaaaagtatatatgtacaactgttttacaactgtaagccactagtctgaaactcagaagacaaatgtatagcaatatcctactatcttgtttgactatttaaacttacatataatttaaggttttgaggaaaaggctaaaaatgtttcacttttaattgcatgacaatttggcagtatggtcagcaaatagaacttgtatctagttataaactagtactaataggaataatggtctccactgactattaaatatatactatggtgatgaatcaagatatttttgtaaagtactcatctctaggtctaagtttgtaattcactgtattatagatactatgctacccatgataattaaattgtttaaaatcacaatttaaacagtctagccacttgtttgcctataggcaatatacatacaggaagtaattaataaagcagttaatcctttagaccattggctttggagttcacatctggttccacttacccccattcataagtaggctagtgactttaatccaattacttaataattctgatactcaaattttttcatctttaaaagtggaaactataattataaggtggttataaggggtgacaataaaatatgtaaagcacctgtcatgtgtttgttacagaatactcagtaataggtagctatattgttaataacaatacatacttgattccaggtagtcaattgactttctataaatatttaccatatttccataggaaaaccaagcattttgttgttttgtcatttgggttcttctcagtcaggcccaagtcaggtgggtgtcctggtataacgccagtttttatttgtctgttcacaatagaaagcccttgtggtgtgatggccccaaagctgaccataaacttgcctcagccactctgtttttctggtaagagtgagtgctatttctactgcctctgcatggaactgggatgtgtggtttagattctgttttctaagcaaatgtatttgttccctgaaccattatttttctcactggtccagatggaaggcataaggagaacacctaagttcataaaataagtaagggtgaagtacatactttttgtcttcaaagttacttttgtggggacttggcagtttacaaaaagagctgatgatgattagtttctaattctaaagcaaacagcagggaattggattttctttaaattttccaatagcaaacaagctaggagtagcctttatcctaacatcttggcaacatcacttatttttgaatatagctttctgaatgttacaatgaccataccaaaggagatataaatacccccaaagtgatgggatcattttttagtggtttcgctgaaatttgctctaagtgctactgagtagaggtatgcgggaataagaataatcagttttattgatttcttctgtgactctgggccaggaccaagtctattttgaacatctttatatcctagcacattgtaggtgctttaaaaataactcttaaatattgactgagtaaaagcgtctatctctaagatggtcaatccaatccccctaagcactgttgtggagatgagtgaagactaactaggagtcttgctctgtcgcccaggctggagtgcagtgccatgatcacggctcactacaacctctgcctcccaggttcaagcgattctcctgcctcagcctcccgagtagctgagactacaggtgcgtgccaccacgcctgtctaatttttgtagttttagtggagacggggtttcaccatgttggccaggctagtcttgaactcctgaccttgtgatccgcccacctcggcctcccaaagtgttgggattacaggcgtgagccaacagagcttttaaaaacaaatacacgtgagaggccgggtgcatggtggctcacgcctgtaattccagcactttgggaagctgaagcagcaggatcccttgaagccaggagttcaagaccagtttggacaacataatgagatcccatctctatgaaaaaaattttaaaaaattagccagatgtggtggtgattgcctgtagtcccagccacttggagactgaggagagagaagctgttgagtccaggagtctgaggctgcagtgagctaggatggtgacaatgcactccagcctgggcaacacagtgagcccctgtttggaaaataataataataattaataacatatgtgaaagagagttcacaattagtccaatatctttagaaagattcaaaaacacctaaatgcgaaaaatgcctttattcatttgtcagctggattacagaaagtaggaagaaaagagcctgtgcctctgtaggaaagtaacaacgacttaacttctggaaatgacttcgcagcttagagcccagcagtgcctattttggattaaactgtgtattaattaagctcaaacgatttcaacattcatcaccttgcattgcacttcacagaaagcaaaaccaaaacaatcctggagttttgagtgaggaaaacagacgccccgcactcgcacacgcgcgcactcgcagcctgtctgaagtgcagaggttcaggcggccaagggacccgcgccggtttccgcgggcgacctgcaaatcctgcccggggcccggcaggcgctgcgtcccggcgcgttggcagttggcgacccccctcgaatcccccctctgctgcgggctccccgtggcctttggaggctcggtgagtcggctccaaatgttttccatatttgttcagcctccataattcgaataccagggcaggccgagccagccgtgcgccgcgctccagggcccagggcgccgcacacgcacccacccacccacccagcctcgcagcgccatgggcaagaacaagcagccacgcggccagcagaggcaggggggcccgccggccgcggacgccgctgggcccgacgacatggagccgaagaagggcacgggggcccccaaggagtgcggggaggaggagccccggacctgctgcggctgccggttcccgctgctgctcgccctgctgcagctggccctgggcatcgccgtgaccgtggtgggcttcctcatggcgagcatcagctcctccctgctagtcagggacactccattttgggctgggatcattgtaagcatcaagtctgttttgcctaagcgcgtttgccaaacaggaatgcgaagtcgcatggtcgagttgagactaacccagctgcatgtgcccttccccgggttcactcttctaactcgcgctctgctcggtgactgatgcgtggggcactgggttttcccgggcggggcagggctggacgcgatagggctcctgcccctctcctgctcgcggctcccagcgcctccacggggcctgactctgacgctctggagctggggagttcatttcaaaagctgcttattttggtcagactgaacagcctcaataacaacagcggattcattcgggctttttccttatcctgttacccagaccccacccctgtccttaaacaagtggcaaaaagtgaattaagttcatctagtgaaagcaggagaggagaaagcctgtacttggagttgccacattgagtagcattcattttatgttttaaactgaggctccattagtaagtttcctgaaatgatgggctaaggcaggaaatgcgaatacagcaagcacagccttaatccactggagtctaaagtgggataaacccagggcgctggccatggcagaagtatatttgggactccaccgatggatgtactgttctaagttgaacagtactcagctgttgtgagtgttgaaacatgtagcatacttggcttgattaaatgaattctttaatgtaaaacgggtgccacttactgaatacctactgtgtgctcgccctgctagaggcctgacacatattatttctaatccccacatcgtcctgatgggat

SEQ ID NO: 3227 - DNA, 6000 bp, Homo sapiens
ctacaggctgggagaaaatatttcaaatcacttatccaactaaggacttgtatctagaatacaaaaaagtctctcaaaacaataagaaaataacccaaataaaaatgaataaaagactttactagtgaaccaaaaagatatggacaaataagaaacatgaaaagatgttcaacatcattagccattagagaaatgcaattagaaccatcatgaaacctgtcctcttaaaatgactatctatttctgcatcaataccacattgcctcaaatgtaacagctgtaaaataaactctccctatctaatatgtataagtcactgttttcttctttaaaattgcttcacctatttgccttctctctaacctaattctatccaaatggatctctagagtaccctagaggaaaatcaaactgttacgtaataattttaattaattcaaactgttggtagctttctgaatctgagcaataactaactaccttatactgtcatttgggcaagaggacaagtgttattcccactttaccaatgagaaaatagacccaggaattccaaatctaaaaagctgagtggctcacgcctgtaatcccagcactttgggaggccaaggcgggtggatcacgaggtcaggagatcgagaccagcctgaccaacatggtgaaaccctgtctgtactaaaaatgcaaaaactagctgggtgtggtggcgcacgcctgtaatcccagctactctggaggctgaggcaggagaactgcttgagcccggaaggtggaggatgcagtgagccgagatcgcaccattgcactccagcctgggcgacagagcaagattccatcacaaacaaacaaacaaaccaacaaagctgaatgacagcaccacaaagcaaggaaagagccaaactagtaccaaaaatagaatttctgatccccagtctagtgtcctattcctaagccacactggattcccagggtcctgtttgctttttacctgtatagaaataatctcaatctcatcaggtggaaaacgaaaaaaagtaagttctctgaccctacccaacacatggaacatccaagatattttttaaaattttcaagccagccatagaaaagaaatgggaatgtatatgaagacagattttaaagaataaaaaaatttcaaatattttccagacataacagcctagcaaccattttaattaggtgtcacagttaattacaagatcaatgaatgtttactgattggctttttaaagttgtaattaatatccactttatgaaaaacactctctcctctccagattgcataatgaaatactactatcaaaatcaactacatttaaaatttgttaactataaaaacctacctattcagggaaaggaattataagcagcaggtagctcaaagcataattttttttagcatttcagaaacacagtgacaacagtttctaagaatttgcatgttcatttcctgtacgtgaaaccacacacacaaaagtttaaaatattttataatatgcatttactttatcaccttttttgaagaccattgtgcttcccctcttttttggccaggaagtggagtgggaggaagaagactgttttccaaactctctaacaagtttcaaattttaaaaaacagactacagtaaaaaaggaatattctaaacttttcggcctatttttatagtgcctaccttaactggccataatacacttacttacattattttctataggcgggtccaaattacaggtgaatctctttttttttttagcaagttaaaaaatttttttttcttttctgcattagtcacattctcgcccactttaccacccaaagacttttgcagtcagactcctggcagaaggcttagaacattctgctgctgataaaagagaaaccaccacccacccaagacagcaactgccagctgtttacttttagattttggttaagaaaaatttaaggaaattcaagtcaaaattttcaagccaacctcagaaaataaataggaatataaatgaaatgtaagagaaattaaagacgaaaaaaatttcaaatattttctaggtaattaataaaagcctagcaaccattttaattaggcatcacattaattgtaagatcaatgaatgtttactgattggacacttctgtttcccttatctgcaaatccactactcctaccactacatctacacagaaatattgtggctactgatacaccacagatctgtctttaaatgtcaacaatctagtttaaattttttcatgttcaggtatgtgtctctaatattaattagtacataatatgaactgacccatatggaaataaaaaaaccaaaaggtatagttatggttttcatataaacttataatcttatgaatgcaagaaagaacgcatataaattacatataaaaataagcatttataaaggcacatcgctgtatgtgaaagcaaagaaaattttcactgtccttgaaaatagtggaatgaatacatgtttggaactgtataaagacactttctgaagaaaattaatttttaaacttggaagaaagattttggaagtaatgacactggaggatttttttaaaattacacgttcccttagaattgtggctgaatataagtttcacatacatatgttcaaagagttgtgacagttcaagaaggaactaacctaatctaaaccagttatttctaacctacaggctaaggagtcagtagaagagttgcctgaatgcacatactccaagcactgtctgtagtctaaaacatttctgctccatttctcaaatataaatagatactgtaaaaataaaatacaaaatcatttaaaagcatagtagttttctgtcattatacataatttcaaccaacaattactaaaagtccaattgcatgtgtattagaagtacagggtttctcataatcaaaataggtcgggacctttaagctaatgtacagagttccttctggcccaaaattctatgattttaaaggatgaagaactcttacggtgaattccttagaactattccatttcaataaacatacatatgtatatataaataatgcttgctatgtgccaagtactggactttttctcagagatgagtaagacatgattccagacagacccaggttcaaattggcaggagagacagaaacaaataatacaacctaataaatactgcagaagaaaagtttcaaatgcgttgggagcacagcggtatcaatgtcacctgggggagtctgagaagacaatgatttatgaattgggttttgacaggtggtaaaatagaggaacagtaaacatcctagacatccgcacgtacaaaagtacagagctgtcaaagcgcatggcatgtttggggaaatagccagtatagtcttgtatggtaggatattaaagcaggactaaaaggtaaaatggattggggcagactgtaaaagatcctgaatgatgatgtgcttaacaattaggatttgatgctgtcagcaatacggttactaaaaagtttaaggaaaggacagagataaatatgtatttcagaataactctatggaaggattatagtagggaaaccagtggagggcggggggcagagggggcaaccgcactaattctggcgaaaaaaaaaataatacagtgcagtgttaagtggaaatgaagaaccaatgatgattcctggttttctagttcggatagcaggacagatactggaaccattatcagagatgggatagagaagaaaggcaggaagagaaccagaaaagagtaataccccttggagagcagtttcaagaaacaagttatcttcattaaacgctgcaaacaggtgactgaaagggtcccccgtccggtggtgaactcgcaggtgggtaaggcaggatgaaagcagatacggaaggtgtgtccacagggttagagccaaggcttttcattgaactttccgcaccgcatctccattaagaggagctcggagtcggggggcgcggagaggaagtccggctcccaggagcagggagcccgcggcgggaagcggacagggccgggcgccggtggttcaagaggcgcaaggcaccggccccggcgaaggactgccccggcaaaggacgcctccgactcgcccacccctgctcccgtccctggatttagtccacttactctgctcttagtccctcgcagccttcagctgtggcgatgcggactcaaaccctctaccaaccgggacctatgcactcaagggaagagactccgcgcccccctaatccgcctcctcagcaagcagacgcagaatcggacggaggcagcggacggaaggccgggaagccagtggcgttcaacgccatcaccggcggggtagacacctccgccgaccgcctccgaccggcgctcccggagaactccagcctcgcgagatttctttcctcgcgttactgtggggcagaaccgaccactctccgctttgccccagaaggcagggcggggcccttctatgtccctccctattcctcccttcccaggctttcgctcggcctctcgcaaagtctcgcgagtttttccaggggaaaccggcctgggtggagagacagagaaggggagaccgggtgggtgggtcgtacgcttagggggccgtggttggtacttcgctgttggggaggctttcaggtcgcccagatcctgcttcccaatgggtgactgggaaaattagcgggtggaaaatctcgaggggtggaggctttttttttcctccttggccccgccctcttcctgttcggcgactgggacgcctggccctacgagggggaagggaggcttggccgggctatcggagagcgctgtgcgcacgcgcgagcccgagtgcgtgtgtgtgtgtgcacgcgcacgcgcgctcctgctcttaggaagcctgggaaggaccggtgtgctaggagatgatcggggaaagcatagtcccctgtctgtggcaccagacactcccgactgtgcgctgactctccccgcccagccagcagccttttccagagaggctgtggtccatagcctctgttcgttttcactgcaggaccaggcacgaaagtaagcgaacctcgatcctgaggtcttccctatccactcaccttgtattttccaccccccaccctccagcaaagtgggtctagaaggtttctcaaagagagttttgcatgaaggggagatgcgtcttgaaagcaagaggtgaaaatagctggatcgtaagaaatcagttcgttttgatttaacactttggctttgcttgccatgtgcttttcgaatgtggattgtctattcagtataagattttgttagcgaagcaggggagtaccgtatgctctgttttaataagaaaaagttttaaaagttttaaatttccttctacacaccagtgtgatggtaacaactaagtttttctgctctacctggtaaattactgtgatgtttcaaaagctaaggggagagtgtgaagttggggtccttatcctaaggcgaagacctgatgtgcggttatcttaggagatgtttatctttgttttggccttttcttttgctgtcactcctctttcctgttaattccgcacccctacccgccagtcccccttcaaacgtttttcttggagggaagtgcaaaaatgctggcttggggtttatatgtgactaatgtcaattagcaaggatcataaagttgtatttcaagagtctttgtcacttatgtttcgtatatgtaagggaatcaaatacaattaaatgtcaaaatgtttccctctgacaattttaagttcattttaaaagcaaaaccaaaaatgcatgcactggtatttttgtctgggcctggtagagtgacagcctaatatggtgtattgatacccttgctttctggtcatgacctcattaaactgtcctttgtcggacagatttctttgaacatattattcatgttccctaccaagtcttcttgagggaaagaca

SEQ ID NO: 3228 - DNA, 6000 bp, Homo sapiens
aggggcaaggtaaactacaggcaacccggaggttatgttctaccaaaacaaaagattacacaaagaaaaagagaggaaaaaaaatgggatctgaaaaatagggagagaaggatgataggagtgcagtgggcctagaaagcagccagttcaaactggagcagaagactgtgctccaagaagttcctcaggggacaaaatcaaactgctgaattatctaacacatttatgatcaaaatattgggcagttttgtagaagcatgagaaaaagcagcaatggatattatgaaaacaaaacacatgaaggggagaaaaaggagataataaataattccaggaataaacaaaaagctatataaggaactaaccatatatattacttggcttaacagtgaataatactttacgtagatgttataatgccaacatgaaactttgaaataaccaacaattctgacatattaatattgagaacacaagggaaggggacaggcattagacatatgaaggtcagaagttcaagaccagcctggccaacatggctaaaccctatttctactaaaaaatacaaaaattagccaggcatggtggcacacacctgtagtctcagctactcgggaggcttaggcaggtgaatctattgaacctgggagaggttgcagtgagccgagatggcgcaatgcaccccagtctgggtgacagcaagactccgtctcaaaataaataaataagtagataaataaacagagaactcaataaacaggaataaaaacatgttatttagaaatctggaagtaaatatgacaactactaaaaaatggaagtttgcttgggggtgctgggtgtagggaaagcctagaatggggatagctgttttcatatgacttggcattttaacactatatgcaaatcctagagtgatttaaaaaattagtcatttttttaaaaagtattaccacatttagataatttacaaatggccacagctcaaaatctaaccatacctcctgtaaattttggtcttcttgagtccaagaatttaaaacatgtgctccagagtcactcacaataaaattcacctaatagattccaaagaaacaattagtattcaactctaatttcactcaatcaccaacatattttcaagtaatatgcaatttgtaacactgtttcactgattcattcattcttctttttatagttacagaatgtgtagtatatgccaggtgctattgctggcactgagtacatgggaatagagtgatgaataaaaaagttctgtcactcacaatgtggggaaagtcaggggaggggagtctactaggacagaaggcactgcgggaagaatacaaacaaataaatgaacaagataatttcagagagtgataaacgctatgaaaaataagttaattagctactttagattaggtggttacagaaggactctccatagaagtggcaactgaaggcaatccaaaaccagccaccgtaaagtcagggatagacaatctgggtacggcaaataacaaatgcaaaggcatctaagcatataccctggaaagggtgaaagtcagagcaggcagtgggagaggagacaaactcagagaaagaggcaggagctggatcatatagggcaccgaaagccaaaataatggatatggtctttacgctaagttttaaagtaaaatgcaaatttgaaaatttaaaattacctgctatcaggtaagataatgacaaagaacattttggaaaacttatcaaatgatgattctgacccatgttcctttttggctagagggttagatttctttctttactctggacaacacgatctaatctatgatctttttccctatatatcgatgaaataccagttttccttcctcccccaagaagtttgataattggtcttctcttccaaggcttatctgacagggatatattttacaagtcactttacgtagatttatctcttttaaagcttacatcgaggaagtaagtgttatacttacacgggaggaaactgaggcttggagagattaagaaatatgatcaaagtcacacagctagtagttaaccacgccaaggtctgaaccgaagcctgcgctccaaatcagttacattccctctcattatatatttttatcacacacagaatgcacacaaattttaagaagggcttatattttaatttggaatatatgtgaatgtataatatcagactatgttcacctttactctactgccctaccttcctcagtctaagaattggctaggtcccagcgcttcgagtaagacagaaagcaagtcttccacttgtggctaaacaaatgactttcccaaaataagacatttaagatactgaaatctaagattaaactttaatacctgtaatttctgtcaatcatccatttctcttcttactgataaaccatatccacttagcattcttaaaagtatttctttctaatatggccaaacaatacagcagtttagtatatatttgctaaaattgcaagcagctagccagcttaggttcaaattctggctctgcctctacgtaactatgtgactcaggacaagtttcttctctttacctcagtttccggatctgcaacagggaagcaacaaacaagactgacagtcagctgctacatgccagcacagtttgacagcagctctcaatggtcagtctgtgttctatactggttgttacatactttgaatattgcttcaataactacagttcctacctaacatgactgttatgagaattacggaaattaataaatatgaagcactttgaaatatgtctggcacatgtaaagtgctcaataattgttagctgttattattactggccccaattaaatatccattatatattaatcccaaagggcagcgttatgtaccacatttttaagtaataaacacacagtcattatctatagcaaattcatataaaaattcatttatgcagttaagtacatccccaaaatcatgattttgtttgtacttcacactcaccagctttttgaaaggaaatatatcatacattattctacaatattccatggaagattctactgagcaagtccacaatgatttagatatgggggccaaaggaatgattccttgggttctattcttcaccagcatatcaaactcgacatgctgcctgcaagattctgccatataagggcagtgatccacaacaaacactgttttatgagattcagaaaaaatcttcattttgttttaacctgtaaggggaaaaacatattagccaaatatttgtacataacatcttacattttttctaattttctcaagaagattgtctttccctcaagaagacttggtagggaacatgaataatatgttcaaagaaatctgtccgacaaaggacagtttaatgaggtcatgaccagaaagcaagggtatcaatacaccatattaggctgtcactctaccaggcccagacaaaaataccagtgcatgcatttttggttttgcttttaaaatgaacttaaaattgtcagagggaaacattttgacatttaattgtatttgattcccttacatatacgaaacataagtgacaaagactcttgaaatacaactttatgatccttgctaattgacattagtcacatataaaccccaagccagcatttttgcacttccctccaagaaaaacgtttgaagggggactggcgggtaggggtgcggaattaacaggaaagaggagtgacagcaaaagaaaaggccaaaacaaagataaacatctcctaagataaccgcacatcaggtcttcgccttaggataaggaccccaacttcacactctccccttagcttttgaaacatcacagtaatttaccaggtagagcagaaaaacttagttgttaccatcacactggtgtgtagaaggaaatttaaaacttttaaaactttttcttattaaaacagagcatacggtactcccctgcttcgctaacaaaatcttatactgaatagacaatccacattcgaaaagcacatggcaagcaaagccaaagtgttaaatcaaaacgaactgatttcttacgatccagctattttcacctcttgctttcaagacgcatctccccttcatgcaaaactctctttgagaaaccttctagacccactttgctggagggtggggggtggaaaatacaaggtgagtggatagggaagacctcaggatcgaggttcgcttactttcgtgcctggtcctgcagtgaaaacgaacagaggctatggaccacagcctctctggaaaaggctgctggctgggcggggagagtcagcgcacagtcgggagtgtctggtgccacagacaggggactatgctttccccgatcatctcctagcacaccggtccttcccaggcttcctaagagcaggagcgcgcgtgcgcgtgcacacacacacacgcactcgggctcgcgcgtgcgcacagcgctctccgatagcccggccaagcctcccttccccctcgtagggccaggcgtcccagtcgccgaacaggaagagggcggggccaaggaggaaaaaaaaagcctccacccctcgagattttccacccgctaattttcccagtcacccattgggaagcaggatctgggcgacctgaaagcctccccaacagcgaagtaccaaccacggccccctaagcgtacgacccacccacccggtctccccttctctgtctctccacccaggccggtttcccctggaaaaactcgcgagactttgcgagaggccgagcgaaagcctgggaagggaggaatagggagggacatagaagggccccgccctgccttctggggcaaagcggagagtggtcggttctgccccacagtaacgcgaggaaagaaatctcgcgaggctggagttctccgggagcgccggtcggaggcggtcggcggaggtgtctaccccgccggtgatggcgttgaacgccactggcttcccggccttccgtccgctgcctccgtccgattctgcgtctgcttgctgaggaggcggattaggggggcgcggagtctcttcccttgagtgcataggtcccggttggtagagggtttgagtccgcatcgccacagctgaaggctgcgagggactaagagcagagtaagtggactaaatccagggacgggagcaggggtgggcgagtcggaggcgtcctttgccggggcagtccttcgccggggccggtgccttgcgcctcttgaaccaccggcgcccggccctgtccgcttcccgccgcgggctccctgctcctgggagccggacttcctctccgcgccccccgactccgagctcctcttaatggagatgcggtgcggaaagttcaatgaaaagccttggctctaaccctgtggacacaccttccgtatctgctttcatcctgccttacccacctgcgagttcaccaccggacgggggaccctttcagtcacctgtttgcagcgtttaatgaagataacttgtttcttgaaactgctctccaaggggtattactcttttctggttctcttcctgcctttcttctctatcccatctctgataatggttccagtatctgtcctgctatccgaactagaaaaccaggaatcatcattggttcttcatttccacttaacactgcactgtattattttttttttcgccagaattagtgcggttgccccctctgccccccgccctccactggtttccctactataatccttccatagagttattctgaaatacatatttatctctgtcctttccttaaactttttagtaaccgtattgctgacagcatcaaatcctaattgttaagcacatcatcattcaggatcttttacagtctgccccaatccattttaccttttagtcctgctttaatatcctaccatacaagactatactggctatttccccaaacatgccatgcgctttgacagctctgtacttttgtacgtgcgga

SEQ ID NO: 3229 - DNA, 6000 bp, Homo sapiens
aactttcttaaaacattatgagattttttttttttaaaaaaaagctcatcagctatcgttagcattagtgtattttatgtgcagcgtgataattcttcttccgatgtgcccagggaagccaaaagattggacacccctgaactacatcattttacattccatcaacaatgtatggaaggttgcagtttcttcacatcctctccaacaattgttattgtctttttcattacagtcatcctcgtgggatatattgaattgcattctcctaatgactagttaggttaattaagtatcttttcatgtgcttattggccatttgtatatcttctttagataaatgtttattcaaatcctttgccacttttaaaaatggggttattttcattttattgttgagttgtaagtgttctttatatattctggatactaagctcttatcagattttttatatgtatatttcagatatatttatatttatatatcatatatatatatatatatatatttgcaggtattttcatcccacatgtttttctcccccattagtatcaggaagaaattcaagaacttaatgaagtcgcgagacatcggccacggtccacgttagttatgggaatccagcaagaaaacagacaaatcagagagttgcaacaagaaaacaaaggtaagatacgttactttttgacattaatcccatttctagtctatattcctaaatcgtatttattgctctttatcctgtcccacatatgaacatctgcctggttgacatcctcttagattctcacccttaatatccagttagcactgctgttgttagctatgaaataacccagcttcattctctgcagtcccactgcattggcccccagattagatgctcagtctcttgcctgaaatgtccaaactgatctccctgattccagtctctcttcccccttccaatctgtcttcaacataaccatcagattgatatttcaaaaatcagtctgatcatgtaattcttttgcctaagaactttcattatatacttattaccttttacagggtccctaaaaatcatttcccagccttttttttaaatcttcttcccacagctttcttcactgtgaactctttgctcttgccaacaccaatcacttcctaaacacgtcatctgttttcatgcctacctgcttagaaggtccattccttcacttttcaactgagggaactcacactgtacttctacaaagcttccaccagtttcttcccatagacatctcttaaatctatttgacttaacactccactctgccacctaccacatgcttgttttctctactagactcttgaggtctgtggcccttaatatagagggagccttggccgatattaattgctgtttagtacatctttgttgaaatgattctcaagaaacaagcttaaaatattcaaaaaactaatacgggacttcatttggtgtctcttattgttatatggctagatttttgtgcattgtgttttctttttaaaatgtcccgttcataagttgcttagtggaagagaatattttgtgtacttttaactcaagttggaataaaatacaatattattcttgatagaattacgtacatctctggaagaacatcagtcggccttggaacttataatgagcaagtaccgagaacaaatgtttagattgctaatggctagcaaaaaagatgatccgggtataataatgaagttaaaagagcagcactccaaggtaatccattctataaatgtgacctgaaatggaaaagagagacgattgattattctgtgttcagattttttttgaaaaaaatcacaggtatctagtaatggcattttaacatgatgttgaatgtttcatctttttaattgacattttctcctttttcttatttttccatttcttgttatatatcattttctgtttgatttataaactctcactgtttcttagaaactttaatttgtacgttgaaaaataaattttattttggatataaaggtaagtctggtctcttcaacattatttttgtagggctatatacttttaagaaatatttcttaaagggctgggcatggtggcttacgcctataatcccagcactttgggaggccaaggcaggaggatcacttgaggccagaagttcaagaccagcctgggcaacatagcatgactccatctcttcaaaaagtaaaaaaattagccgggtgtggtagcacatgcctgcagtcctagcttctcaggaggctgaggtggatagaccacttcagctcaggagtttgaggttacattgagctacgatcatgccattgcactcccatctagacaaccgagtgagaccctgtctcttaaaaaacagaaatttttttaagaaacattttttctaataaatttgtgtattgacttctcttgcaaaaacaaaaaataatggaaaccttttttaaaatctgaaagcagtttaatgtagatttttcttaagactgttttctgaataaggctaattcatccagactataaatgatcttgtttattataatggaaaaaacatggggttcaggagaagaaccaacatagtaaaattttgctcccttgccccagtattgtataccagttgacatcattttttagaaacaaagctgaagtagttagaaattagtgttttacctgctgttcatccctttgtcatccctgtgtctattccctttggtatgtccccatattttatggcatattttatggcaactgctatgaagacaagtagaataatcctttctcacatatttattttaaactgagttttagttgctgatatgaaataaaaataataaactagattgtggaaactagactgttacctgtattagataatggtgagctgactattattattaccaatattatttaagaaacagtgattatgagccttcttttccccatttgttacaacagaaataggaaaggacatattttcatatttatctattattgaaacacattttagattctttaaaatacttcttccattttggtgcttgtacgtgtttttaacttattagtaattaattctattagaattaaatacctatcaaatagctctttatatgcctttattatattagaaaacctaatgataggtacctcttgtgtcaaccagtaaaataataaattaaattaaaaatttgtgtttaatgttttctaattatgctattcatctcctaatcaaatggcaatccagggatgtttaagtggtgatcttttgaatacaaaatttaactattgttaatgagaccattctaaaatcatttaaatttaaaggtataataataactatagtaactaagactttttaaaggcactaaaaggagttgacttaatattatttgtaagataaatataatcttgagaatttctaaaaggtttgtatgttttataacctaaaaataaaatgttaaagatctaaagcgaagaataccattacaaaaaaagtgcttagaataggataactatagcttgcaggtcccatctggtagcaactatgacagaagcaaatgtttcctaaaatatattagattttactattcaccagagctggtttattaattagtaaggttaaacatttcctaagatagctgtaagccatccttttttattatgtagattgaattcttcatctaagttcagatgatccttgcctcccataaaatgactattcagttatttgttattaattttcactaatacatattaatgtttgtgattttgatttttcccaaaaaggagacacttcgacttaattaaacaaacattaatactggcactgggttagttatgggaaataataagatgaatgtacaagcttgcagtatagtgggagatacagacacaaacataacaatctactataaggtagggcgtgatgaatcccaaagtagatgaattgttactggaacgctagagggaacaatattaactgtcataaggaaaatctggaaaggtaacaaggaagggaagaaagtctgtctcagtccagccttgaattaattatgggcaggtaggtaaacaagcagaagtgggtgggtgggcagagaaacttgtataataaaagcacaaaaagtatggtattgtagggtgtgtttaggtactagtgctctgatatgcctaaacacaaaagtaattttacaacacatttagagctaagaaacagagttacacataacagcattttggattggagtaagagatccttttgagactgttataatacagaactttgcccttaactagaagtttttgagcacatacttaaaaaatcagtagaaagtttgagagctcatttttacccaaatactaattttcatgttatttttgaacagatgcctttttggaaatcttaaaaaagcaaacatttcaaacagttggctaacacgcatgaactaacactcattcagtttttaaattacggatgatatccgtattaacattataatgactctatactacagattgacatggtacatcgtaacaagtccgaaggattcttccttgatgcatctcgacacatccttgaagcacctcaacatggactggagagaaggcacttggaagcaaatcagaatgtacactaaataaacagtcaacttttggggtgtggatggaaggggggtccattttaaaagtgcttttacattgaatttccctcccagattagatcagcaaataaatgaaatttattaaaagaatgttgtgtctttaatagccatgctgttcagtgtagaaactttaaatctctcattaattttctgtgtattgtatcatgtacagcctgttagatatttgcaggttttataggttattcagtccaacgctttatttatttgctcttgttagttgttgctgtgaaacagtcatttcctttctggacatcaaagatattttcttggcattaattttaaactgatttcataaggtcaaagtattaaatgttttaattcagattgtggatagtttgtagtcctttgattttgcaaatgaaattaaaatgcctttgtttagatgttaggattaagtatagtagtgctctctccattgtgtcttaatttttttttaactcacttgtggcaggtctttattgaataaaggaggaataaacctagacagggagttagaaatgaaagacatttcaagacagttcaagggttatgttggtgacacttcttgtcttccagacagttttgaaagcacagatcttgcctcttgtgcttgttaaaaaatctgtgatacttctctgaagattttataattaaataagtgaaccattaccatgaccttttataaaagtgctgccctatttgaagtattgggttttttctcatgatgagctttgttagacttggtactgaaaaaatcagtagtttttttccttctattttaaaggcaaagaaatgcttgcttcagctaggcatggtggctcatgcctgtaattgggaggctgaggtgggtggatcacctgacgtcaggaattggagaccagcctggccaacatggtgaaaccccatctctactaaaaatacaaaaagttagccaggcgtgatagcgggtgcctgtaatcccagctgctcgggaggctaaagcaagagaattgtttgaacctgggagtgggaggttgcagtgagccgaggtcgtgccattgcactccagcctggccaacaagagcgagactctgtctaaaaaaaaagaaatgcttgctttctgtgtagttttttaacttaggtcagtgccataggactgaccaaatcataaattgaggatgctgttggtattcaaagtttttactcattacccttactcagtttgcagctgcaatgatctgtacttaacctgcttttacatattatgcttccttgacaatgggaggaattttaatggttaacttgcagaatatgacagatacttgtcttaatatcattcttcctaccataatcta

SEQ ID NO: 3230 - DNA, 6000 bp, Homo sapiens
tgggcccacacctgtaataccaatactttgggaggctgaggtgggaggatcacttgagcccaggagttcgagaccatcatgggcaacatagcgagaccccatctctacaaatctacaaaaagaaaaaatttagaaataaaattatgaccaatttgtctcaagtttttccaggaagatctcaaattaggggttcagtccagaactatggactggaaatcagtgggaggggaaagatgatggagggaaggaaactgcttgttaagaggccaagagtaagcagagtagtgttgaggaactgagatgcgggaatttccataccctataaaccaccccgcccctccctattcccgtccctcaggtggtgaccctgtggtaccgagctcctgaaatcctcctgggctgcaaatattattccacagctgtggacatctggagcctgggctgcatctttgctgagatggtatggaggcttgcccaagttccacccagccccctccctctcctccccacatccaagaacaacagaactgcttcttggcccagacctatggcccttctatcacagggttctctctctaaagtagcaccaaggggaatggtgggaaaggatgcaactgttgccctgatatcaaccacagtgttaggatatcctcaaacagccttagtacctggtatacatctcttatccctgaaataagttaaagcatttctgcagctgttttagctgtagtctgcatatatttgggagaatgattccatttagtgcctcttttatttcaggccttcatttcaaggcttgtagaccttgttgtatggtgccagcaatgtagtgaagacaactgtggtcactttacccacacctttcatttaaactgcagatttaggcagggtgcagtggctcacacctataataccagcactttgggaggctgaggtaggtggatcacctgaggtcaggagtttgagaccagcctggccaacatgttaaaaccctgtctctactaaaaatacaaaaattagccaggtgtggctacttgggattacacacctgtaatcccagctacttgggaggccaaggcaggagaatcggttgaacccgggagatggaggttgcagtgaccaagattgcaccactgcactccagcctgggcgacagaatgagattccatctcaaaaaaaaaaaaaaaaaaaaaaaaaaaaagatttagatcatgttccccttcaacctctggcttttcagactgaaggatccttgaagcctggctttatgtagaagctcccatctcctttaatataacagtacagtggtgcagtaggctgtcttcaaatcagcaatatgttttattgtcttttatcttggttgtaaccaagagcttaaagaccattagcctatacatatgtaatgtgcatttatccccccagtgcattaccttacaattgtccgtattcctctctcaattcatcaaaaaatatttgttaagcacctagtgggtacccagcaccatgctaggtgctgtggggaacacagaagaaatggaagacagagtctctgcccgctgtgctcgtatctagaagtggctgcatcacaaggttgggggatgaccgcagtgtctaccccctaccccgtgagtggcttgggatacctttgctacatgtcagtggcaccccagacattcaccccctcccagacccacccagccttggggatctgcaaagccatggttgggggaaggaaggagggggcgaggagacagatgaaggaacttcattgtctcaggttctgtgtgactgaccccatgaaaggccctggggagggagtcatggggccctgctgaccttttactgtctgtgggaactcctttgtatagaggagagttttgactgacgtcaacgtgggtcttggtatttcctctttccccattttcaggtgactcgccgggccctattccctggagattctgagattgaccagctcttccggatctttcggactctggggaccccagatgaggtggtgtggccaggagttacttctatgcctgattacaagccaagtttccccaagtgggcccggcaagattttagtaaagttgtacctcccctggatgaagatggacggagcttgttatcggtgagagtgggcacctgttttccctcattcatttctcccagggaagggcttttccaggatgaaggaaggatgagaccctgaaatctgggcctcagtgtttcatttccctggttcctgctctccctgttggcacactgattcagctatgggaggatggaagtgagaattctgccttgggtagaaggagttctggtttcctgatttctgggaacacctgctgcccatttagtccactatcacatcattgaagtcaacatgcatctctccctctagcaaatgctgcactacgaccctaacaagcggatttcggccaaggcagccctggctcaccctttcttccaggatgtgaccaagccagtaccccatcttcgactctgatagccttcttgaagcccccagccctaatctcaccctctcctccagtgtgggcttgaccaggcttggccttgggctatttggactcaggtgggccctctgaacttgccttaaacactcaccttctagtcttggccagccaactctgggaatacaggggtgaaaggggggaaccagtgaaaatgaaaggaagtttcagtattagatgcacttaagttagcctccaccaccctttcccccttctcttagttattgctgaagagggttggtataaaaataattttaaaaaagccttcctacacgttagatttgccgtaccaatctctgaatgccccataattattatttccagtgtttgggatgaccaggatcccaagcctcctgctgccacaatgtttataaaggccaaatgatagcgggggctaagttggtgcttttgagaaccaagtaaaacaaaaccactgggaggagtctattttaaagaattcggttgaaaaaatagatccaatcagtttataccctagttagtgttttgcctcacctaataggctgggagactgaagactcagcccgggtggggctgcagaaaaatgattggccccagtccccttgtttgtcccttctacaggcatgaggaatctgggaggccctgagacagggattgtgcttcattccaatctattgcttcaccatggccttatgaggcaggtgagagatgtttgaatttttctcttccttttagtattcttagttgttcagttgccaaggatccctgatcccattttcctctgacgtccacctcctaccccataggagttagaagttagggtttaggcatcattttgagaatgctgacactttttcagggctgtgattgagtgagggcatgggtaaaaatatttctttaaaagaaggatgaacaattatatttatatttcaggttatatccaatagtagagttggctttttttttttttttttggtcatagtgggtggatttgttgccatgtgcaccttggggttttgtaatgacagtgctaaaaaaaaaaagcattttttttttatgatttgtctctgtcacccttgtccttgagtgctcttgctattaacgttatttgtaatttagtttgtagctcattaaaaaaatgtgcctagttttatagttcatctctttcctcctcttatttactgaaagaatggtgggagacagaatatgaatgtgtgtatgtgatcattgatttcagaccccttttcctaatctctctgtgcatggctgcccaccccaccccattttggctagtgctgacggtgaacaaagtggttattatcatccctatttatggctggggaaactgaagcctatatacttcctacttcactttctccacacaccagcaaacctcctttcccccagccaacataccacacacacaccacaccacacacacatcacatacacacaccacacacacatcatatacacacatataccacacacaccacgtatacatataccaaatacacacacaccacatacacaccatatatgcacacacaccccatacatacacacacccatgcacatacatagcggcaggaagagggctcccggggaatttgcctttcgacactgcatttcccagtaagcccgccgtttttcctttctgtttcatatcacagacagaaaagttttccaaagattcttttatttacatttacatacgattctgaaaaagcgtctccaagctaccacttcttgtagttgccattgtctcattccaccaaaaaacatctcagaccgcccgcggccaccccaaatacgcctgtccactgaagcctcactaaaaggaggaagcgctgatgtcagggttacttaaattcccaggctccggatccctagaagaggtatttccctttacgcccgcgaatttgtcatagaaggcagggcactagagccagccccagccaagtccagggggaggggcgaaggtcagtagcggccttcctaaggcttccttcaacccctccttgcctgccagtcaagtaccgtattttcgcagtactggttaaagtttcactttgacccgcctccatcactcacctgattagatgtttatgagtcaaaaggcggggtcatggggtgtcgagattttattggtggatacatacgcctgtcggcagtgtaccgccccctgtcttcaggagcttgctctttaatggctccttacctcgtccatcttcgaggtttctccctcgctattggcttgtggccccgcctgtcgcgtcccttgctcgtacttgttggtgacagcgcccaaagagactcgcctttctccagaggattggtggatgagtgcacatatagcccaccctcgaaggtaggcgggtaatcgagctattggctggagccccgccccagggcgaggaggagaaggaggggcaggagggtttggttgagctgcagctgtttgtctgttcgacacaggcttggggccgacgggggagacggagccccaggtaccgagctgatggagcccaaagggcaggggcggaagcgcccgggagatgagagcagcctggcctgagagcggaggcgggtctggtcctaagcgaggggttagagtggcccaccggagaggggagaagggggccgggccccggcaggcctaatgggggtcgctgaggaggggactgggcggcctgggaccccgaagttggtgagtcgggaaggcggctgggctgtggcggcggccaggccgagggccgggggctggaggcctggagcttgagtgagggcaggggcaggcctcattaagcagcgctgaagagggaggagctggggaaaggaacagggcagcgggtgaggtaagcccatttgccgggaggtgaggagggtcagacctgtcgcccgagccccgggggtgactggggctgggtccctgcagagaggttcattggaagggcctgagaagggttcttagttgggtaagaagcgttcttttcagggaaagtgcctattgtaaaaagaactgagggtgctatggtgttgagctgagagagatttgggttcagtgagggagaactggggaaaatgaagaaggctgtattaatctagaagactaaggtagttgaagtaatggaagcagggcctggtatcagttatgggaacttctgggaatgctgaagggtgggctgggggctctgggtcttgggagtacacactcttttgttccctttagtgtttagatgtggtaatttgaagctttttaaaactcccagggtagggatgaagatcaaagtaatttttttttttccatgactgttggctgctccaaactcagcccctacactttctgttggcctcatagctggtctatactgcagtctgtttcttaacttactgtttcatgtcctatgaaagagctaagaagttggattgggggcatgttttgtccacttctttcccacttaataatgtggtctatagcaaatac

SEQ ID NO: 3231 - DNA, 6000 bp, Homo sapiens
gttgaattcctgaccttaggtgatccgcccacctcagcctcccaaagtgctgggatttcaggcatgagtcactgcacccggcagagctgcacttctaagggaagttaaatctgatttcttctcttctgagctaaaaaggttgaaaggaagagaaacctgccccatctcccttttttttgtctcgggtttgaaggtaataatcatcataccacttgactggtttaccaaaaaaaaaaaaaaaaattagtatttttgtgggaaaaaatgagaatagaaaataaataattgaatcttatatgtattatttcatttctgtaccacagaatttttgagagtctagctattatattttttaaatgatacccttataaacatgataagattaaagatcaaagcttagaggtggctcaacaattgctgtgaacagggaggaaggcaggacatattctttctttttcagaggtgggatctcactatgttgcccaggctggtctcaaactcctgggctcaagtgatcctcctgccttggcctcccaaaatgctggtattacaggcgtgaaccatgatgtgcagccagaacatactcttaaggctacatattagggtacgaggtagtcttttctaagtcagtagttactgatctctgagaatccaaggttgcttagtagcaagaaagcttgctgaccacatctgggctctggcttgacttcccatctctgagagttagtgacagagactttgcaactcaagcgtgtctgcaattgtttcctgtctttacactcccccagagctcaagtgatatgtttagccatgagaattcagtccattctaactcccacattttcctttattgtagagtagtaacattgaggcttaatattctaccccttggatcacatgctttgaaatacataaaaatgtaagggagtaagttgaaaaaaccagtaactttttctattgtttcttgagagtatagcatatatatgtcacctgaaggaaacttgatcagcttatcatctgtccttttttttttattatggtgtcacctgtcttctcttttatttattttttattttgagagacggagtcttgctctgttgcccaggctggagtacagtggcataatctcagctcactgcaacctccgccctctgggttcaagcgattctcctgcctcagcttcccaagtagctgggactacaggcatgtggcgctacacccagctaatttttgtattttttagtagagacggggtttcactatatgttggccaggctggtctcaaactcctgacctctcaaacaccagagtgagactctctctaaaaatggaaaataaattttaaaatgttataattaaagatactcatttaaattgaataaatttagctttatgaaaaatttgctgtatcatctttattttgatcctttcgtcataggccattgaaaacttaatcataaaatggtacatgtatatctgaatttttaagactgactgaccaaggggactacagaatacccagtagaatcaaagtaattgtcatgttcctctgtattaatctagtctactttgggaccttgagttctcacctctcattcttttgctaacttcctctttaccctttagttatgtctccttttttttttttttttttttccagagatagcgtcttgttctgtcgcccaggctggagtgcagtggtgtaatcagctcactacaaccttcaactcctgggctccagtgattctcccaccacagcctctggagtagctgggattacaggcacataccaccatgcccagctaatttttttaaatgttttctagagactcagtctcgctatgttgcctaggctggtctcaaactcctcacctcaagcaaggcttccccttttatctcccaaacccctgggattacaggcatgggccgctctgccaggcctgttttttctctttttctttctctgtaccactttcatattgtggcttcttccctgcccccgatctcccccctacccaccccaggtggagtcttgctctgttacccaggctggagtgtggtggcacgatctcggctcactgcaacctccgcctcccgggtttaagcagttctgcctcagcctcccgagtaggattacaaatgccggccaccaaccacacccggctaattttttttttttttttttagactgagtctcgctgttgctctgtcgccaggctggagtacagtggtgcaatctcagctcactgcaacctccacctcacaagttcaagcagttcacctgcctcaacctcccaagtagctgggactacaggcacgcgccaccacgcccagctaatttttgtatttttagtagagacggggtttcaccatgtttgccaggcttgtctcaaactcctgacctcctgatctgcctgcctttgcctcccaaagtgctgggattacaggcgtgagccactgtgcccgccttttattttttgagacggagtctcgctctgtcacccaggctggagcacagtggcgcatcagctcagtgcaccctctaccttctgggtttaagcgattctcctgcctcagcctctggagtagctgggattacaggtatgcaccaccacacccagctaattttttttgtatttttagtggagacggggtttcaccatgttggccaggcagggctcgaacttctgacctcaggtgatccacctcagcctcccaaagtgctgggattataggtatgagctactgcacccaggctgtggctgctttttaggaatatattgataacaactaatattgagatatattttaatagctattagcactatgctaaacacatctttcacttattatttgtagctatgaggatggtattttttccattttacaaaggtagaaggtaaggcttagagaggtagagaaattctctttatatcatattagtaatgattagtagcttaatatttatttagcacttagtatctatcaaatacttaaaatactttagttatttatatgcattatctcatttaatccttacaacacccttatgaagtaggtgcttataaggctattatctcattttacagatgaggaaatgaatgcacacatatatttagtgacttgctcaaggttcatagctagtaagtagagctgaaaaacaaacgtggagaattggactccagagcctttattcctctgaattgcctcctgtatgattttctgtctttacgatctagtaagtggggttactgaaaatttttaaccccagtttaactccagtcccactaattgtggtgacaaaataatgatgtttccccacatatgccatagagtatgatgtctgtgaagtcactaggatctgctttggaaaagcgaaagagtaatttgaacaagcaaagtacaactctcaagcaatgcttaggtttgggagagaggtttttgcatgctctgcctatgctaacttccctttgaatttcatagttcctttccgctcagagtcaggatgatgaaatgtattcagatttagacgattagaatctcaaagtcccaactcttctctctgttccctgccccaccagcagctttcttagccctcttagaagatagaggagctgattcagtgtattctttcatcaaatactgattgcttgcagacttaacgccctataccatcctctggagacttctgcatgtctttagaaggtatacctttctctgcctctaatttggagggctacagctgttaggcccctttggtgtggagggtaatctaatccctaggcaccagcaagacagctgcaagttgagagtaggtcaagcttactgattcttgatagactttcagatttggaaagatggcagaaacaaagtgaaaaaagagttgttaatgaaacaaagagttgataatgaatgtgatctgttggttgtatttctctctttaccttcaaccaaaaatgagaaaggatagattttgtggcaatgggaccctggttagatctttagaaatgtcttatcagggagaccggtcatatataaaggatacagcagcaactacccttctgcccttaggagtggtgactcttatcccacacccctagagtgaatctctcattttgacaaagagctaaggaaaaatgaaaagaaggccaggcacggtggctcatgcctgtaatatcagcactttggaaggccaaggcgggcagatcacctgaggtcaggacttcttagactagtctgaccaacatggagaaactccgtctctactaaaaatacaaaattagccaggcgtggtggtgcatgcctgtaatcccagctactcgggagactgaggtgggagaattgcttgaacccgggaggcagaggttgtggtgagccaagattgtgccattgcactccagcctgggcaacaagagtgacgtctcaaaaaaaaagaagaaaaggaaaagaagagcacagcaccaggatgccaaggagatactggggatctagggtaccggtgggtggatctggatattcttcaggccagctaaaggttgatcactttgtgtgactcaaacaaaaaactttgaagacctggtggggaattactggggaattaaaaactctcagttttcagtctctctatttcggctcccttggcagttagagattatgtggtagggcagactccagaagcagttcttattttgctcttcccaactcttaccactgaggatcagctgcctgggaccttctcagagctaagtcctcatagaagcaaggagatgaagaggttctatccttctctgaaaagcgattgcagcttcaatggacgtatgtttaattttattcacttttttttcttgcaggagtgttgaagcctggaaatcccctccccttccccctcccccctttacagtatccccctccctccaccctttcccattctgataatctggccatgactagcagaagcacagctaggcccaatgggcaaccccaggccagcaaaatttgccagttcaaattggtcctgctgggagaatctgcagtgggaaagtcaagcctggtattacgttttgtcaaagggcagttccatgagtaccaggagagcaccattggaggtgagtgccttggggtaataggagattgaatgtttggtaagggtttttttttttttagatggagtcttgctctgttacccaggctggagtgcagtggcgcaatcttggcttactgcaacctctgtctcccaggttcgagcgattctcatgcctcagcctcccgagtaactgggattacaggtgcacaccgtggcacctgtctaatttttgtatttttagtggagagggggtttcaccatcatgttggccaggttggtctcaaactcctgacctcaggtgatctgcctgcctcggcctcccaaagtgctgggattacaggcgtgagtcaccacgccgggccggtaaggcttttgaaaagagatataagacctgattatggagctggccctcttagtcccattcttttccccagaaatggaaaccctttataaaaacagaggccggtcccagtggcccaccactttgggaggccaagatgggcggatcacctgaggtcaggagttcgagaccagcctgcccaacatggcgaaatcctgtctctactaaaaatacaaaaaattagccaggcgtggtggcaggcgcctgtaatcccagctactcgggaggctaaggcaggagaatcacttgaacccagggggcagaggttgtagtgagccgagattgcgccactgcactccaccctgggcgacaagagcaaaactccatctccaaaaaaaaaaaaaaatcaaaatctggtaaaataggctgggcatggtgggtcacacctgtaatcccagcatttgggaggccaaggcaggcggatcacttgaggccaggagttcaagaccagcctggccaacaaggtgaaatccccgtctctactaaaaatacaaaaaattagctgggcgtggtggca

SEQ ID NO: 3232 - DNA, 6000 bp, Homo sapiens
gagatggaggttgcagtgagccaagattgcgccattgcactccagcctgggtgactagagtgaaaatccgtctcaaaaaaacaaaacaacaacaacaacaacaaagattagccgggcatggtggcacatgcctgtaatcccagctacttgggaagctgaggcaggagactcgcttgaactcatgaggcggaggttgcagtgagccaaaatcacgccagtgcattttatcctaggcgaaggagcgagactgtttcaaaaacaaaaaaaaatctggtaaaatagaggctggaactaatgcaaaatacaaagggtgtctgtctttctcatctttgctaccttttccccactactaccccaaaatagggtgctaattcaataaaggatcttttatgagaacttccaaattattccttccccttgttatttttatttatttatttatttatttttgagacggagtctctgtcgcccagactggagtgcagtggtgcaatcttggctcattgcaacttctgcctcccaggttcaagtgattctcgtgcctcagcctcctgagcagcggagattacaggcacataccaccatgcccggctaatttttgtatttgtatagagacagggtttcaccgtgttggccaggctggtctcaaactcctgacttcaagtgatccacccgcctcggcctcccaaagtgctgggattacaagcatgagccaccgtgcctggcctctttcccctttttattagtcatcttggaaatgtattcctggacctgcagcagattatatgaaaaagtaacagccaaataatattgataatgatgggacttgccatcaagctttaaaatcttctaattaattctttttttttttttttttttttttggatactgagtctcaccctgttgcccaggctggagtgcagtggtgcagtggttgcccattgcaacttccgcttccccagttcaagcacttctgctgcctcagcctcccaagtagctggaattacaggcgtccatcaccatgcctggttaacttttgtgtttttagtagaggcggggtttcactatgttggccaggctggtctcgaactcctgacctcaagccatccacctgccttggcctcccaaagtgctgggattacaggcatgagccactgcgcccagccaatcctctaattaattcttttgtttgtttgcgtttgtttgtttgttttttgagacggagttccgctcttgttgcccaggctgaagtgcagtggcgccatcttggctcactgcaacctccacctcccaagttcaagggattctccagcctcagcctcccgagtagctgtgattacaggtgtccaccaccacgcctggctaatttttgtatttttagtagagacgggttttgccgtgttggccagactggtctcgaactcctgacctcaggtgatccacctgcctcagcccccacctcccaaagtgctgggattacaggcgtgagctaccgtgcccagcccaatcttctaattaattcttgatgtgacttttatctgaagctattttctctgtcatttgttattctcctattttggttagaagaaggatgactcgtataagtgccagttcttctgtccctcttagtttatgatgtacccccattccttagctagtgacatttctggcaggaaggacttagccaagggcagtcttaatcctggtttcaagacttacatgtaaggagaactcaaaaccttttcctgtagctgactatcctgggtggtgactggtcttagtgtagggcagttacattttgaagggggggagggatgttcccattcatcctcccacttacagcatcttcccctccattctctcatccatagcggccttcctcacccagtccgtttgtctagatgacacaacagtgaagtttgagatctgggacacagctgggcaggagcgatatcacagcttagcccccatgtactacaggggtgcccaagctgcaatcgtggtttacgacattactaatcaggtaagtgagctaagaagactgtccttgttggctggacatggtggcttacgcctataatcccaacactttaggatgccaaggcgggaggatcatgaggtcaagagattgagaccatcctggccaacatggtgaaaccccgtctctactaaaattacaaaaattagttgggcgtggtggtgcgcgcctgtagtcccagctactcgggaggctgaggcaggagaatcgcttgaacccaggaggcggaggttgcagtgagccgagatcgagccactgcactctagcctcggcgacagagcaaaactccgcctcaaaaaaaaaagaaaaaagactgtccttgcttatatttagaggagttagtttggggcagggggtaagggggcagaaaacgggttcttgaaatagcaaataagagtacaaattatgcttccaagtgctaagaagacagataatgaattatcagagacctgtggtttcactgagggaagaccacctagaagaggtgaattttgagactcattttaaaaggtgatggatatggattggcagtcattccagcctactcattctcttcatgttttcctaggaaacctttgcccgagcaaagacatgggtgaaggaactacagcgacaggccagtcctagcatcgttattgccctggcagggaacaaagctgacctggccaacaaacgtatggtggagtatgaagtaaggtggcccgtggagttcctctctaacacttcctctgttcctgggacctctttttttccaaaccagccctctctgaaaacgtcaacagaggacattcattgtctcattccccagttctacaccaagttaaatacagcaacactgtgaccctaatgacagccaggagattttcaaaggagtcaggagaaaactccagagcagagggttagggaggtaccagctgtgggggtaccagtgtgaaaacaggaaggagggagcaattaaatttgtggtaagggactattcaagtgtcacaacccaaaagcccccaactaacttaccctctcccctataattaagctttctgacatttgtgtgttggactgagtggacatggggtcatcttgagggagttgtcattaaattatgcatctaggctagctggctcaaaggggtattaattaaggggagggaacctaggattttgcctagctgttgtgctgcatgggagtggaaaggcaatactcgttcccaccctacattctgagcactaatacatcccactccttgcaggaggcccaggcatatgcagatgacaacagcttattgttcatggagacttcagccaagacagctatgaacgtgaatgatctcttcctggcaataggtaaggtcagaacatcctgaggtcctcctttttccctcgtttataggcaaaattatagctaacccaaatcaaggataggtgcgagtatctccttttgcaaaaactttaggtatggaaataccttaactttctgttatgacctccatccttggctgcagctttagctcccttgtcttcaatgtgtaagtttgccggccaggtgtggtggctaacacctgtaatcccagcattttgggaggccgaggcgggcggatcacgaggtcaagagatcaagaccatcctggccaatgtggtgaaaccccgtctctactaaaaatacaaaaattagctgggcgtggtggcgcacacctgtagtcccagctacttgggaggctgagccaggataatcacttgaacccgggaggtggaggttgcagtgagccgagattgtgccactgcactccatcctggcaacagagcgagactccatctcaaaaaaaaaaaaaaagtttgcaaatagtgaaccctcccatcttcagaacattcttttaatctctcaaattctcccttttccccaattcagtagccgtttttggcgggtggaggcagaggggtagggaagtaaagtctaccatactttgttctcttctctttttatctctagctaagaagttgccaaagagtgaaccccagaatctgggaggtgcagcaggccgaagccggggtgtggatctccatgaacagtcccagcagaacaagagccagtgttgtagcaactgagggggtggctagcagcaaacaagtatggagctagcacaagagctaagaaataacctccatccctacccctcagcacacaacccctacggtaacagcacactgagccctggctcccaagggctgcctcctgacagctccgtcatggcactttttaacgcttcagcaacaaacaccaggcagctgttgccactggcctcctaccccctactctggggcttgggggtcaactccccccaggacttaccttccaaaacaaactttcttcactttgtattataggtacaagacagcgacttacgtatcttttctcctcctccctagtgttcctccccattttttcagaaaacacttctgactcctgtcccttccccttctgcttttggtcagtccctgttcttgagcctcttttctcctctccccaggatgcagaaagtggtgaacccaggaactgaggaaggaggtttccagttcatttacattaagggccctgggggagaataaagctcagagcaggagggagtaaggaaacatttcctttttgtttttatttggttggagtttctcatatttgaaaacattgcggtatccatgatttggccttgtggagggtgttcctaggtagaggtgagaatggggaggcaagatctcaggcaccaggcaggaggtgccttgtaagctaactgggcggaggtggaggtgcagtgtcaactgtggctctgtaactcttcaaaggcccagtttcccctcacgcagcctcttaggtagcgtttcccctaatcgtgggggttggaccccagagtcttccaaagaattttcactggttgcctgcatctttggctctgctgtgatctgattggaggagggacagtttctggtacccatcctctgatttatacatatgcattttttcccctctggcctttagatggcctcagccccagccaccatatacccctgcagtttgcactttaattgatggtagttcagttggggtacttgttttatggaagttttgattgatttacttgccctcccaccttctttttaattcaatgaaatctgaggttaatgcgaggttcgaggagaggttatagataaaactaccagtggcagctactcaagtcctatctccactgttagcttcctccaactctaattattaacctatattcttgccaagctaactattgactataggtttgcctttcctggagaattaattgagcaattgaggagtgtctcaggatagcacaggccaaggtaggggagtaaaaaggaggtcaggcaaaagggaggagttttctgtcctttcccaggtttcacactcaatttgatatccattaccatgtcttttctacttccttgtaaataggtatgatctttattcccactgtacagtctgttctatcctctgcctcccatcaggccctgtttctttgttcctttgttaatatcttgaatttagtccctccatccttaatccccccatccctccccatcatgcaaccagtggtttaatccatgtaccaataggggctagtaccacagaggcctcctgtggtgccctcgtatcataccacctgttcctgtggagagggaatgaccggcactgaaggtaccttacaactggctcatattatcagaggaccttggtcctttctaaatctctagtctctcttcatatccttcatcaggtgttttaagatgtctctgagaagccatcaaggcaaaagagaactttaagttccttgttccagcccggagttttgggaaagaaagaaaggaaaggtcacagtgacctaggattggaaccttcctgcccttttggcttgcagactgccttctatcccagaacagctgaga

SEQ ID NO: 3233 - DNA, 6000 bp, Homo sapiens
ttcctaggcagaggaccctgcggccttccgcagtgtttgtgtccctgattacttgagattggggagtggtgatgactcttaatgagcatgctgccttcaagcatctgtttaacaaagcacatcttgcaccgcccttaatccatttaaccctgagtggacacagcacatgtttcagagagcacagggttgggggtaaggtcacagatcaacaggatcccaaggcagaagaatttttcttagtgcagaacaaaatgaaaagtctcccatgtctacttctttctacacagacacggcaaccatccgatttctcaatcttttccccacctttcccgcctttctattccacaaagccgccattgtcatcctggcccgttctcaatgagctgttgggtacacctcccagacggggtggtggccgggcagaggtgcccctcacctcccagacggggcggctggccgggcggggggctgacccccccacctccctcccggacggggcggctggccgggcggggggctgaccccccaacctccctccccgacggggcggctggccgggcggggggctgacccccccacctccctcctggacggggcggctgatcgggcgaggggctgacccccccatctccctcccggatggggtggctgccgggcggagactctcctcacttcccagatggggtggctgccgggcggagaggctcctcacttctcagacggggcagctgccggacggaggggctcctcacttctcagacggggtggttgccaggcagagggtctcctcacttctcagacggggcggccgagcagagacgctcttcacctcccagacggggtcgctgccgggcagaggcgctcctcatatcccagatggggcggcggggcagaggcgctccccacatctcagacaatgggcggccgggcagagacgctcctcacttcctagatgtgatggcggccgggaagaggcgctcctcacttcctagatgggatggcggcagggcggagacgctcctcactttccagactgggcagccaggcagaggggctcctcacatcccagacgatgggcggccaggcagagacactcctcacttcccagacggggtggcggccgggcagaggctgcaatctcagcactttgggaggccaaggcaggcggctgggaggtgtaggttgtagtgagccgagatcacgccactgcactccagcctgggcaccattgagcactgagtgaacgagactccgtctgcaatcccggcacctcgggaggccgaggctggcggatcactcgcggttaggggctggagaccggcccggccaacacagcgaaaccccgtctccaccaaaaccagtcaggcgtggcggcgcgtgcctgcaatcgcaggcactcggcaggctgaggcaggagaatcaggcagggaggttgcagtgagccgagatggcagcagtacagtccagcttcggctccgcatgagagggagaccgtggaaagagagggagaccgtggggagagggagagggggagggggagggggagggggagggaccaatcaacagtcttataagtagatacaacagtgtataaacaaggaaaccaaggaagatttttctccttcagaactcggaccctgaataccaggttgagctggagctgagtgagtaataaaatgaaaggccctttaatgtgggggagggtaggtaggagtggagacccttaagtagtatcagcactgttgtctgatgggagtgtgaatctgaacacatgaagctccagtctcagtagaacagtaagaaatcctaagtaaggccaggcatggttcacatctgaaatcctaacaatttgggtaaactgaggtggaaggattgcagaggccaggagttcaagaccagcttgggcaacatagccagacccccacccccacccccgcatctccatatcatacaaaaataataaagaaatcctaggtaaggccagatggtaaggccaggtgtggtggctcatgcctgtaatcccagcactttgggaggccgaggtgggtggattgcccaaggtcaggagttcaagaccagcttggtcaacacagtgaaaccccgtctctactaaaaatacaaaaattagctaggtgttgtggcaggcacctgtaatctcaactactcaggaggctgaggcaggagaatagcttgaacccaagaggcagaggttgcagtgagccaagatcgagccattgcactccagcctgggcaccaaaagcgaaactcaggagaatgccttgaacccaggaggcagaggttgcagtgagctgagatcacgccattgcactccagcctgggtgacagagcgagactccatctcaaaaacaaacaaacaaataaacaaagtagccagacattttggtgcccacctgtagactcagttactagggaggctgaagtgggagaatcacctgagcctgggaagttgaggctgctgtgagccatgattgcaccactgcactccagcctgggtgacagagggagatcctgtctcaaaaaaaggaaaaaaagccaggtgtggtggctcacacctgtaatcccagcactttgggaggctgaggtgggtggatcacctgaggtcaggaattagagactagtctggccatcacagtgaaaccccatctctactaaaaatacaaaaaattagccgggcttggtggcgcacgccttgtagccccagctacttggaagcctgaggcaggagaatcacttgaactcagtagtgagctgagatcaggccactgcactccagcctgggtgacagaaacagaacaagattccgtgtcaaaaaaaaaaaagcaacagaccagaaggccatgaggtcaaacaaaacaatgttttgtttttgttttgagatggcgtctcactctgtcgcccaagctggagtgcagtgatgcaatctcagctcactgcaacctccacctcccgggttcaagcgattctcctgcctcagtctcctaagtagctgggattacaggtgcccaccatcatgcccagctaatttttgtatttttagtagagacggtgtttcactatgttgactaggctggtctcgaactcctgacctcaagtgatctgcccgcctcggcctcccaaagtgctgggattacaggcatgagccaccgcgcccagccgaatgttttgttttttaagatggaagatatcccagcactttggcaggctgaagcaggtggatcattccagcttgggcaacaagagcgaaactctgtctcaaaaaaaaaaaaaaagaaaagaaaaaaaaagagagaaagaaaccctaggtaaaagtctgagccccacctcccaatcacctgatcacctcaaccactgtcaccaggtggatgaccttggagaggtcacacacttctagttctgtaaaatggggagttatattgcctaaatcatataatttttatgttaagtgacacattctctaaggcactaagtttgaggacatactttgtaaatgaaatgatatatggaaatgtttgtatatgttaatggttttgttgttgctattattattatgactactatacacatggtctggagaaagccaacctccccaaagcggagattctccagtagagaacaggccctctaggttgcatatcaatagggagcatgtttaaggaatgttagccggtagtctttgctaggtgtgaggggtgaaatttttctttatcaaggctcaactgttttcgaagtcttcaggcttgaagttctggagaaaacaactaggctctccgggcgagatcccgaataccagtttaagggatttgaaatgcaaggccgtctgggactccactgccacggatgggcaccaggcggcgccggtcggatccgtcccgggactagcagggctttgggcagcaacccgcagggagcccgaccgcctctggccaggtccgggcagctggtgggggaggttccagaggtccacgccattcgtggacgcagtctctagtgtcctctccgcgtcccacttcactgccccatcccctttcctgcgagagcctggacttggaaggcacctgggagggtgtaagcgccttggtgtgtgcccatctgggtccccagaagagcggcgggaactgcggccgcccggacggtgcggccagactccagtgtggaaggggaggcagctgttctcccaggcggccgtggggggcagcagaggggacggcgacaggtgcgggagcccctcccggggtagaagtggaaaggcgggctccggggtctgttcccaggctggaaaccacccccgccccccatccaaatccccgggagaggcccggccggcgccgggtctggaggaggaagcggccagagacagtgcaatttcacgcggtctctgtggctcgggttcctgggctgggtggatgaattatggggtttcgagtctgggagaaactgaggtggcctggacgtgaggcaaaaaacaccctccccctcaaaaacacacagagagaaatattcacattctgagagaaaatccaccaagtgaaccaaccggctaggggagttgagtgatttggttaatgggcgaggccaactttcagggggcagggctttggagagctttccactccctcattcattacccttccctggatctgggggctttcggaatctcgacctccccttggcctatctcctgcagaaaaattagggtgagccccatcctcgatctgctccgccaagttgcgggaccgcggggcgtggcacgctcggggcaggcggtccgaggctccgcaatccctactccagcctcgcgcgggagggggcgcggccgtgactcacccccttccctctgcgttcctccctccctctctctctctctctcacacacacacacccctcccctgccatccctccccggactccggctccggctccgattgcaatttgcaacctccgctgccgtcgccgcagcagccaccaattcgccagcggttcaggtggctcttgcctcgatgtcctagcctaggggcccccgggccggacttggctgggctcccttcaccctctgcggagtcatgagggcgaacgacgctctgcaggtgctgggcttgcttttcagcctggcccggggctccgaggtgggcaactctcaggcaggtaagtggcgcgagagcaccggcgggctcggcacctgggagccggaacccagtgcgcgcagcctcggagggtatgggcacggtctcaggcggcgcggggttgtgggtgctgcccccggtttgccaggaccacctgggagaggggcggtcaggctcgggttatcggcgtggtccggccgagggcggcattccgggaccctcacgccacccttctccagagcgtcgccgaccctctaattggtctccccagaagaggctgaggccgaaacagtagttcacacttctgaggggccctgcagggaggggagcagggaacttcattctgtaaacaggaggtgcttggaggtgggggccttggcgggaagggtctcggtttgctcgccaaccccctgccccccacccgcgccgatttcagctacccctagtttcgttgttttgccgacagggcggagctacagaaggttggagggggttgttgttctctggtgttggaaaaacaggagcggcacctcctcttccgtgagtgagcctgccctggggaggtctgagattaaccagagggccaagttcaggtgacatcaggcaggaggcccaacagaggctggcgccccctttcctcagtatagcagagcttaagcaacatctctttgtcaagacccaggtcaacacaactcatatttattgagcatctactatacacaaggccctgggccaggagctgtaagggcaaggatgtccagcctctggtcttttctctccccaacctgaggatcaagagggcacctctgctactttctaagcctcctgccttggggagtccttcctgggctcagcttgt

SEQ ID NO: 3234 - DNA, 6000 bp, Homo sapiens
tagcactgagcaaatttcttgactaacatgaatcctttgaatagttaatgttcccttagtagtctctcctctcatcctgtctccttattctcagccggggcttctcattgttgatcatgaagaacttgaatgtcacatctctgggcttccgatccctgaaggaaattagtgctgggcgtatctatataagtgccaataggcagctctgctaccaccactctttgaactggaccaaggtgcttcgggggcctacggaagagcgactagacatcaagcataatcggccgcgcagagactgcggtgagggaaagggtctgctaggtggtgagaatagggagtcagggaggagagggctgaaaggactattctgccctagacgtgggagtagggttgagggatggaaccaaggagaagggggctgttaggctggaagcagtaacgaggaagaataatgaagagagggcttgctgggagtcctcagactcctctcctaacccaccccttcctttccagtggcagagggcaaagtgtgtgacccactgtgctcctctgggggatgctggggcccaggccctggtcagtgcttgtcctgtcgaaattatagccgaggaggtgtctgtgtgacccactgcaactttctgaatgggtacagtaaggggagccagtcaaggatgggtgggggtggggccctgcaatggaactgttcaggtggcatacaataaaagtctttagacagctttctgcatgtgccttggtgggattgaggtaggagacctgtggttgtgagatcggagcatgaaggtcaggacttggaagtgacccccccctccctttattccccactacagggagcctcgagaatttgcccatgaggccgaatgcttctcctgccacccggaatgccaacccatggagggcactgccacatgcaatggctcggtatactagtagcaccaggatctccaagggagacagagaaggggcaatacttggagcatctggggaatgatatggctaaggatagcacagagaggccagataatgctagggcctgcagatagaagatcctgaatgtctgggttggtctttgctgggaggtatggaattgaccttgggatctgattcttcctgaccttctctcttccactcagggctctgatacttgtgctcaatgtgcccattttcgagatgggccccactgtgtgagcagctgcccccatggagtcctaggtgccaagggcccaatctacaagtacccagatgttcagaatgaatgtcggccctgccatgagaactgcacccaggggtcagtgatgggataataaggagagggggtcaggtggaagggtaggagcacagaactagagtgagggaagcagaaagaagagagaggctgtgattcaagaatcactcccagctggccgggcgcagtggctcacacctgtaatcccagcactgtgggaggccgaggtgggtggatcacctgaggtcgggagttcgagaccagcctgaccaatatggagaaaccctgtctctaccaaaaatttaaaattagcccggcgtggtggcgcatgcctgtaatcccagctacgcgggaggctgaggcaggagaatttcttgaacccaggaggcagaggttgcggtgagctgagattgcatcattgtactccagcctgggcaacaagagtgaaactctgtctcaaaaaaaaaaaaagaatcactcccagctgtgtagcgaaggattggagaaagggaaaatcagtaacagcacaaaattacaccacagttttgggaacctggaataacctcagttcaagggagtttcacagaagaggggcttggggagagctagtgagctggaggtggaggccatgtcttgggatcagctctgggctccaggatgggatgccacggtaagttctgaaacaagcttttatatgttaggctgttgaaattgagcctctgctgtccaagctctcatttaaggtggtgactttcttccctaggtgtaaaggaccagagcttcaagactgtttaggacaaacactggtgctgatcgggtatgatggggttggagattctggaaactggggatatttgggagttgggagagaggtggttacctggagagaagagggaggctgtcttcattctggccttttatgtatgcagtccactatcactggacacttgggactcaagaatgcaggcttctggacttcccttcctaaaattaactttcagtagtctaagactggtccagatttaggttggtcccttcagtgcttaaggatatatatgtgaatgttaatttcttgccccaggtcagcatcataccttcaacacaagtatagttgacatttgtaaggaagatgcaaacccaggataatgttgggtttctatatatcccatagcaaaacccatctgacaatggctttgacagtgatagcaggattggtagtgattttcatgatgctgggcggcacttttctctactggcgtgggcgccggattcagaataaaagggctatgaggcgatacttggaacggggtgaggtgagtacttagcttacttttgttttttcttttctttttttgcatgtcctggaagtctctttatagcttaattttgagtggtaccctgtgcacccaggggtcagtgatgggataaatgtcactcccctcctctttccccagagatttgatccctttcttcaaggaagtagtgtggtcccctagaagaacactggtcagagaaatgggaggcatgcattctagtcctgattttgccattaatttgccacatgactttgaagaagttacttatcttctctgtgcctcggtttatgcatctatacagaggaaataacatttgtccttccaggatggctgtaagggtaaagggggatgatgtatgtgaaagtgctttggaaagcacagagcactgtataaaaggtactcaaggtggtaatagtactaccaactctccctagctgtccccttccccactttgtgctcctccatcaaagggaaaacccaacccctttgattcctgatctcatgagcacaaataacttcctcagttctcagggtctgtacctcaatatgcctataatccattccaggactaacggtgcttcctcttcctgccctttcagctgtgctgcttttggcattcacctatgaggagcgggttggagtgggacatgggaatggcctttcctgagtaactccttcccatttgctcctcagagcatagagcctctggaccccagtgagaaggctaacaaagtcttggccagaatcttcaaagagacagagctaaggaagcttaaagtgcttggctcgggtgtctttggaactgtgcacaaagtgagtgacccataggaattctggagaggtggggaaggcatctagggcaaaggggtgaaagatttttgcataggattgacctagggagaatgaccttatgccaactcctgccccaaacttcccagggagtgtggatccctgagggtgaatcaatcaagattccagtctgcattaaagtcattgaggacaagagtggacggcagagttttcaagctgtgacagatgtaagtgaaggaaattctgtatgccgctaggagagaggacaatattagatacaatcatgtagaagcagggtcctgtgcttctcagcagctactatgttagccagaatgttgggggtgggggggcctgggctggctgtgcacatgctgagtgtatgtgaacctgttggtttcctagataataccttttgtgtctcttagcatatgctggccattggcagcctggaccatgcccacattgtaaggctgctgggactatgcccagggtcatctctgcagcttgtcactcaatatttgcctctgggttctctgctggatcatgtgagacaacaccggggggcactggggccacagctgctgctcaactggggagtacaaattgccaaggtgagagaagcctggaggaattctgtgataagaactgcttgtctgggggccagccaggaaaaagtgagaaggttgaagttctgagaggtgaggtccccaacccccgggctgcagactggtaccagtccatggcctgttaggaaccaggccacagagcatgtgagcggcaggcaagcgagtgaagcttcatctgtatttacagtcagtccccatcacttgcattaccgcccgagttccgcctcctgtcagatcaggggcagcattagattctcttaggagcttgacttctattgtgaactgtgcatgtgaaggatctaggttgtgcactccttatgagaatctaactaatgcctgatgatctgaggtggaaaaatttcatcccaaaaccaaccctccccttcccctggaaaaactgtcttccacaaaaccagtccctggtgccaaaaaaggttggggaccactgctgagaggtaccttcaagatttgggggaattccagatctcagtgactgattcccccaaccttaagaatactttcttcccctatacctacagggaatgtactaccttgaggaacatggtatggtgcatagaaacctggctgcccgaaacgtgctactcaagtcacccagtcaggttcaggtggcagattttggtgtggctgacctgctgcctcctgatgataagcagctgctatacagtgaggccaaggtgaggagacacaaagggtaaggaggcgggggtggagtgaagcatggggatagggagcagccagtggtctcttccagaggcaagcagatgcttcatggtaagttcaaggagagaaggctgcagatgccagatattttagttcagagggcaacaaataaaataatgatcaagaacttgggactggccgggcgcggtggctcacgcctgtaatcccaacacttcgggaggccaaggcgggtggatcacaaggtcaggagatcaagaccatcctggctagcacggtgaaaccccgtctctactaaatatacaaaaaaaaaaaaaattagccaggcgtggcggcatgcatctgtactcccagctactcgggaggctgaggcaggagaatggcgtgaacccaggaggcggagcttgcagtgggccgagatcgcaccactgcactccagtctgggcgacagagcgagactccgtctcaaaaaaaaaaaaaaaagaatttgggacttggaaatcctaagaaaatttgtggaaataaacttgtgatacctctatctttaatccgcagactccaattaagtggatggcccttgagagtatccactttgggaaatacacacaccagagtgatgtctggagctatggtcagtgcatctggatgccctctctaccatcactggccccagtttcaaatttaccttttgagaccccctcttagaatctctaagcacttcagatttttgtgttagatcaggttctgccttcccttcacttcatgcccatgtctactattttgccagtgactagtccatgtcttcctgcaacaggtgtgacagtttgggagttgatgaccttcggggcagagccctatgcagggctacgattggctgaagtaccagacctgctagagaagggggagcggttggcacagccccagatctgcacaattgatgtctacatggtgatggtcaagtgtgagttacctgctgagcccaaccattttctctttttttctttttttttcttttttttttttttttgagacagagtctcacaattgtcacccaggctggagtgcaatggtgcaatcaatcttggctcactacaacctccgcctctcgggttcaagagattctcctgcttcagcctccggagtagctgggattacaggcgcccgccacacctggataactgttacacttttagtagagatggggtttcaccatgttggccaggctggtctcaaactcctgacctcaggtgatccgcctgcctcagcttcccaaagtgctgggattacaggtgtgagccatcatgct

SEQ ID NO: 3235 - DNA, 6000 bp, Homo sapiens
aggaggacctccaccccctgcaggggcctgatgggcagcacagctggccaatcctgggactcagagggtaggtcggctggctgaccactaggtttggaagacccaggcagctggctctaaagaggccccaggtcagtagccagacatgagctgtgagggtcaagcacagctatccatcagatgatctactttcagccttcctgagtcccagacaatagaagacaggtggctgtacccttggccaagggtaggtgtggcagtggtgtctgctgtcactgtgccctcattggcccccagcaatcagactcaacagacggagcaactgccatccgaggctcctgaaccagggccattcaccaggagcatgcggctccctgatgtccagctctggctggtgctgctgtgggcactggtgcgagcacaggggacagggtctgtgtgtccctcctgtgggggctccaaactggcaccccaagcagaacgagctctggtgctggagctagccaagcagcaaatcctggatgggttgcacctgaccagtcgtcccagaataactcatcctccaccccaggcagcgctgaccagagccctccggagactacagccagggagtgtggctccagggaatggggaggaggtcatcagctttgctactgtcacaggtgggtgagggagagagcaacaggcaaagagcagacagggaaagggaggcagaaggggagcctggcaggagcagcagagggagtggggtgtggcaggagaaggaggagctggggcagggactggttgcagaggacacaaagcagtctctacttttctagaggtaggttcgagggagagcagtgggcagggcttggggagtctcagaggagagcttcatctctactcacattttctttcccttttctgtctttcgggcagactccacttcagcctacagctccctgctcacttttcacctgtccactcctcggtcccaccacctgtaccatgcccgcctgtggctgcacgtgctccccacccttcctggcactctttgcttgaggatcttccgatggggaccaaggaggaggcgccaagggtcccgcactctcctggctgagcaccacatcaccaacctgggctggcataccttaactctgccctctagtggcttgaggggtgagaagtctggtgtcctgaaactgcaactagactgcagacccctagaaggcaacagcacagttactggacaaccgaggcggctcttggacacagcaggacaccagcagcccttcctagagcttaagatccgagccaatgagcctggagcaggccgggccaggaggaggacccccacctgtgagcctgcgacccccttatgttgcaggcgagaccattacgtagacttccaggaactgggatggcgggactggatactgcagcccgaggggtaccagctgaattactgcagtgggcagtgccctccccacctggctggcagcccaggcattgctgcctctttccattctgccgtcttcagcctcctcaaagccaacaatccttggcctgccagtacctcctgttgtgtccctactgcccgaaggcccctctctctcctctacctggatcataatggcaatgtggtcaagacggatgtgccagatatggtggtggaggcctgtggctgcagctagcaagaggacctggggctttggagtgaagagaccaagatgaagtttcccaggcacagggcatctgtgactggaggcatcagattcctgatccacaccccaacccaacaaccacctggcaatatgactcacttgacccctatgggacccaaatgggcactttcttgtctgagactctggcttattccaggttggctgatgtgttgggagatgggtaaagcgtttcttctaaaggggtctacccagaaagcatgatttcctgccctaagtcctgtgagaagatgtcagggactagggagggagggagggaaggcagagaaaaattacttagcctctcccaagatgagaaagtcctcaagtgaggggaggaggaagcagatagatggtccagcaggcttgaagcagggtaagcaggctggcccagggtaagggctgttgaggtaccttaagggaaggtcaagagggagatgggcaaggcgctgagggaggatgcttaggggacccccagaaacaggagtcaggaaaatgaggcactaagcctaagaagttccctggtttttcccaggggacaggacccactgggagacaagcatttatactttctttcttcttttttatttttttgagatcgagtctcgctctgtcaccaggctggagtgcagtgacacgatcttggctcactgcaacctccgtctcctgggttcaagtgattcttctgcctcagcctcccgagcagctgggattacaggcgcccactaatttttgtattcttagtagaaacgaggtttcaacatgttggccaggatggtctcaatctcttgacctcttgatccacccgacttggcctcccgaagtgatgagattataggcgtgagccaccgcgcctggcttatactttcttaataaaaaggagaaagaaaatcaacaaatgtgagtcataaagaagggttagggtgatggtccagagcaacagttcttcaagtgtactctgtaggcttctgggaggtcccttttcaggggtgtccacaaagtcaaagctattttcataataatactaacatgttatttgccttttgaattctcattatcttaaaattgtattgtggagttttccagaggccgtgtgacatgtgattacatcatctttctgacatcattgttaatggaatgtgtgcttgtatggtcttgtgttacagtctttttcagttttaatttctaatgtggtgaattgatagatgtaaatcatatgaacaaaagctcaatgatttttttttttttgagacggagtctcgctctgtcgcccaggctggagtgcagtggcacaatctcggctcactgcaacctccacctcccaggttcaagcgattctcctgcctcagcctcctgagtagctgggactacaggcctgcgccaccatgcccagctattttttgtatttttagtagagatggggtttcaccatgttggccaggctggtctcggactcctgacttgaggtgatccgcctgccttggcctcccaaagtgctgggattacaggtctgagccactgtgcctaacctaatgacttttaagagtatagaggaaaccaaaaagtttgagactcactggtctatagaactgggtggggagaagaaagtaaggtgttctaagagagctcttcttgctgggcaccggtggtcccagctacttaggaggctaaggccggaagaccgcttaaacccaggagttcgaggctatgatcacacttgtgaatagcctctgcactccagcctgggcaaatagtgaggccccgtcccaaataaaaataaataaatacataaatacataaatagctcctctggaagaaggggctcgaggctgggacaggagcatgtgtggggtgcctttttttcagtgcccattagtctggtctgactgagctgggtctctgaccctctggggataactagcctgggtcaaagtcccagatctccccctaccttcaccttttcttttcccccttgaccctcagactgaacagttaacccactgaccttccacacccaagggggtggttcttggaagcagagctaggatgtgggaggtctgcctgtggggttgaaaaaaaggggagagggtgccctttttccttgtcatgcttcctcctctttctcataaaaatcagagactgaaatgctgcccctcccttatatccggtcacgatggcaatgcaaatctaaagaggcagggcacttccctgtcaggcagtaccgctgggcatagcaacctctgcctctccgtttctcagagctcacatatccacctcctgggcttttaagtgggctttagtgaggggctcctccttcaactgggctcctccttcagttccccagctcttctgcttcgactccgagcgggtgtcatgtgtgagaacggccagcagagggagcagaaagcctggaagagcagctagagcctgcagtgacgtggtgcggaggggcggcaccctccagaacttcgagacgtagagccggggttctagggaaaggggcttcagtcccagggctccttggtgacctcgtgaaccacaccctgcacccagagcctcagccgctgctccttgcttttatgctccatagactcctcaccttcttccagagcccccaacccaacttgatttgccccaaaccgcaactctgtcccggccgctgcaagttccatccaaagggtgaggcctgcagataaaccacaggatggcagaatgctcagttagcaccaaccaaaggcgactaccctacctccactattatcgttctcggttgaacttctccccctgccccgcaatattttcctcaatctggttgtcggggcctctttggggccagccgatccagaaatccaagccgggatttagtactcaccaacagcagcgtgttcagccggggcgggggggggggcgtaagcagtatagggtccctcaagggagggggaggatcctgggggtcctgggggtgcaataagcccggcaccccttctcttgcttccagctaccccgcctcatcctccagaacggcaagagggagggaaatagaagggaggtgaggggcgagcgggaagagcggcggcgcgccagcggctggagagagaaaaagtttttgcaaaagggaaaaaaaaagtttgcgcttctcgcgggtggtccgggcttgcggcccggcgggctgggccggcgggagggctgggggccaggttgggggggtgggggtggcatcgaggctgcgctgccgtggccctctccgccccccctccccaccgcacaccccccagcccagactccagccctggaccgcgcatcccgagcccagcgcccagacagaggtgagaagggggggcaggcgggggaccacctgggagcagtgggggagggggcctgaggggatgctcagcttcttagggactcatcccagacccgggacatagaggcaaaataggggtgggagagcctggggtgagacattagaaactccagatttttcacttgtgtctttctctgtatcttctttttcttccctttttttcttctgtcagtctgtgtatctctgtctcagggaaccgtgggtctttgtctccgcctctcccatatattagaaatatcttactttcatgcggttaagtttaagaggctggagggatggctagctggaggtctgcgttgtagagaggtaaccccaggtgtgtgtctgcgcgtggggtaggaagatgtcagtgtttctgaaaggtggggactgcaaaggagggagctccaggtggggtggggacgggtgtgtgggaggcaacagagccactaggggccagccaggcttgaacctttgacctgtcttgtgacagatgtgccagtggatgcttgtgctttaggggaaaggagtgtcttctggacttggaagggggctggggcgggggggggctgtccaaggtctagtgaaggccctagaatgaccccatgcaatttggactcctgagtcccaagggctgtgggcaaggagctcaggaggagccggggagaccttgtcttgaccctctgacctcaggaccaccggggcagcgggagccagccgcagggagacccctaccggggctgggcgggaccactggccactgccagcctgtgtatccccgttggcaccccgcccaaacgggagctggggatcgaggcccctcctctggctcagaccaccctgcctgcccttgctccccgctctgaatcctctttcaggtcccatgaccccgaaacaatcagcactgggcagctagctttcgggacaggattacggaaaggggaccccgtagag

SEQ ID NO: 3236 - DNA, 6000 bp, Homo sapiens
tgattgagcctgggagttggaggctgcagtgagccatgatcacgccactgcactccagcctgggcaacagtgagactctgtctcaaaaaaagaggaaaggagaggaaaggagaggagaggagaggggagacggcggcgggggggggggggagggcaggggaggggaagggaggagaggagaggagggaaatcctgatcttgtaggaaatatacatacacacatacacattctgatctggattttatcttctagtataggcaggaccagttacataatttatgggacccagtacaaaatggaaattcaagcttcttatttaaaaaattatttaaaacatcaagatggccaggcgcggtggctcactcctgtactcccagcactttgggaggctgaggcgggcggatcacttgaggccaggagttcgagaccagactggccaacatggtaaaaccctgtctctactaaaaatacaaaacattagccaggcatggtggtgggcgcctgtaatcccagctactagggaggctgaggcaggagaatcgcttgaacccgggaggcagaggttgcagtgagccgagatcgcacctctgcactccagcctgggcaacagagcaagactccgtctcaaaaacaaacaaaaaatcaagatagtgacattagagcattaaaccaatcatggaacccttctaagtacagggctctgtacaactgcatgcatgagtcatatgcctgtgaagctggccctgagtacagggctcagcaaactatggcctactggccaaatccaggccgcccctgtttttgtgcacctataagctaagaacaattttgacatttcttttcttttctttttgagacagggtcttgctctgtcaccagagctggagtgtagtggcatgatcatagctcactgtaacttcaaactcgacttgggcttaagccatcctcccacctcagcctcccaagtagctgggacaacaggcatgtgccaccacacctggctaattttaaattatttttgtagaaacaaggtcttacttgttactatgttgcccaggctggtctccagctcttgaggttcaagtgatcctcccacctcagcctcccaaagcgctgggattacaggcgtgagccaccacacttagccgattttcacatttttaaatggctaaaagaaaaaaaaaaaaaaagaacatttcgtgacacgttaaaattacttgaaattcaaattttagtgtccataaataaagttttattagaatacagtcaggtctattctttatgtattatctatggctgcttttgtcccacaactgtagagttgagtggttgcaacagagaccatctgtctggcccacaaagtctaaaatatttactctctggcccttgacagaaaaagtttgcaaatccctattcacaggaaggtcaaacacaagtgacaaagaaaagcagcaataaaatgtttcagggattctaaagagaagagaatacataaggttagaagtatcagaaaagaagctctttttttttttttttttttttgagacggagtctcactctgtagcccaggctggggtgcagtggtgcgatctctgctcactgtaacctccgcctcccgggtcccagttcaagcagttcttctccctcaacctcccgagtagctgggattacaggcatgtgccaccatgcccagctaatttttgtatttttagtagagatggggtttcaccatgttggccagcctggtcttgaactcctggcctcaagtgatccgcccgcctctgccttccaaagtgctgggattataggctaccgcgcctggccaagaagctcattcttaagagaaagtagataaaccttgaataatgggcaaggtatttgcagaatgagatggaatgggaaggggcattccaggcagaggaaatcattcacctatgcacaacagagagatggggaagcaaattatgtgggccagatgaaaagtccactgtccattctgactataaatcagttttgagtgaaaggaaaaagtgagacacaggattttaattttattttggtagagtggggagtaattgaaggctctttgaggaagggagtgacttgcttggtatgctttaagataatcatctggcaacaatgtatagaatggatcacagcaggaacagactggaggccaccaggctgcaaaggtccaggggatgagttctgccaaactaaatttggcaactaaaaactaagtatggtcttagttgaaatggaaaagaggaaacacaatgaaagaccttgtcgaattactatctaatagatatgccaattgatggattattcaagaagagcagagagctaagtatcaggcttgaagattgggtaatttaaaagatggtgatacaattcacaaaggaagaggaaaagaaactggtttggttacaaagacgatgagttcagtttgcacacatgaccagtgcaaattgccagtggaatatcctggagaagaagtcaaggaaataaataggaaagaggctcaaactgaaaagtgagttcagtgttaagagatgcagattatggtattctctgcatagtgataacagtttaatacaaataacaatgatttccagtctaataagagaaactgtgtttttaattaaatagattattttacacgttctctcaaactctaaaaattctagcttcaattttctaaaaccaatttctttctggaaaaaaaaaatcaattgcccaaaggacaaagagtttttctaaaaaaagaaagaaagaaaaagcacagtgttcccaggtaacacttctgtgagctcaaagtttcagactttcagttatcaaatttttatgcaataactgaaaagttagtaaagtcaaatttatttgtaattcactcattcattgagaagttacagtaattccaacggactgctctgaaatttgcctttgaaacttttatttaaaaaggttttctaaagaatggatgttaagtgttctcataaaaaaatgctaactcaaggccaggcgcggtggctcacgcatgtaatcccagcacttcgggaggcccaggcgggcggatcacctgaggtcgggagttccagaccagcctgaccaacatggagaaaccccgtctctactaaaaatacaaaattagccgggcgtggtggcgcatgcctgtaatcccagctagtcgggaggctgaggcaggagaatcgcttgaacccgagggtgggaggtgggggcggaggttgcagtgagccgagatcacgccattgccttccagcctgggcaacaagagcgaaactctgtctcaaaaaagaaaaaaaaaatgctaactcagccggcgcggtgagtcacgcctgtaatcccagcactttggggggcccaggcgagcgcatcacctgaggtcaggaattcgagaccagcctggccaacatggcgaaatcccctttctactaaaaattagctgggcgtggtggcacgcgcccgtcatcccagctactcgggaggctgagacaggagaatctcttgaacctgagaagcagaaattccagtgagccgagatcatgccactgcactctagcctgggtgacagagcaagactctcaaaaaaaaaggtaactctgtgaggtaatgtaacaatgtatacattacttcaaacgatcatgttgtatacacaataaatgcagacaataaacaatttttaaaaagatatttttctaaggaaatagaaattatcgaaataggtaatctactcaattaacctaaattgtaaaacattataaaacacagagaactgttataattcattctcatctattcatttaacttaggttagcttagttttcaatcactacatattcttaaacggagtgaaattagtcacattccatttatcttccaaatttatcaacgtttattaagatttatttcaagaataatttgtacagggcctaattaaattatgaaccaagaaagttagtcttaaatgacccctcaatcccttttccctgcactttgctctcttaatctcctcgcccatcaaaactgcttcaagaaaaagttctgataaatttcttgtactaagggtaagtaagaatggtaaattcccgtgttaagttcccgccctttttggaacgaggcattttggaacagaaagtgttttctggtgccctgaagtcacacgataaacctacttgcctatgggtaatcctgtgaagtgaataaagcgtccaggacatgcatttaaatacgcaatttattttagttatataaatggcgttggtttaggtgcagggtacaaacttatttagaaatcatcgatttgttaactgcgtttggcatgggaatttggaaagagttcgcccgggttaagacaccaatggataaaacacttgtcaatccaggagaaaaggcatctcaagaatggaaagacttgctggcccaggctccctcggggagctctaggtgtagaaaatgcgcgctctccgttacttctcggttactttgcccagcacaaaggacgacgcgaataccaacagactggacgagtcggtgactacagtttgcattaagaggcggcgccttttgggtttcggagggttccactggaacccacgagggtcaggaacaccgacgcgcggattccgcccaccagacagcctggggaagcgagcctgaaggcgcggcgcagctagagagaagaacctcggcagacatgccgcccagaggcagctaaggggcccgtgggcagggcctgcgctccggctgcgatgcaggccggctagaggccggcgccgaggacccggcgcgcggcggccccgccccctcggctcccctcgccccgccccctaggcccgccccttcccgggccgcgcacccgcgcgccccgcccgcgggcggaagctggagcgaggctgaacgcctgacgtcaaggcgacatcgccaaacctcgcccagattcaggcgtgtaaaccagccggagcggcgcggcagcggcaggaccgccgtggcgcctagagtagcgacccggggggagcgcggggcgacgctggctgcagggacccggtgacagcgtgagaggttcgcagagtgagtgcgtggccgctgagggaagccgcggcggcggccgcgcggggccgggcgccggctgaggggagcgggtggggtgcggcgaggcgcgggccgggcgcggcggtcaggggccccggcggcggcagcccctcggcgcgcggcaggtggcgcgagggccaggcgccgggcccgcgagcgcgctgccttgcgggccggcgaggaggagcagccgccgccgccgcgggagaacagcgcgctttgcggaaggggtcaaatgtctgaaatatggcggaggaagtgagagcccgaggacccccccacccgcccgctctcttcagcccgcgtccgccgcagcttctcccgccgccctcctttccccgccggctcccccgaagactcgctccccgccccgagccccctcgcttgtcgcctgggttccctccgtggtatgggtggaagttagaacggaaaccagaaagttgtcctttgcgaagacctagcttctcccagccccgagctagggcgaggagccttcgggggaaaccactcccaggcgccccgcgggcttgagcctgacagcgaaaaagtttgcctgaaacggggcttgcttgctccatttgttgcgggaagtggcaggaggaaggcagcggagagagccccacttagtctggcagcagccaccgtgtagagaaaaactgttaaaggggcctttcccttcgtcagcaagaggaaatctctttctcttagagggagagaaaatccaggaagtttgtcctcttctctttttcgccatctcgaggtgtctaatcctaaaactatcagcgccatgaattttatttaaaactacgcccagtgaaccgggctctccggatttttcttctgaaaaacactgatgtcttttggagaaaagatcatttttgcaagtt

SEQ ID NO: 3237 - DNA, 6000 bp, Homo sapiens
acagagcaagactccatctcaaaaaaaaaagtcgagcagtgattctcaactgaaggaatagcagtcctctttagtgtactgagtggcagctcaaaccattgttactcttattttaaaagttacttttttttttttttttttttgagatggagtcttgctgtgtcgcccaggctggagtgcagtggtgcgatctgggctcactgcaacctccacctcctgggttcaagcagttctcctgcctcagccttccgagtaagtaggattacaggcatgtgccaccacacccggctaattttgtatttttagtagaggctttgccatgttggccaggctggtcttgaacttctgaccagcctggtccagctggtccagtgatccaaccgcctcggcctcccaaagtgctgggattacaggcgtgagccaccacgcctggcctgaaatttatcttttgttgacgagtatgtgcaaggtgttgtgtcagtgactctgaagaattactacatttctttccttattctttctttaatttattgatcacatatttcaggcacagtttcaggttctgggaatatggcagtgagtaaaacaaaaaaaatccctatcctcatggagtttacattctttgtaatccatctcacaaccttatcatgtagctgttactatcttaattttacctggaaggaaagtgaggctctgaaaggtttcgtgacttgcccaagattatagaaaaccacaatttgaaacttaggtaccattagccactatgctgtgctgtcaaaattgtccccccatggggttctgtgaaagagaacaattagtctcaatgtctcaaatagtagttgtcacaaatgtctttgaaaatctgatgtaactattcccatttttaattgtgcatgaaattttagggaattgacatatttcaaagtgctcattcttaacctgagctaaggacttcaggaaaagaacacttgaacagaaaggttatgcctaaagatcacaaatacgctatacaaataacaggtgctacagctctttcccagtccctaccagcaccacaagccaattatgttgcttattgaacagagttgtcttttctgcaaaactagatgcaaccacaccatcctaaaaacaggataatggctgttgccagtcagtcagagttggcattcgcaataaaaatctgtttttcagtcttttcaaggctggtgtagtagaaagcacagatttgaaaaatactgattcaaatcttgactattgtactgttgggttttttttgttttgttttgctgtttaaggtaacagaaataccctgataatatccccaaactggaaatcagctggtgtgaatgggtaaagaaaatatcatgtattcatgtggtatattttaatcaacagtaataaataaaaggagcaagttactgatagatacaataatatggatgaacctgactcattctagcaacaaataataatgctcattcatggataaatgaagcagctgggaaaaagagtcccagtcacctcactaagaagtgtagctcccacagccaactcagccacctttgtgaaataagaaaggcatacgtctcttagaaaaatcacctctgataaatgtatagtttttatattcagtattttaaaattgtagtttttatgttgtttcggtcagttgtgttatgtttggaggttttagtgaatatatagttatgcagccatcactacaaccagtttttggtgtgtttttttttttgagatggagtgttgcagtctcaccggggctggagtgcagtggcacgatctcagcttactgcaacctccacttctcgggttcactcgattctcctgccttagcctcccgagtagctgggattacatgtgcccaccaccatgcccagctaatttttgtacttttagtagaaacggggtttcaccatattggccaggctgaactcctgaccttgtgatccgcctgcctcagcctcccaaagtgctaggattacaggtgtgggccactgcgcccggcccactacaactagtttttagaacacttccatcacccccaaaaggtttcctgtgactatatgtagtcagtcccactctcactcccagtggaggaagggtggagaattggatgctcatatttcctttggagcagcaataatgaacagatttggggttattgtacttccatttgttagtgaacatgcaacatcagttcctcctgtggctctgtttgtacaagtagcctcatctgtgggcttgcatttcttcgaaaacaaagacctttttatttagttttttctagtttgtttgtaagactctgaaaatctcaaccattgtagattttttcggattaccaattttccattttaggtttcctatttcagacctgaacccatatacaaaaagaaaggccatctctttactttaactgttgggtctttgccagaatacttttgaaaatttccttaaatcaatttttattttgtatcctattgaatctttttgagacagaatctcactgtgttgcccaggctggactccagtggtgtgatctcagctcactgcaacctccacctcccaggttcaagcgattctcatgcctcggctttgcgagtagctgtgattacaggcgtgtaccaccacacccagctaatttttgtctttttttgtagaaacagggttttgaagccgggtgtggtggctcacgcctgtaatcccagcactttgggaggccgaggcaggtggatcatgaggtcaagagatcgagaccatcctggccaacatggtgaagccctgtccctgccccccactccactccccgcccccccccccccccccaaaaaagggttttgccatgttggccaggctggtcttgagctcctgatttcaagtgatccacccacctcagcctcccaaagtgctgggattacagacatgagccaccacatctggccgagttcttgattacctaagctatcctggtcagatacactgctctttttttcccttttttttttttttaatttccccaaccttgctagactgctggtcttacaggattttggggaattaggaagttccatggttggcaaactttcaaagacaggagcaggttaatgttagctatagaagcactgtcactcaagtgaagacagttgttgattggttggctttgggatgtgtctgtttaacaggccatttttgattgcctgagtttcagaagtaaggaaccctcattagttggttagtttgtagaagcatatcctctgaggcaaattgttattagttgattaaaatcatttaaatcagttatagtagctttgttaaccatgacccaaaaaactgtcatttcttgatcagaagttttaaaatctgttctggttgctacctttgtaccactttactgactctttagtttttttctaggaatgtaggagccttttattctcatgtaatgcccccaccctggaatccttgaagaccttctgtctattgttcatatactgaaattttataatgataagccttggtatggattgtttctttctggatatattttgtttttatttctactatttcatcatactaaacattctaagtagacgttttcagtctgggaactcatattcttcagttctgcctctgattcaagaccattttcaggttgtctgtacgttccccactttaggaataaatatttggtcttctgcttcctctaccaacatattatatttaccatttatgtatgccagggcttggccagatacgtaaatatttaggctctgttgtaactactttgctgttacagcacagaagaaaccacagacaatacacaaatgagtggatatggctgtgtttgagtaaaacttgatgtaacaaaacaggtgataggttggatttcttttcagacctgtgctctatcctggatcgggctcaaagtcatgtctgtaattctgtagttttcttctacctctgagcatcttttaataagtctgcttatagggtgctccatactagggttgtatagtaatcattttaaataaatctattttcctgaatgttttatttctgtgaaaagcacaggaatacacaactttacttagaattctttttttttttttcctttaataaggtactaggttttgacaagcttgcatcatgcgtgagtataagctagtcgttcttggctcaggaggcgttggaaagtctgctttggtaagtcattcttactttacctaagcctttcactccaagacgttctttttctgttgagttttaggttttgatgatttgtctttgttaagataaaattccttaatgactttagaagcaatataatatttttcttgtaattttattcaacttttaattatatctgggtggatcatattctctctggaacattgactccagaatgacacgagttatgctggaatacaatttgagctaagcacagagattgagagcgtacaaatacatgtctttttgcattcgcatttcagagccagataggaataaattttggtctttttatttatttatttttttgaaacagggtctcactctgttgcccaggctagggctcaagtgatctcagcctcctgaatgcttgggactacaggcacgtgccaccatgccaggctaatttttaaaattttttgtagagatggcgtcttgctatattgcttaggctggtcttaaactcctggcctcaagtaatccacctttgcctcccaaagtgctggaattacaggcataaatcaccatgcctggcttgctctttcttcttatgaatagtcttaccctgtacattttatgttagaaaatatcaaagcttataaaaagtcttcaaatattacctttgactgtccagctttacattttttaacggcacgttttctgcatcaaggaatggtatagcaagaatgaagacataactgggtaatgagggttgggaaagaggaaaaacgtagggaaaataatttgatgaatagttcagagcttagcaaagcctcacaagcaaatagattgaccttctgtctcactcataagataaaccatcttggccacttagaaaggccacctagctgagaagtgtcatgcttggaacaaactgagaagtacatacaatgtgaaatgaactgctttttcatttgtatccaaagtgatggggaggtcagttgatcctgcatgtatgtgtgtatacataacaattagtcaatttctaatttaaaaatcaaatttaagctcttaagactgaaacaatgccggcacagtggctcacgcctgtaatcccagcactttgggaggctgaggtgggcggatcacctgaggtcaggagttcgagagcagcctggccaatatagtgaaaccccgtctctactaaaaatataaaaattagccaggtgtggtggtgcatgcctgtaatcccagctactcgggaggctgatgtgggagaatggcctgaacccgggaggcagaggttgcagtgagccaaaattgcgtcactgcacttcagcctgggagacagagcaagactctgtctcaaagaaaaaaaacaaaggactgaaaccagagacatttaaaattttttaatatatgatctctaaatttagaattacccaataaggagcatagtgattatttatttaaaaataaacagcttcctgaggtaattttcttaccaaatgtacacattcgaatgtagtattggctgtggttttttttttcattgatggtgtaactccctgtgtgaactcagtttacaattacattaaagattgaatgtactcttttctttagaagtataatggtttcttaatttttttttcagactgtacaatttgttcaaggaatttttgtagaaaaatacgatcctacgatagaagattcttatagaaaggtatatattactttggaaggccttttgcttttgattttaatataaatacttattttagctttataattattgaatgttttatacaaaggatggag

SEQ ID NO: 3238 - DNA, 6000 bp, Homo sapiens
aagactgcattttatgtcacactgtcctaaaagacttctcattgttcctatagtaaagcccaagcatgactttcaaggttgtatagaatcttatttacctctttacattcatctctcaccatatattttttcaatggtaaatgaatgagtgaaggatgaatgaaccagagatatacaaaggccattgacaatcctccattccaaatgaaaaataagaattatctgactccttgactctagctatttcatcaaaattcaacaattgaggtctctacatggttatatgatcatactgggattcatgatattggtcttttttttgtttttccttgcagatggggtcttgttttatcatccaggctggagtacagtggcatgaacatagctcactgtagttttgaacttctaggctcaagtgatcctcccacatagctggaactataggtgcatgccactatgcctacttattttctaaaatgtattgcagggccaggcacagcggctcactcctgtaattccagcactttgggaggctgaggcaggcggatcacttgagcccaggagttcaagaccagtctgggcaacacagtgaaaccccatctctacaaatacaaacaaattagccaggcatgttggtgtgtacctgtagtactagctactcaggaggatgaggggggaggatcacttgagcacaggaggtcgaggctgcagtgagccaagattgtgccactgcactccagcctgggcaacagagtgagactctgtctcaaaacaaaaaatattgtagagacaggatcttgctatgttgcccaggatggtcttgaactcctggcttcaagcgatcctcctgcctcagcctcccaaagtgctaagattacaagtatgagctaccatgcccggcccaggacattggtcttaattcacaaacgtagtgcaagaacagggggagaaaggaagagtcattccaaaaactaggtctcatatacattataagtagtccataaactcaactttataaccaccacaaaatgggtgaggttgttctttcccgcctacagaattaaagctgcattttacctctgtgcaacaatttttccccatttgatattgtgctgcatgttcattgttaacttgatttcacctgtataattattcctgttttttactgggggaagaggagctacatgaatttgcaccctatcatgcctcagtcctcaccattcaggaatatgttttgagttatgcactcactgaagtgtccccatatttttgcagctcttctctacggaggaactggagctctagtgtttttttttttttgtggcagtccgtgttaagtttatacagaccaatcatagttgactctaagactgacctaaattcttaagggcgtagaatctatcccagaattggcctgaatctctttcaatgctttgactgttatgggctacttgttttctcacaacatacttaagtacgtttcttatggctgctgtaacaaatgatcacaaacttggtagcttaatacaacacacatttattctcttttagttctggaggtcaggaatcaaaattagtttcactaggctaaaatcagcatatctgcagggctgaaccccctccagaggctctaggggcttcttgtcttttccagctctggtggctgtaagcattccttggcttatggctacattgctccataatctgcctctatggtcacactgccttctcctcttctgggtgtgaagcatctctttctgcctctctcttataaggatacttgtgattgcagttagggcccacccagataatctccccatctcaagatccttaacttaaatcaaaaagacctgtttcccaaataaggtaacatctacaggctccggaatctaggagctgatatctttaggggccgttatcagcctattacaatttacatctatatttacccactctgtgctcaaaagtatgccaacctacttattgtaacccatgaaaacttgcactaccttcttaaatgtcaacgtaagctaaatgtaaaaacttattttaacttcgaaaattattttggctgagtgtggtggcttatacctgtaatcccagcactttgggaagctgaggctggaggattgcttgagcccaggagttcaagaccagcctgggcaacacagcaagacacgcaagatatcgtctctacaaaaaaaattaaaaaattaaccaggtgtggtggcacacacctgcagtcccagctactcgggaggctgaggtgggaggattgctggagcccaggaggttgaggttgcagtgagctgtgattgtggcactgtactccagcctgggcagcagagtgagatcctgtctcacaaaaaaattattttgttttacaataaaaaaatttttaattgctttgatttagtgataaatgcaaagtaatgcatttagtttctaagatgaccaagctgttaaataatcaaatgcacacaatttgaaaagttgttgaaaggattggctgtatcaaaaagaagaaaggagaaggcttaaaggaagaacacacagccttcttcatatgtttatagggaatagggattcgatatataatgtataaatataaacagaaataattaattgcaggtgaagagaggcagatttcaatccaatatgaggaagtgctcagaaagaacaatggaaggtgctctctcaaaatgaagttcttttctagttctggaagtgtctataaatgtgcaaagaccctaaggggaggaatgtggaggagagagttggaaaatatatctttagatacaatcatgaggatattttataaaacatagagtctctttaatggttggttctaaacaaatctaaaatattatccttctccaattcacttttcaaatgatagccagagtggtcaaatctgattatgtcagtcatcttacgaaaatccttcatttgcttaaagaccctttcagtattgatccccaacttcctcatggtctcttctggagtttttttttcctccctaaattctagtcacatttacagttgctcaactttagatgctccttcctatctaaagccattgaacatgctgttatctctgtttgcagagctctcctgtccttcctgactaggttactcttacccaaagataactttctccagggaaagcttctctagcatgctaaatcagttgggttctcatatatgcttgcaagatactctgaactgtttcatcaagatgaaagcatttattgtacaattgagtatgtctgtcttccctgataaaatgtaagctctgtgaggacagagacattttatcttgttgatcacagtgcctggcatatggtgggcacatttaaatatttgttgaatgaattaaccgactctctttttttttttttttttttttgagacggagtcttcctctgtcgccaggctagagtgcagtggcgcgatctcggctcactgccacctctgcctcccgggttcaagcgcttcccctgcctcagtctcccgagtagctgggattataggcttgtgccaccatgcccagctaattttttgtattttagtagagatggggtttcaccatgttggccaggatggtctcgatctcctgaccttgtgatccgcccgcctcggcctcccaaagtgctgggattacaggcatgagccaccacgcccggcctctttttttttttttaacctggtttgaagtgtgaaagaagtttgatttttaaaaaaatgtttacctgacaccaggtttccagtaaattttcagaaatattagtatgatttcttggaggagtatggtttcttggaggcaggccgggcgtggtggctcacacctataatcccagcactttgggaggccgaggcaggtggatcacttgaggtcagagttcaagaccagcctggccaacatggtgaaaccctgtctccactaaaaatacaaaaagtagcggggcgcggtggtgggcgcctatggtcccagcttctcgggaggctgaggcaggagaatcacttgaaccaggaggcagagactgcagtgagctgagatcacgccactgcactccagtctgggcgacagagcgatactccatctcaaaactaacaatacaaacaaacaaaaaagaatggggatgcagatgagaaaaaacaagcaatcatcgaacaagccacctcaaggtggagtaccatggaacgtcagaggcttcatgaaagtcagaaaaactgaagagcacttggggttaggaattcaaaggtgggcagctcttatacagaccttgccctcaacaaacctatagtctaatgagagtcgataaacacttagcaaagtattaataatatccatggagtgtgtaaagccctagtaaaggaggtatactggtggtaagaaatacctaattttgtgaggtgggggaatggaaggatgggggaaggattgggtggtcagggacgcggtttaagctgagacttgaaagatgatggagtagttgaccaggcggtcagaggaacttggaagcgctatgattcgggatcccacagagagagattcaagggcaccttggcagatatggtttacagtgacctctggtgtgacagatcattagcattgtgaacatgcaaaaacgatgaagttctgcccttcatttcaccagagctgggctcgcctcaaattcctggttccttattcccgctggctcccaccaactgaaaagcagaggtggctcgcaagcggcggggctctgccctagattgccagtaggcgctcgactcacatccagctccaccccgggagatgccccagaagccccgcccacgtccaggcacgttcttctggggctagtcgcaggggccgccccggcaccggcgctcacgtgacccgaggtgtgacgtaggaggaaggagacgccattagagggaggcagagagggatcgttcttcgcttttcctccggtgcctgacgtggtgggctggggcccttcattctcggactttccctcagcccttccaggcctcgcccgaggagggcgtggggacagcgcccgggtcggcggggccggggcggtgggggctgagccggccgtggctgtgaaggcgctgccgcggctgtcgggagggcggcgcgacactcgggctcgggcggccgggaagcgacgggatggctgcggccggcggcggcggcggcggggcggcggcggcgggccgagcctactcgttcaaggtggtgctgctgggggaaggctgcgtggggaagacgtcgctggtgctgcgctactgcgagaacaagtttaacgacaagcacatcaccactctgcaggtgcggacctcggggagcgggagggggcgcctcagggcccctacccctccggggctggggaaactttgccgccctggtcccctggatgtaggctggcaaatctcaggcctgtcatctccgccttcggtttacctttccgaattcgccctggggaatcaccaggtcggggcagcctgtagacgcgaggacaggctgttgggagggaagtggaagggccctgaaaagtccccagtgttccccgtggtggctgcgcacgttgtggtctccgtccgtgggctgttttttcccatttactgcagttcctgggtcccaggtgtcagtgttgcagtctccaaatgttagctccttttctttctttcagaattaggaacttagctgcgtatttgattttgcgaattaggtgatttgtaacttcagcgcttactgatgactaagtgtttatgcaagttccattttgtcctgagtaacaggaatggcaaaagagccatctctggaggttttttgaaatgaccgcttgcctaggcgtgttacgcagtttcattgcagcctgcgtgggtctgacttgcgggtcactcatattctgcgaggtcgattgacccacgctgaaacatcaagtgaatactggccaacaattggtccccagactaaaagccgctgctgttactcagtttctttac

SEQ ID NO: 3239 - DNA, 6000 bp, Homo sapiens
gcggctgggcccctgctgccgtcccacgtgtctggggaagcagacaggtggctccatcttagagtcccgctctggccctcatgaggcaggaggcccagcagggcgccctgaggggccactggaagtctcgacgccctttgatggtcactggcaaagaaggaaggagttttggggaggtgaggagttttcaggaatagggcagtcaggatgcagtagcgtgacttttttccgatgcagggcgttcagagagaaactgaaactgcatcctgttagcctggcgagaaaaagccttgtggtcaccccttctcgggttcttgctctcagaagctgaggtttgccggccctgagaggtgcgggtgggatggaggtgaggggagaagtgacaaggaaggcaaggccctggcgttgggcctgggagtcagccctgggcgccaggacttccagctggccgctgcactcagcctcacgtccttgctggtcacatggccatcctgaggtctgctggatcaggtggctgcagacattaataaggtaatggataccaagcccccagctctgtgcctggcctagagcagagtccctgtgagtgaaggtgattcctggtggccatgggaaacgtcggtgctccggttcctcctagccagagctctgagcccctgacttcatccccagacaaattctctgctctcagataaagcccctttcctgggccccggatgaggcagaggcgcccagggagccgcgggggctgtgcgccggggccatggctgcaggcgtttcttggcatctctgatcatcttcagcaaaggagagtctgcagagccatccgctccttgggcttcctctgctggcaggggacagtcgcctgttcctgtggctccggcgcgccctcgctctggaaggcgtctgacacaccatgccatgtgctgacccggcgctctcagcagcagctgccaaggccagagctagttcttgggcccagtgccaagagagcttgatcgtcacagctaccccgaagccaaggagcgacgctgccctggaagcaaagctgtgggcagaatgaagccctgggaagagatcccagcggtcgtgttgaggatggagcaaggatggggcaggggcggtggcaggggcaggttgggctttgtcccagggctgggcaggagctctggctctgcagcatcagggaagatgctcagggctgcccctaagctgcctgttggtttccttccaccacctctgtctgggaccacagattgtccttgaaggcacattgatgatgctgaagaacgcatactgactgtttactgctcccccgccttggggtaatgcttagctcctttcttcctcatgaccaccccagttaaggactagccacctgtgtgctataactgttgaagctgcaaggtgtggcagggtgaatgcaggcaccttcccaagggccagcctttcagagatggagccagggttggtctttgtccttagatcgggcctcagatgtgaagcattggccagagagctgatgggcaggtggacaggaatggagctgcagccacaagtcagcctggctgccccattcttgctcagcctgcgctgacttgggctgttcctgaactggggcttgggctgtccccatgaacctcatgggggtggaggtaattagggctggggcaggtggcagccagaaagccgggaggaagcggcctgtccactcatggtttgtctgtgtgctgtcctgaggagccctggggtggaggtccctgcggctttggggagaggggacagagggacagctctggctgattgcacagtgtggggcggggctgccgcctggcctccggctcttcgacagctctcggggaagcggaggctgtggtccccctcctcctccggggattgatgtcgtcctgtgccactgggatgaatggggacatggggtctggagaggagagttgggcctccccttccttctggccttcctggctggccctgggctctgcatgtttggggtgatggctttgctgggcgccctctccccagccatccctggatgcttgtgtggcttccatgcttttcctgccacctgcacagatgagccaagagtagcaggaagggaggtgcctacctgccccaggggaggggcacagactttgccagggcgtcatgatggtgtggcttcttggaaaggttctctaaaacaggtttgaggagcaaatatttttttgaatgttcaaagacagtgataacatgatgtcaaatacaaaaactgcctgatttcccaaaataaagcaagaacttcaaagatgtttcaagcctgcagcagactctgaacagcaggaggtgactcctcagacctgctctgctgcccaggggctggccctcccgccctgttggtgccccgggcgggcagggggagtcagtgctgccgcagtagcctctcctgctggcctgttgtggctcgggggcatctgccgaggctgagtgagagcccaggctccagggccaccctcaccttttccgggtcagtgtcctgacgtgggcaggtgggtcccggcaagggggtgactcctgtcggggttgacatgctgccgcacactctggccctgcaggtattatcgggggacccacggggtcattgtggtttacgacgtcaccagtgccgagtcctttgtcaacgtcaagcggtggcttcacgaaatcaaccagaactgtgatgatgtgtgccgaatattaggtgaggctgcactcagggccgggtcggggttgggtgggagagaggcagccggctgcgcccctcagggctgcgctgactctgccttcgtttgaagtgggtaataagaatgacgaccctgagcggaaggtggtggagacggaagatgcctacaaattcgccgggcagatgggcatccagttgttcgagaccagcgccaaggagaatgtcaacgtggaagaggtgaggccctgggccactgtggctctgccacacacccgtggccgccttctccatgctgctggcctgcttgaggcatctaaatgaccaacagaaaatgtcatagtaactgccatttattgagtgcctactatgtgccaggccctttaacgatcttagttcatagttcaacagtcctctgaggtaggtacaattatacccacatttcaaatagggaaactgaggctccaagtgttgaagtaactcaaggaccaccacctggctagtaagagactgagtaaacctctgtcccacaccaaagccaagcacagtttccactccagtcctctgcctcattggccgccttgtgctgtgtggagcccagaggcctgtggaagtcgaggatcccactgcttcagggcacaggggccacacagcagcgggcacaggctcctttgtaagtcaggctggtgtcctgatgctggcccatccacctgggcctgtgggcaaggctggtatgaccttgggcggtgacttcacctctctgggccccacatgccatgaagtggcgtggagcaggcagaccccgggtcacctatgtccgtgaacagcaggggcactttcatctgtcatgtcataagattccagctgggccgggcgcgccggctcacgcctgtaatctcagtgctttgggaggccgaggcgggcggatcacgaggtcaggagatcgagaccatcctggctaacatggtggaaccctgtctctactaaaaatacaaaaaaattagccgggcgtggtggtgggcgcctgtagtcccagctactcgggaggctgaggcaggagaatggtgtgaaccagggaggcagagtttgcagtgagctgagatcacgccactgcactccagcctgggcgacagagcgagactccatctcacaaaaaaaaaaaaaaaaaaaagattccagctgaaggaaaggggttggtctctctaaaagaaggactggaaaacccctgtgagattgacttccccaagtccacacagctcatgggcctctgatggtgttccttttttcagacttatttatttgttgagtcagggtctaactctgtcatccaggctggagtgcagtggtgtgttcacagcccactgtagtctcgatctcctgggctcaagtaatcctcccaccttagcttctcaagtagctgggactacaggtgtgcaccaccactcccggctaatttttgtgttttttgtagaggtggggttttagcaatgttgttcctttttgacctttaaataaaataattcaccacctccttctagaataggctttgaagacatacataccaaaaatgcacaggtagaaagagctgggccccggaaggcggggaggcagccgtgcaggccagcaggggcctcctggccaggtctgaggcgggcccttcctctttcctctccacagatgttcaactgcatcacggagctggtcctccgagcaaagaaagacaacctggcaaaacagcagcagcaacaacagaacgatgtggtgaagctcacgaagaacagtaaacgaaagaaacgctgctgctaatggcacccagtccactgcagagactgcactgcggtccctcccccagcccgaggcccacggaggttcctcgggggacagtctcagtttcgtgccgttatttaaagaattctctccatgtttttgtatcgggaggtgccatcggcacttcctcccccgccctcctcgagtgccaagaaggtgttggaccagcccgcccttccctactggtgccccctcctccccggccaaggcgcctggacctggcgaggacgctgcccgccgagcggactgattcgcagagtctgtacatagtgtatattgctctacccggccgcacaccacgtcctgctctggcttttgccttcttgatgccagcctgctgcaacagaccctccccgcgcccctccccagcccatcttactgcaagcagcgtcctgaggagacagcggcacgttctagctgcgtctgcggccagcccgtgccagtggagtgggctccgcgttgctcattctctccgacaggttgtcagcctctgtccccgctgcacagggtcttgccccttctccggggcctgtgccagctcccttccctccccgttgtcctgtccccacagccattctgggagctggggaacctggtctcaaggcaggccctgcagttccacagaggtggcaggtcttgccctttggccaacagatttcttgtcctgccttctagatgcctctgagctccaaacccagggcagccatggcttctcatttacaccaacaggtttcagttccaacagaaaggtcggggtaggttcgtgcagagatggggctggcaggggggctatgggaggattattttaacagatcaagaaaatgaagccaaatcaagtgaattaaattcctcacaattattttctttccctgaggtttgattggcacagcagcaaaagttgaggccaccccacttgtgtccactgtttttagaaaaaaatgaatggcttcctgccattgtggggctggactcttgggctttcttggtgggagcggagaaggggcctcccacccttgtccgagttgcctcccactggaggtcaggagtctacactgcagcctcgggcactgtggggagtgcatgcctggggcctctgggtggggaccatggacaggccctggtcactgtcctaacctttgtcaggacaaaggtagcaagaggatttcctggcgggtgggaaggaatggctggggcggccagttttgacacgccccagtgccctggagaacaaccagggtcatctgcacttgatgactgctccccgacccccagcccggacacctcattcccctcccactacagggatcaagtgacctgggaagaaccgagtttaacaccaggatgtgtttccttagatttcctttcctaggcgatttccagggagagccctgattggacaatcacatcacagatcacactgcagtttccatgttagcactgtggatgggtttttaatcaat

SEQ ID NO: 3240 - DNA, 6000 bp, Homo sapiens
caggggaagaagctgaccctgagttagaccccaagtttggcccacaccccaaaaagtgaactcaagagagggttcaactaattgtatctgacattctgtccaactctcacactgtgtgtgtggcttcactttaattcaacaggtatcaagcacctaccaggcactgggtctccagaggatacagataaagagatggtccctggaatcatggaacttacattcacttgatttctgggggctacatcagggcagggcaaggcccactgccaagtctcttggtgtggcatcaggcttgcaggtgtgggagaaagggcccgtttccacttccatcagagggagacaccaggcatcatatcatatcctctcttccttccctcttggaccagtatgctgagtggtccccatcttgctcctaatttaaagtccctgtcggtcagtttacctgccttctctgagttctgattcaccacccactgcttccttcctggatgatcacagcacacgttccctcccttgctacctagcactcagcagctttgaagtccatgttgctgtctgaaataatggatttcacaggtccctccaacctccactgcactgatcttcatccctgacactgctacccttgagggcctgaggtccccctctcctttacccacttagccttctggttggtgacactttacttcccaaagctctttgaagcgcccttagctcatcttccctccaaatattcactccttattatttcctggctgctaatcctctgcttccactatcctgaaaaatacttcatgagccccactgctctcaccaccaagcattgtttctcttgtcatccactgccaaacttcctgccacctctgtggctccactgcctgcttctgcaaacctcagcgtgctccctgctttacttttctccttggacatacttggtgcctgtattctctatcagaatataagctctatgaaagctgggattttaaaattttacttactgctgaatcctcagctcgtagatcaatgtctggcatagtaggccctcaagtatttgttgaatgagtgaatgacttgttccccactaaactgtaaactccgtgaggacaggagctttgttttgttcatgttctagcctctgtgcccactacagtgcctaacacctagtaactgtgcaaatttttttttttttttttttttgagatggagtctcgctctgtcacccaggctggagtgcaatgatgcgatcttggctcactgcaacctccacctcccaggttcaagtgattctcctgcctcagcctcccgagtagctgggactacgggcgtgtgccaccacacccagctaattcttttgtatttttagtagagatggggtttcaccatgttagccaggatggtcttgatcttctgacctcatgatccacccgcctcggcctcccaaagtgctgggattacaggcgtgagccactgcacccggccacttaatatttactgaattaaggatgaatccagttaccaggtaaattacgtgatttttttttttggaagctgctttgtctagtttataagtttgcttattgtcttttgcatctgtccctgctgttaccttacacccaggcttcagcaataacctttaaagctctgcagctgaaatccatcctgcaccctgccagattacttcactaaaatattttgagattgcctctttgctcaaaaactttcaatgcctcctcatcgtattaatagtttctaatgtgcaaacaggtggtgttgcaaaagttcatctgtaagttagctgttcagagcagtggaacaaagtttcccattactggacacactgatcctttaggtcacacaagtttacatatgtatacagtgagaaggagaaagaaagcttaacataactcatcactgaactgtagtttaaataaatgtctaacaatgtttccagaagaaaatgtgctgattcattttgagatgccaggcacataccctggcctgcagggaattcccctccaagccaaatgatgattctcatagactgtgacagggactgtctaaatagacactcaaagctctcctattccagtgccatcatgacatctttatgataaaatcttctccccatcattctaactaaaagctatagctttcctcctctgaagtctagactgcatatctgacagcttttctatctactgtattgtcttatactttcaatttcctcatgagtatgtcttaactcttgatgaggctgtgaactggtgagaaaaggctctgttcctttttttttttttttttttttaagacggagtcttgctctgtcgcctaggctggagtgcagtggtgcaatctcggcaacctctgccacccgggttcaagcgattctcctgccttagcctcccgagtagctgggattaccggcgcctgccatcgtgcccggctaattttttttatttttagtagagatggggtttcaccatcttggccaggctggtcttgaactcctgacctcgtgatcctcccgcctcagcctcccaaagtgctgggattatgggtgtgagccacagcgcccggcctaaggctctcttcttataacctctgcaatccgtggcacataaacactcattaaatagttaccaaagaaatgaaggaatttatgccgattgctttccagatgacacatgcaggcaaagtcaggaatctggttttaatggccaatttggatttatttcccaaaaatatcctacagccttattatcaggaagctgccttgaaaatgtgtgctagagtctacagtaggaaatggctcaaagtatgaatcagtgcaaaatgaccttgagtaacattggttacagtctgtcacatgcctacatgtgccaggtaatttacaaacataactctaaaacaaccattctgtgaggaaacgggggctttgagatagtgtgatgtgacttacctaagatcacaaagcttttaagggatggaggccaggattccaaagctagcattggaacgaaagtcttcccgacaccagcccaggttgtgaagatgagctaggaggacctactgcctcgctggctggttagggctgggcgtgcctccctggtggaaggaaggtacataccttccttctccccctctatttcctaaaactgctgagtcagaggatggccctaaccttcccgaccaagggggactttctatcgggagcacatgagcagctcttctccctagccagtaccttcagattccaagctcatgttatttcgatatcaccacactgattctcagctcccggaaaaacaactcaaggcttgagtcagacactccatgtgttgttcaatgatcccgcctgcaacaatgtttattataaccaaaaaatataaacagcatgaatgtctattaatagcggagtggttaaataatagtacatccgatggttatcggatggagtaccataccacgcagatgttaaatgataaaagtgtactgttaaatagaaaaagcaaggtatgtacatatatgtttgtacaggcaaaggaaattcactggggggcacttattcattcaacaaatatgtgttaagcattttaaggttacctgtgaaactaacaggggttacctgtgaggagtgcttcagaaggaaaaatagtaacttgtacttttcagtaaacttctgcacataattttaaggacgaacattgttttttttttttgagacggagtttcgctcttgttgcccagaatggagtgcaatggcgagatctcagctcactgcaacctccgcctcccgggttcaagcgattctcccgcctcagcctcccggcattgctttttataaagtcaaaagaaaaggaagtttgataaaacaagtagaactatccgataaatactcgcctggaaagggacaggattataagaaacaggtaataaggagcttaaaaccctctgcagttctgcagtgaggatggtcgtgggggcatacaactttccgtttcaggtcagtttaggtagggcaggtgggaactcactctaaaacgagaaaccggggctgatgacaaaatgcacacgtttagcttctggcggcccaggtcttcctagccgcagattctgagacgtgtatctgcaggtggtgtgaaattgaagccgggggagcggttgctttcggtctccgaggtgcgccttgcacactgggtcattcagctcccaggctcggctcggagctggaccactccctcccctccaccaaagaggcaatgtgggctccaagaggtcacagcgctgggatgggatttcgaccccgcgctgccctcaaaggccacctcctcgcagctctgctcccgccggcagctcccgttctgtccaactcggaagccgcccgccgccctcggcgtccactccacaggcccggggccggggccagctccgcgggggaggggtcggtgcggaaggggcggggtaccgggccttccccgcgcgactctgccttctacggccccggcccctgcctctggaaacccggagctcgtgcgagccccgccccacggtcgcggcgtgcctgtcatttcctctccgcagggcgtgcgggtctcgaagatgagggagcaacaacgtccacgaccgggcttctccggcaccttgggcttctttccgctgggactcgacagcggctcggctccgcaagctctcagcgcccagggtggcggcgacgacgctccccgaggagacgcgaggaagacgggcccgcgcttgctgggactccgtcagggcgcgtgcgcgacccgggcgcggccggctcaggctgcggctgcgcaaggcggtgccagacgctgcgcctgcgcagtggtggggcggggcgggaaggagggaggcggtggtagcggcggcggctgctgaggaggaggagggggagcggagggaggtgtttctgtcagttccggctgtttgttcgggaagtggatccgccgctgccggagcagcccgaagggagctgcggatcgcgaggccagtaccgaccccgcccgcccgcgcgcaccgcccccgcccgccatggcccgggactacgaccacctcttcaagctgctcatcatcggcgacagcggtgagggccgcagcggccggaggcggcgcgggccctgccgggcgcggcccgcgggggcctcggggcggcaggcgggcggggaggtgccggcccgtgcggggcgggcgggcggggcagcccggcggtctgggccccaggggtgcgccgaggggctccggaccgcgccgaggggaggttggggcgcggggcggaggggccaagcgcgccgggtccagtcatcgcgcctgttcctgcctcacgtgtgaccttggtcaagtcgcgcgatctctggagttggagagacgtgggttcgagtctcaggactaccacctgcctcgcgctgaccttgggcaagttgcttcgccgtcctgagcctcagttccctcatctgagaagtggggatgtgccttgctgggtggtgtgaggattcgatgggataaagtaggaaaagtgcgtagcgccctacccggtaaagtaagctcgaagtaaatgttcactattgtcattatcatcagtatcctttataagcgtcagtttcttcccatctaaaatgaggacgttctcagaacctgcctcatgggattgccgtgaggtttaaatgaggtaagtcggataaagggctttgcacagggtctggcatattcctgctgaattattatatccctgcgtggttcagtttcctcatctgtaagatggaatgatagttggatctgccttatggggttgatgtgagtattaagtgagattctgcagtgttgctcacagctcctggcacatagtgagttgtcactgtttgctgttacactactatatacagaggggtcctggggatgggacagccaaaattataaaagtgctttggccacacacacacactgcttgagggctcctagctctgatcactgctctagctccag

SEQ ID NO: 3241 - DNA, 6000 bp, Homo sapiens
tgcccaagggcacatcagcatgaccccaaccagtccagcctgtcattcttttttttttttttttaaatggagtctcactctgtcgcccaggctggagtacggtggcgcgatcttggctgcaacctccacctcccagattcaagcgattctcttgcctcagcctccggagtagctgggattacaggcgcccgccatcacgcccagctaattttttgtattgtttgtagggacagggtttcaccacattggccaagctggtctcgagctcctgacctcaagtgatccgcctgcctcggcctcccaaagtgctgggattataggagtgagctactgctcccggccttttacccctggctgctgtatctggtcctcaccacgcaagccacacacatgtcttcccttcctcctgctcctgcctgggctatggccccctcactcctctctgcttcagttcaacctcttgaagagccctgacctttcagtgaactgttctcgatatttttttttttttttgaaacaggatcttgctctgttgctcaggctaaagtgcagcagcgtgatcatagctcattgcagtctcaacctcccagactcaagagatcctcccacctcagcctcccaagtagctgagaccacaggcgtgcaccaccatgccctgctaattttcttctttttgttgagacagggcctccctatgttgcccaggctggtctcaaactcttgggctcaagtgatcctccacctcggcctcccaaagtgctgggattacaggtgtgagctaccgtgcctggacctttttttttttttgagacagtgtctcattctgtcacccaggctggagtgcagttgtgtgatcctaactccctgtaactttgaactcctgggttaaaacaatcttcctgtctcagcctcccacatagctgggactatagatgtgcaccaccacgcccaactgattttttttttttttttgagatgaagtctcgctcttgtcccccaggctggagtacagtggcacgatctcggctcactgcaacatccgcctcctgggttcaaatgattctcctgcctcagcctcccgagtagctgggattacaggtgcgtaccaccacacccaactaattttttgtgttttaagtagggacagggtttcaccatgttggccaggctggtctcgaattcctgacctcaggtgatctgcccacctcggcctcccaaagtgctgggattacaggtgtgagccactgtgcccggcctttttttttttttttttttaagagatggggtctcgctatcactatgttgctctcactatggtctcgagttcaagtgttcctcccgcctcatcctcccaaagcactaggacaaactactgcccccagccatgttctcaattttaaacctgcctcagccaccacctcactgtataacctcacacaagtcacgccccctctctgagcctcaatttactcatctgtcaagtgaagggctaactccatctccaaatgaggatggctggcctgagggatgcagacgacatgctgttacaaatcaaagccagtgtcagagagtataagggaaagtatagaaaatacagaactggccgggcgcggtggctcacgcctgtaatcccagcactttgggaggccgaggcgggcggatcacgaggtcaggagatagagaccatactggctaaaatggtgaaaccctgtctctactaaaaatacaaaagattagccgggcatggtggtgggcacctgtagtcccacctactcgggaggctgaggcaggagaatggcgtgaaccggggaggtggagccggcagtgagccgagatcgcgccactgcactccagcctgggcgacagagcgagactccgtctcaaaaaaaaaaaaaaggaaaaaaagaaaatatagaacctccggcataacgaagggatgcagagattgagggaatccattgcagaagcatccacaatgtgcagagtgggcagaactctagatttatgaagaaagaaaccagcattcatggagggcctattgtttgccagccctgacatgagctgctcgcacacgtattagcactgagatgcagtggctcccggctttgcccctgctgagctatgtgatttggggcaagtaagtcacctcctctgagcctcagtttccttttttttaagacggagtttcattcttgtcgcccaggctggagtgcaatagtgcgatcttggttcactgcaacttccgcctaccaggttcaagcgattctcctgcctcagtctcccaagtagctgggattacaggcacattccaccatgcccggctacttttgtatttttagtagagacgaggtttcatcatgttgcccaagttggtctcaaactcctgtcttcaggtgatctgcccgccttggcctcccaaagtgatgggattacaggcgtgagccaccgcgcccggccttaagccttagtttccttatttgacaaatcacacagggggcgggtgagaataagcgtctgtgaaatcgttcaacatatcttaaggaggcattcacacaaggagcccagttcaggggagtgtgtaatgtcagtctctgggctcagctgccaaagcttagtctggacttccatggctaccatctcccagctttgaggatctcaatgtcgggagaaatcaaagagcacagcatccatctcctctgcacaacctacgcctacatggctgacctaggagctagaccacataaatctcgacccaatgagtcttctcccacacctgacttcggagagaaaaatcaattcatcacacaaaatgtactgtgagaaagcgggccaaacccatcccctgggctttacagaggagaagagccaacaagctgcatcttcctgctgagtttaggcttttcactgttggatatcaacgcagaggtccagatgtcttgcagagggataaaggctcctgaccacggcgggctgtcactccaaaaagagagaaatggccccagtgccagtccctcagaacccaggccagggctgcaaggaaatcatgtaaaggaagaagcctcaagaccctgaagaataccaaaggccatctccaagagaacactccagagcttgcctggtttcccttcattcaaaccataaccagtcagtactccacctttctacctccttccccaacctcagttactcttccatctccctggttagcccccagctttcccccttacctctcccctcctccagcaaccacggaaacctcagccatccttcacctgatccaaaccaccaaccacatctccatccagctttaaaagggaggccaaaaccacccacttccctgacctagctctgacatcgctacccaacactcctacatcccaagtcataccgctcacttgatttgatcccctttccttaacagtccatgggctctaccaccagcctggcctctgcctccaatcataagacatccctccccacactcagctcaggtctggtctacaaactgagcatgctcccaagactctttcatgaacatcatataaccccagcacctcagtttcgctcccataaaccttctggggcctgccttcctgacctcttggtcactccataaacctgctcacctgccacactccaaacagctctaaaaccctccaccttttcccagaaaccagtctaccttttcgaaggacacttaatattcattaattccttctgcaaatatgtcttaagcatgtactgggtgccaggcactgttctaggcactggagctagagcagtgatcagagctaggagccctcaagcagtgtgtgtgtgtggccaaagcacttttataattttggctgtcccatccccaggacccctctgtatatagtagtgtaacagcaaacagtgacaactcactatgtgccaggagctgtgagcaacactgcagaatctcacttaatactcacatcaaccccataaggcagatccaactatcattccatcttacagatgaggaaactgaaccacgcagggatataataattcagcaggaatatgccagaccctgtgcaaagccctttatccgacttacctcatttaaacctcacggcaatcccatgaggcaggttctgagaacgtcctcattttagatgggaagaaactgacgcttataaaggatactgatgataatgacaatagtgaacatttacttcgagcttactttaccgggtagggcgctacgcacttttcctactttatcccatcgaatcctcacaccacccagcaaggcacatccccacttctcagatgagggaactgaggctcaggacggcgaagcaacttgcccaaggtcagcgcgaggcaggtggtagtcctgagactcgaacccacgtctctccaactccagagatcgcgcgacttgaccaaggtcacacgtgaggcaggaacaggcgcgatgactggacccggcgcgcttggcccctccgccccgcgccccaacctcccctcggcgcggtccggagcccctcggcgcacccctggggcccagaccgccgggctgccccgcccgcccgccccgcacgggccggcacctccccgcccgcctgccgccccgaggcccccgcgggccgcgcccggcagggcccgcgccgcctccggccgctgcggccctcaccgctgtcgccgatgatgagcagcttgaagaggtggtcgtagtcccgggccatggcgggcgggggcggtgcgcgcgggcgggcggggtcggtactggcctcgcgatccgcagctcccttcgggctgctccggcagcggcggatccacttcccgaacaaacagccggaactgacagaaacacctccctccgctccccctcctcctcctcagcagccgccgccgctaccaccgcctccctccttcccgccccgccccaccactgcgcaggcgcagcgtctggcaccgccttgcgcagccgcagcctgagccggccgcgcccgggtcgcgcacgcgccctgacggagtcccagcaagcgcgggcccgtcttcctcgcgtctcctcggggagcgtcgtcgccgccaccctgggcgctgagagcttgcggagccgagccgctgtcgagtcccagcggaaagaagcccaaggtgccggagaagcccggtcgtggacgttgttgctccctcatcttcgagacccgcacgccctgcggagaggaaatgacaggcacgccgcgaccgtggggcggggctcgcacgagctccgggtttccagaggcaggggccggggccgtagaaggcagagtcgcgcggggaaggcccggtaccccgccccttccgcaccgacccctcccccgcggagctggccccggccccgggcctgtggagtggacgccgagggcggcgggcggcttccgagttggacagaacgggagctgccggcgggagcagagctgcgaggaggtggcctttgagggcagcgcggggtcgaaatcccatcccagcgctgtgacctcttggagcccacattgcctctttggtggaggggagggagtggtccagctccgagccgagcctgggagctgaatgacccagtgtgcaaggcgcacctcggagaccgaaagcaaccgctcccccggcttcaatttcacaccacctgcagatacacgtctcagaatctgcggctaggaagacctgggccgccagaagctaaacgtgtgcattttgtcatcagccccggtttctcgttttagagtgagttcccacctgccctacctaaactgacctgaaacggaaagttgtatgcccccacgaccatcctcactgcagaactgcagagggttttaagctccttattacctgtttcttataatcctgtccctttccaggcgagtatttatcggatagttctacttgttttatcaaacttccttttcttttgactttataaaaagcaatgccgggaggctgaggcgggagaatcgcttgaacccgggaggcggaggttgcagtgagctgaga

SEQ ID NO: 3242 - DNA, 6000 bp, Homo sapiens
aaaaaaaatagcagccagacgcagtggctcacacctgtaatcccagcactttcagaggctgaggtgggtagatcacctgaggtcaggagtttgagaccagcctgaccaacatggcaaaaccccgtctctacttaaacaacataaatattagctgggcatggtggcatatacctgtaatcccagctactcgggaggctgaggcaggagaattacttgaacccaggaggtggaggatgcagtgagccgagatcatgccacagcactccagctcccacctgagtgacagagcaagactctgtctcaaaagaaaaaaaaaaagccaggcatagtggtgtggtggtgtgtacacctgcagtcccagctactcaggaagctgaggtgggaggttcacttcagtccaggaggtcaaggctgcagtgagccatgatcgtaccactgcactcccagcttgggcaagagagagactcagtctcaaaaacaaacaacaacaacaaagcaaaactgttcaagtggcattgttccacatttttttaggtttctaatgtctggattcgcatgtcagctctgcatttggtctgttgtatcacatgtcatgtaggctctggcaaacactgtacagtcataagcaaatgaaagtgaaaaaggcaaatcacatcttagtattgtgaacatgttttgactctgaagatcctttgaaaaggtcttagggagccctgcgggtcctcagactacacttgcaaaaccactgatttaataatataaaggttgagtgagaaaattcctgctaaacggtttggagtcaggggaagaagctgaccctgagttagaccccaagtttggcccacaccccaaaaagtgaactcaagagagggttcaactaattgtatctgacattctgtccaactctcacactgtgtgtgtggcttcactttaattcaacaggtatcaagcacctaccaggcactgggtctccagaggatacagataaagagatggtccctggaatcatggaacttacattcacttgatttctgggggctacatcagggcagggcaaggcccactgccaagtctcttggtgtggcatcaggcttgcaggtgtgggagaaagggcccgtttccacttccatcagagggagacaccaggcatcatatcatatcctctcttccttccctcttggaccagtatgctgagtggtccccatcttgctcctaatttaaagtccctgtcggtcagtttacctgccttctctgagttctgattcaccacccactgcttccttcctggatgatcacagcacacgttccctcccttgctacctagcactcagcagctttgaagtccatgttgctgtctgaaataatggatttcacaggtccctccaacctccactgcactgatcttcatccctgacactgctacccttgagggcctgaggtccccctctcctttacccacttagccttctggttggtgacactttacttcccaaagctctttgaagcgcccttagctcatcttccctccaaatattcactccttattatttcctggctgctaatcctctgcttccactatcctgaaaaatacttcatgagccccactgctctcaccaccaagcattgtttctcttgtcatccactgccaaacttcctgccacctctgtggctccactgcctgcttctgcaaacctcagcgtgctccctgctttacttttctccttggacatacttggtgcctgtattctctatcagaatataagctctatgaaagctgggattttaaaattttacttactgctgaatcctcagctcgtagatcaatgtctggcatagtaggccctcaagtatttgttgaatgagtgaatgacttgttccccactaaactgtaaactccgtgaggacaggagctttgttttgttcatgttctagcctctgtgcccactacagtgcctaacacctagtaactgtgcaaatttttttttttttttttttttgagatggagtctcgctctgtcacccaggctggagtgcaatgatgcgatcttggctcactgcaacctccacctcccaggttcaagtgattctcctgcctcagcctcccgagtagctgggactacgggcgtgtgccaccacacccagctaattcttttgtatttttagtagagatggggtttcaccatgttagccaggatggtcttgatcttctgacctcatgatccacccgcctcggcctcccaaagtgctgggattacaggcgtgagccactgcacccggccacttaatatttactgaattaaggatgaatccagttaccaggtaaattacgtgatttttttttttggaagctgctttgtctagtttataagtttgcttattgtcttttgcatctgtccctgctgttaccttacacccaggcttcagcaataacctttaaagctctgcagctgaaatccatcctgcaccctgccagattacttcactaaaatattttgagattgcctctttgctcaaaaactttcaatgcctcctcatcgtattaatagtttctaatgtgcaaacaggtggtgttgcaaaagttcatctgtaagttagctgttcagagcagtggaacaaagtttcccattactggacacactgatcctttaggtcacacaagtttacatatgtatacagtgagaaggagaaagaaagcttaacataactcatcactgaactgtagtttaaataaatgtctaacaatgtttccagaagaaaatgtgctgattcattttgagatgccaggcacataccctggcctgcagggaattcccctccaagccaaatgatgattctcatagactgtgacagggactgtctaaatagacactcaaagctctcctattccagtgccatcatgacatctttatgataaaatcttctccccatcattctaactaaaagctatagctttcctcctctgaagtctagactgcatatctgacagcttttctatctactgtattgtcttatactttcaatttcctcatgagtatgtcttaactcttgatgaggctgtgaactggtgagaaaaggctctgttcctttttttttttttttttttttaagacggagtcttgctctgtcgcctaggctggagtgcagtggtgcaatctcggcaacctctgccacccgggttcaagcgattctcctgccttagcctcccgagtagctgggattaccggcgcctgccatcgtgcccggctaattttttttatttttagtagagatggggtttcaccatcttggccaggctggtcttgaactcctgacctcgtgatcctcccgcctcagcctcccaaagtgctgggattatgggtgtgagccacagcgcccggcctaaggctctcttcttataacctctgcaatccgtggcacataaacactcattaaatagttaccaaagaaatgaaggaatttatgccgattgctttccagatgacacatgcaggcaaagtcaggaatctggttttaatggccaatttggatttatttcccaaaaatatcctacagccttattatcaggaagctgccttgaaaatgtgtgctagagtctacagtaggaaatggctcaaagtatgaatcagtgcaaaatgaccttgagtaacattggttacagtctgtcacatgcctacatgtgccaggtaatttacaaacataactctaaaacaaccattctgtgaggaaacgggggctttgagatagtgtgatgtgacttacctaagatcacaaagcttttaagggatggaggccaggattccaaagctagcattggaacgaaagtcttcccgacaccagcccaggttgtgaagatgagctaggaggacctactgcctcgctggctggttagggctgggcgtgcctccctggtggaaggaaggtacataccttccttctccccctctatttcctaaaactgctgagtcagaggatggccctaaccttcccgaccaagggggactttctatcgggagcacatgagcagctcttctccctagccagtaccttcagattccaagctcatgttatttcgatatcaccacactgattctcagctcccggaaaaacaactcaaggcttgagtcagacactccatgtgttgttcaatgatcccgcctgcaacaatgtttattataaccaaaaaatataaacagcatgaatgtctattaatagcggagtggttaaataatagtacatccgatggttatcggatggagtaccataccacgcagatgttaaatgataaaagtgtactgttaaatagaaaaagcaaggtatgtacatatatgtttgtacaggcaaaggaaattcactggggggcacttattcattcaacaaatatgtgttaagcattttaaggttacctgtgaaactaacaggggttacctgtgaggagtgcttcagaaggaaaaatagtaacttgtacttttcagtaaacttctgcacataattttaaggacgaacattgttttttttttttgagacggagtttcgctcttgttgcccagaatggagtgcaatggcgagatctcagctcactgcaacctccgcctcccgggttcaagcgattctcccgcctcagcctcccggcattgctttttataaagtcaaaagaaaaggaagtttgataaaacaagtagaactatccgataaatactcgcctggaaagggacaggattataagaaacaggtaataaggagcttaaaaccctctgcagttctgcagtgaggatggtcgtgggggcatacaactttccgtttcaggtcagtttaggtagggcaggtgggaactcactctaaaacgagaaaccggggctgatgacaaaatgcacacgtttagcttctggcggcccaggtcttcctagccgcagattctgagacgtgtatctgcaggtggtgtgaaattgaagccgggggagcggttgctttcggtctccgaggtgcgccttgcacactgggtcattcagctcccaggctcggctcggagctggaccactccctcccctccaccaaagaggcaatgtgggctccaagaggtcacagcgctgggatgggatttcgaccccgcgctgccctcaaaggccacctcctcgcagctctgctcccgccggcagctcccgttctgtccaactcggaagccgcccgccgccctcggcgtccactccacaggcccggggccggggccagctccgcgggggaggggtcggtgcggaaggggcggggtaccgggccttccccgcgcgactctgccttctacggccccggcccctgcctctggaaacccggagctcgtgcgagccccgccccacggtcgcggcgtgcctgtcatttcctctccgcagggcgtgcgggtctcgaagatgagggagcaacaacgtccacgaccgggcttctccggcaccttgggcttctttccgctgggactcgacagcggctcggctccgcaagctctcagcgcccagggtggcggcgacgacgctccccgaggagacgcgaggaagacgggcccgcgcttgctgggactccgtcagggcgcgtgcgcgacccgggcgcggccggctcaggctgcggctgcgcaaggcggtgccagacgctgcgcctgcgcagtggtggggcggggcgggaaggagggaggcggtggtagcggcggcggctgctgaggaggaggagggggagcggagggaggtgtttctgtcagttccggctgtttgttcgggaagtggatccgccgctgccggagcagcccgaagggagctgcggatcgcgaggccagtaccgaccccgcccgcccgcgcgcaccgcccccgcccgccatggcccgggactacgaccacctcttcaagctgctcatcatcggcgacagcggtgagggccgcagcggccggaggcggcgcgggccctgccgggcgcggcccgcgggggcctcggggcggcaggcgggcggggaggtgccggcccgtg

SEQ ID NO: 3243 - DNA, 6000 bp, Homo sapiens
tatataattactatataccctttctaattcctgatttttccttattagttttaagcataaccattattttataatataaacatgtaattggttgcttaatatctgtctctcctgctagaatacaagctcttttggctaattgcttattgttttatccccagagcctaaaaaatatacacagtaattactcaattaatattatagtatctttgaactatcgttcagatattagtgaaatgaaagtgctcacaaatgcttgctgattttttaaagcccgattttggctggaatccctcatactttttgttaacaggtgggatgtattttgctgtaagatgcagaaaaccttaccaacacacacttaaattgaaagacaccagctgtttacttagccataagtccaaatgtgggcagttctaatgttggtttgactgtccaatgttgtcatgcaggacctaggttcttcccatcctcctccctggccatccgaagttgctggctttctacagtattgcaccataatgtcataatgcatcatagcccccaaatggaggccacattctcatatttcaatgtgtaaagcaggaagcaaagagagcgacatcagaaaacggggatatttcctcactcttgtcaatatcctagaaatccctccagccctagcagccttctccccattccaatgacaagaactgagtcacgtgcctacttttggactaaccgtgggcagagggaaagcaatgctattaaagtccaatcctgattcatcccagcttctttggcaaaaataaagggaaactgctgggtacgcaagcaacactgtgcctgctcttctgctttgttaaatgaaccacactgaagctctgttttccgcagaatcctctagctcttaagattcttcaggctttttcttttttctgcctacattttaatcattacgtcttttctttcagattttttttctgattaaaatggccttttgaaacatctactctctccacccatacgtttcttttattgagttgtttccatactcttaatttctgcattctaattccttttcttttcaaaagcactgagacatatcacattttttaaaggaagaacaaagtttattttgccccttcctttccactccacatatatactgcagattctcaactgtattaggagcctcacaggtcaagaaaccatcgtctgctctccttatacttgccagcagcgtttcacaggtgctaaatgtacttgacatgcccttcccctttatgtttaatcagaggcatgcaggctttaataagaagcattaggaatcagggttttacagtcgaaaagtacccctcgcattacaaacatcctctactaatttgtttctattaaattatctgcatatttgcttcttgctggtgtcaggaagtcccagaatacagtacctttcccacttcataccaccttttccaacaccttttacagaaagaaaggatggacttgggtttccacggtaacacaagtgcgataattgaaggtatctggctataggtgagataactccctttcagatttagtggagagaggagaaatgaagattttctttctttttattctcctggcaatgcactttggaaactaaagggatcctgcagtgtcagttactgcgttaagttttcactatcttacagatttacagctcttgggaataattcaaatttcttttatatcatttttattttttatttcccacaaacaaatgaagatataagttatttctataatcatctcaaaatagagtttatgctggcatcggaatgaacatgactaaggggttagaaaatagacatccatctcccacccaagtcctctaaattctctacacgtcctgacatcctttttatagcagctaatctttcacccaacatttcacctacaaccacaaatcaggtaagtaccatcatttaagccagaataggtgagaaaatatgctccgacctgtcatgtttcttttgcctcttggtggttaaaaatcaacctttatggtactgagcatgaaatctgaggcctgtcaatataaggcctgtaaataaatgaactgtaaccaccccaagggctgcagtctctataccccttcttatcaaaaacgtcagcattgatgagaggtcaggggaaatagcctgagaaatgtcacaaagctgtcctactctgtattatgctaaatggagtgactacggagcccactcactatttttgtgacagcttcaatccagagcttctcaacatctagggacctaggagtcatgaaaacagttacttaaggcaaccttctggaccccacaatcccaatacaaatttctcaaaaacattaatcactggaacttcattccttgcaaagtaaatggacttagagctcctttgtaatgcaaggtactagatgagttgtcatgatctagagagaaagcttcacgcttcctggctctatttaacaaccctaagaacttcttatcaccaagatgcacagttagaatcttaagacagtctgtctttccttggaaaagaagtatagcttctactaacccaaagtaaccatgaataagcataccaattttacacaaaatatgagacttctggaaagctaggtgaacaccatacttacctacatcctcttgaaacatccctgccaaagtagctcagatatgaagcatccatgtaagctctttcaattttaattcactatttcatgttaactagcctaggatgaaatagtagatcctcttcggttccagttcccttaaaacagtcctgattcttagtcctttttattaatataataccttcactgctgattctggtggctcagatagtaccattcatattttaatgatatgtaatcaagaaatgctgagttatattttactacatacacatttttaaattcagaggacatttgtccttgataattttaaatgaaaacttggtgtgtgttcattacagcaaggtaatgcaaatataagttatccattctaatataacgaagctatagggaaataagaaactactaaatttgagtagtctttgtagtagtttgactatcgacagaaaagatggtgaaagaatacctggcttttaactcagaccaaaatcccctctgcatgatgaccttgtgggaaagaggaacggggagaggtatgccaggctctaacaacagaactacagaaacgtgttattcgcaggaaatgtgcgacagtaacgaacaggtgagactagtttgagaaggacatagtttaaagaaagtaaactgaataaccagttactgcaaaaaataatgcaggaaagcttggggatgtatcgtctcctaaatttgacgttatgggtgggagaggatgtgtaactaagatgcaatgctagcgacagaacgctaagttttaaaactcaatagtgaaagaaaaaaaataatgttttgggaggaacgcctggaagacccatgcaactgctgcacgatgtttccttaaggaccggaacatttctcaccctgaagacaaaagtccctgtgttctcgattcagcccacatccctcagcaccatttccatgcccatcatttaggcagaatgccacggaggcgacgtgaaaagtggaattcatcattctggcttgcaacgcatcttgttcttttgccagaacagggcacagcaactggctcctcaatctctgcccctcccaaaccccagcagccggtccctgtctccatcccgccggcctcggtggcaaggggctcgcgagctctggttggcttggccgaagcttccgtcactcgccagctcacctacgattggttggcagagcgtgcgcgaagagccccgcctggcaaggcactgggaggtgggcttgcggatcctacgactagcgtttttctcgattggttgaaggagtaaaggcacgtggtatgggggcgctctcttattggtcgtgaatggtaccttgtggtacagagacgtgatgtggttggctagaatgaatcccagcttcccactagatgcccctagctggctgttgctatgaggagtccagggccttccggctgccgttcgggattccgctctccaggttttcaactcacccgtggctgacagggcgtgggaagagctcgacttcagttcggcaccgaaaggggcgggtctagaagaaatgtgggcgggtccagagggttggtgggcgggaccccggcgacgtcagcgggcttggacccgacttccgtggtgtgtggccgcctctgactcgcccctctggcgcgctgctagaggggggcgtcaccctcccatcaatgtcctaacgctccaaagcttcattttgttgcgtttacacaacttcagtcagaagcctgtaggtgccccccccttaaagcttcacatgctaatacaagataaaaccaaagctctaggagtgctgacagactgggtggcatcggacaaaggccctcgcggcccctcttgggccttgggcatctctccttcactccccgcctcaggataaagcttggaggtagctctagcccctctaccatctcatcccttccgaattcttaatgtctcgggagtctcaggttgacgctgctcctggcttgggcgggaactgcgcatgctcggtacacaggccctggggtctgactgggcgcgctgggttcggcgctgctcggcggtcgcggtgcttgtttatctccgcgcgggcagaagcttccgagccccgcaaagcctctcgggagcgctcgcggcccgtcgcctagggggcgggggcggggctgcgccgcgggctccgccccggccgccggaccccgcccctggccgcgctgcggctggggctcgggcgcgcgctcgagcgctgggggtagcggcggcggcggcggcggcggcgggcggggatctgggcgtggaggcgcgaggggcggggcgggcggcactgcgggcccgcggctcgggcggcaccagcggctcccggtctctctctctgctcgccctcagtcccacccggtgcctacggggccgcatcgccgcccggctcggcccggcccatgcccagggccgctgctccctcagttgccgccgccgccgccggcgcccagggggccgccgcggctgtgaggtgggggcggcagcgggaggcggcggggcgggccgccggggccggggctgggggcgcagcgcggccggcgtaggtctatgtcgcgggcggcggcggcggcggcggccgcggagggacgatgcgcgagtacaaagtggtggtgctgggctcgggcggggtaggcaaatccgccctgaccgtgcagttcgtgaccggcaccttcatcgagaaatacgaccccaccatcgaggacttctaccgcaaggagatcgaggtggattcgtcgccgtcggtgctggagatcctggacacggcgggcaccgagcagttcgcgtccatgcgggacctgtacatcaagaacggccagggcttcatcctcgtctacagcctcgtcaaccagcagagcttccaggacatcaagcccatgcgggaccagatcatccgcgtgaagcggtgagcgagggcacacgggggcttggcggctgcaccccggagtcaccgtcccggggctggaactccccgcgcggggctccggggaaggggctttctggggggtggctccaagctggaggctttactattgtcattctgctcctcctcctcaatctcaaatttgagtgctttgtttcacaactaaaatttggcatcgtgttagcccacagaacagctctttgtctcttggacgttgttagcattgcttgttacagagcccccaaggaaacaaagtttaaaacttgcaggggggaaaggggtggatagatttgtcttgggaagagaggaactgtgcaggtatagtcgagacatttgcagactgaacaacaacaatctgccttggcaatgtttgacagtaaaaatcgctcacacacctatacagtaaagtcaagtccagaggaagg

SEQ ID NO: 3244 - DNA, 6000 bp, Homo sapiens
tcacaaatgcttgctgattttttaaagcccgattttggctggaatccctcatactttttgttaacaggtgggatgtattttgctgtaagatgcagaaaaccttaccaacacacacttaaattgaaagacaccagctgtttacttagccataagtccaaatgtgggcagttctaatgttggtttgactgtccaatgttgtcatgcaggacctaggttcttcccatcctcctccctggccatccgaagttgctggctttctacagtattgcaccataatgtcataatgcatcatagcccccaaatggaggccacattctcatatttcaatgtgtaaagcaggaagcaaagagagcgacatcagaaaacggggatatttcctcactcttgtcaatatcctagaaatccctccagccctagcagccttctccccattccaatgacaagaactgagtcacgtgcctacttttggactaaccgtgggcagagggaaagcaatgctattaaagtccaatcctgattcatcccagcttctttggcaaaaataaagggaaactgctgggtacgcaagcaacactgtgcctgctcttctgctttgttaaatgaaccacactgaagctctgttttccgcagaatcctctagctcttaagattcttcaggctttttcttttttctgcctacattttaatcattacgtcttttctttcagattttttttctgattaaaatggccttttgaaacatctactctctccacccatacgtttcttttattgagttgtttccatactcttaatttctgcattctaattccttttcttttcaaaagcactgagacatatcacattttttaaaggaagaacaaagtttattttgccccttcctttccactccacatatatactgcagattctcaactgtattaggagcctcacaggtcaagaaaccatcgtctgctctccttatacttgccagcagcgtttcacaggtgctaaatgtacttgacatgcccttcccctttatgtttaatcagaggcatgcaggctttaataagaagcattaggaatcagggttttacagtcgaaaagtacccctcgcattacaaacatcctctactaatttgtttctattaaattatctgcatatttgcttcttgctggtgtcaggaagtcccagaatacagtacctttcccacttcataccaccttttccaacaccttttacagaaagaaaggatggacttgggtttccacggtaacacaagtgcgataattgaaggtatctggctataggtgagataactccctttcagatttagtggagagaggagaaatgaagattttctttctttttattctcctggcaatgcactttggaaactaaagggatcctgcagtgtcagttactgcgttaagttttcactatcttacagatttacagctcttgggaataattcaaatttcttttatatcatttttattttttatttcccacaaacaaatgaagatataagttatttctataatcatctcaaaatagagtttatgctggcatcggaatgaacatgactaaggggttagaaaatagacatccatctcccacccaagtcctctaaattctctacacgtcctgacatcctttttatagcagctaatctttcacccaacatttcacctacaaccacaaatcaggtaagtaccatcatttaagccagaataggtgagaaaatatgctccgacctgtcatgtttcttttgcctcttggtggttaaaaatcaacctttatggtactgagcatgaaatctgaggcctgtcaatataaggcctgtaaataaatgaactgtaaccaccccaagggctgcagtctctataccccttcttatcaaaaacgtcagcattgatgagaggtcaggggaaatagcctgagaaatgtcacaaagctgtcctactctgtattatgctaaatggagtgactacggagcccactcactatttttgtgacagcttcaatccagagcttctcaacatctagggacctaggagtcatgaaaacagttacttaaggcaaccttctggaccccacaatcccaatacaaatttctcaaaaacattaatcactggaacttcattccttgcaaagtaaatggacttagagctcctttgtaatgcaaggtactagatgagttgtcatgatctagagagaaagcttcacgcttcctggctctatttaacaaccctaagaacttcttatcaccaagatgcacagttagaatcttaagacagtctgtctttccttggaaaagaagtatagcttctactaacccaaagtaaccatgaataagcataccaattttacacaaaatatgagacttctggaaagctaggtgaacaccatacttacctacatcctcttgaaacatccctgccaaagtagctcagatatgaagcatccatgtaagctctttcaattttaattcactatttcatgttaactagcctaggatgaaatagtagatcctcttcggttccagttcccttaaaacagtcctgattcttagtcctttttattaatataataccttcactgctgattctggtggctcagatagtaccattcatattttaatgatatgtaatcaagaaatgctgagttatattttactacatacacatttttaaattcagaggacatttgtccttgataattttaaatgaaaacttggtgtgtgttcattacagcaaggtaatgcaaatataagttatccattctaatataacgaagctatagggaaataagaaactactaaatttgagtagtctttgtagtagtttgactatcgacagaaaagatggtgaaagaatacctggcttttaactcagaccaaaatcccctctgcatgatgaccttgtgggaaagaggaacggggagaggtatgccaggctctaacaacagaactacagaaacgtgttattcgcaggaaatgtgcgacagtaacgaacaggtgagactagtttgagaaggacatagtttaaagaaagtaaactgaataaccagttactgcaaaaaataatgcaggaaagcttggggatgtatcgtctcctaaatttgacgttatgggtgggagaggatgtgtaactaagatgcaatgctagcgacagaacgctaagttttaaaactcaatagtgaaagaaaaaaaataatgttttgggaggaacgcctggaagacccatgcaactgctgcacgatgtttccttaaggaccggaacatttctcaccctgaagacaaaagtccctgtgttctcgattcagcccacatccctcagcaccatttccatgcccatcatttaggcagaatgccacggaggcgacgtgaaaagtggaattcatcattctggcttgcaacgcatcttgttcttttgccagaacagggcacagcaactggctcctcaatctctgcccctcccaaaccccagcagccggtccctgtctccatcccgccggcctcggtggcaaggggctcgcgagctctggttggcttggccgaagcttccgtcactcgccagctcacctacgattggttggcagagcgtgcgcgaagagccccgcctggcaaggcactgggaggtgggcttgcggatcctacgactagcgtttttctcgattggttgaaggagtaaaggcacgtggtatgggggcgctctcttattggtcgtgaatggtaccttgtggtacagagacgtgatgtggttggctagaatgaatcccagcttcccactagatgcccctagctggctgttgctatgaggagtccagggccttccggctgccgttcgggattccgctctccaggttttcaactcacccgtggctgacagggcgtgggaagagctcgacttcagttcggcaccgaaaggggcgggtctagaagaaatgtgggcgggtccagagggttggtgggcgggaccccggcgacgtcagcgggcttggacccgacttccgtggtgtgtggccgcctctgactcgcccctctggcgcgctgctagaggggggcgtcaccctcccatcaatgtcctaacgctccaaagcttcattttgttgcgtttacacaacttcagtcagaagcctgtaggtgccccccccttaaagcttcacatgctaatacaagataaaaccaaagctctaggagtgctgacagactgggtggcatcggacaaaggccctcgcggcccctcttgggccttgggcatctctccttcactccccgcctcaggataaagcttggaggtagctctagcccctctaccatctcatcccttccgaattcttaatgtctcgggagtctcaggttgacgctgctcctggcttgggcgggaactgcgcatgctcggtacacaggccctggggtctgactgggcgcgctgggttcggcgctgctcggcggtcgcggtgcttgtttatctccgcgcgggcagaagcttccgagccccgcaaagcctctcgggagcgctcgcggcccgtcgcctagggggcgggggcggggctgcgccgcgggctccgccccggccgccggaccccgcccctggccgcgctgcggctggggctcgggcgcgcgctcgagcgctgggggtagcggcggcggcggcggcggcggcgggcggggatctgggcgtggaggcgcgaggggcggggcgggcggcactgcgggcccgcggctcgggcggcaccagcggctcccggtctctctctctgctcgccctcagtcccacccggtgcctacggggccgcatcgccgcccggctcggcccggcccatgcccagggccgctgctccctcagttgccgccgccgccgccggcgcccagggggccgccgcggctgtgaggtgggggcggcagcgggaggcggcggggcgggccgccggggccggggctgggggcgcagcgcggccggcgtaggtctatgtcgcgggcggcggcggcggcggcggccgcggagggacgatgcgcgagtacaaagtggtggtgctgggctcgggcggggtaggcaaatccgccctgaccgtgcagttcgtgaccggcaccttcatcgagaaatacgaccccaccatcgaggacttctaccgcaaggagatcgaggtggattcgtcgccgtcggtgctggagatcctggacacggcgggcaccgagcagttcgcgtccatgcgggacctgtacatcaagaacggccagggcttcatcctcgtctacagcctcgtcaaccagcagagcttccaggacatcaagcccatgcgggaccagatcatccgcgtgaagcggtgagcgagggcacacgggggcttggcggctgcaccccggagtcaccgtcccggggctggaactccccgcgcggggctccggggaaggggctttctggggggtggctccaagctggaggctttactattgtcattctgctcctcctcctcaatctcaaatttgagtgctttgtttcacaactaaaatttggcatcgtgttagcccacagaacagctctttgtctcttggacgttgttagcattgcttgttacagagcccccaaggaaacaaagtttaaaacttgcaggggggaaaggggtggatagatttgtcttgggaagagaggaactgtgcaggtatagtcgagacatttgcagactgaacaacaacaatctgccttggcaatgtttgacagtaaaaatcgctcacacacctatacagtaaagtcaagtccagaggaaggagacctttctcatctcgttaaaggtttatggttccaaggcgttttacaaaaattaagtctctaatttagtgcaaaactttaaagacagattattaaattatttgaagacatcataagctaaatggggtttcgagaatattaacagaggagtacaaataagccattcacaggaaaagaatgcagcttaactgtttgtttttgtttttttgtttttaatatagccgccttaaccccttccaaaaaaaa

SEQ ID NO: 3245 - DNA, 6000 bp, Homo sapiens
cagttttcagtatagccttcagtattcacgtagttaaaaccatcccaaatatttgtgtttgaacaacgttgtctgtgaaatggaactgcctaggtcatgagtgcattttggagttctgctgttgagtcagagcatgctggcagtagtggctccgcttgtagaagtgaaacctcctgcttatgttttggccccatgagatctcataagatttcccccaacatttttggctttactcctgatgcacactttcatatctcttaaagatcagcctgttggacgttattcttagaacagtgctaagcactcagcaattaacctagtcaatgatatgtgttgactgtgggtgtgacccaccatgtctgttgtgatttttaacttcagagtatcttaggaattatccagtccagctcattttatacttcaagaaactcaggaaaccaagattaggttaatcttctaaattcacagtactagctagaggcagccccttctgggacaggagtcctagtctgtttggtttcttttttttttaaacccaccatattgctaaaacagatagcaacaccagcttcctcatgcagtgcagtcatctactgtcaacacaggtcttggcttctttcccttcagcgtctcacccatctttcttaaggaggatccagatttctccaaatgttaccttcatatgggaccctattctgtcaccccaatccagagccttcttagaatgcctttcccacaggggccagtatattctctcgagtgcccgctgtttgggaatgcttgcttttctgctttcctaggcccccatcaccatggatgttcagcacagggactctggagaagcacctggttagtgtctggtggctgctttgttgtttttgactcccatcttttttgcctgtctcttcctccagcttcaccctcaactcggtttgccctcaggagttctttacctcctttgatcagtttctccggctccttcttcaccctttgtggcttctcaaggccacatcactagagttaggaggggaaagaagcaagcaccctccttttatctagtacttcatttttttcagcattatctcatttgccctttacagcaaccctgtgttaagtgggaacagatactcttactccctttttactatcaaagaaatgaaatacagatatgtaaaggaaatgatctcattggcagaactggaagcagagcctccaaatctgggtgtagaatcttttctactgtcccaaattttaacagagagacaaaatttatcaccgtctggtattctgaaatgtacataatttttctcaacatcgtactcagtttaaaaatcttctgaggatattaatgtggatttctctagtgtctttagaaacttgattttagaaaaggccactgacaagttagtgatataataaacaggtcctctgatactgactgcattttcatctacatttaccagttattaaatgctgttatatgtggaactgtgtttgcaatattttatttactgttttgagaattaggttgatggtaagatttattcaaattcttgattttaataatgtatcaatacaacttaataatttgatttatttgcaagttttgaaaatccacatattctagtagatcctgaacttaactaaaagtgtaagaaatatttcacatataaaacatgatacaggctgggtgcggtggctcacgcctgtaatcccagcactttgggaggctgaggcgggcggatcacgaggtcaggagatcgagaccatcctagctaacacgatgaaaccctgtctctactaaatatacaaaaaattagtcgggcgtggtggtgggcgcctgtagtcccaggtactcaggagactgaggcaagagaatggcgtgaacccgggaggcggagcttgcagtgagcaaagatcatgccactgcactccagcctgggagacagagcgagactccgtctcaaaaaaaaaatatatatatatatatatttatatatttatatttatatatttatatagatatttatatatttatatatatttatatatatatttatatatatatttatatattatatatattgtatttaaacattctttaaaatatttatcatttatctcaactaatagaaagtgatcttatcactttttattattcatagacagactgaaatttgttttaacttaaattcaaccaatgttttacttaattttattaatgtttttaagttactccactgtcaagcaaagcattttaaagtacactgtgatgtatatactttcataagaaaaacgaaatgtaattacattttgcaagtaacacaaattggaagctgacattgtcctgacatggctggcagtgtctgctccctgccaagcttctctgtatagccaatcaagagagtttatatgcaaagtagcaaatacatggtgttttgtaatgcagctttattctcactgccacttgccctcctagaggccatgggatgcacaaattgtttgtatgtaagagtcctagaagatgttaaaaacccttgtgtcttatgttcagagctgtcagcatgatctaaggcccgaaatcgtaaggtacagtagtgtacagtaaatttatataaagtcctttgatataaattgaagttgtccaaattcatttcctataaaatgataatatccaaattctaggtttgcctttgatgttgttccttccactcatttttaagttgttttcatgtttcacattgccaaatggcacactacctggagtatgccctcttgttgagaccattcttagtttgatatagtgtcaaagaaaaaaagtgagaatgttgggaatttggtttgctttacaagttaggatgagtggagagaaccctcttgacaggatgaagaaatctgtggaagtatcatagcgaacaataaccacctgcctattatccagtttcctgaatgataaaaattgtctatgcatcctgcctcaaaggcttgaccatggggtggttttctcttctgacagatttagctgtttccagtcacatttgttatcacttttgtgcgatcttgctgtttagctcctttaaatcagaaatacattctgcttatgggaagacacacacacacaaacacacacacacacagatttatactaaaatcacaaaaaccttttaaaatgtcttgtgaaaatatattagctatctttcttagaacaaacataaagaagaatagtaaataaatgtgcagtccagcaccagtgttgacatctgttgtgaaatgtgctacatggagtaaccattgtagagacaatcatcttaggcaccaaaatgacttaggagcttctttctttgttctttcttatcacttactatttttattagtttagctttttccaaacgtgtttactcagagatacctattttagttaggaagaaaaagagaaataacaccaattaaagctaattgaggctgaattcttgtcagtcttaaaagaatcctaattgtttctctttgaactgactaatccataaaagttttctgaagggatggggtgtggttgtatttgatagcttccatttggatgatttctactaccttttttcttgtttgagaactattagaacgaacatgatcattttttcaagctggagtgcggtggcacgatctcagctcactgcaacctctgcctcccaggttcaagcgattctcctgtctcagcctcccgagtagctggaactacaggcacctgccaccacacccagctgatttttgtatgaacatgatcaattttatacacatagaacatagtaaaatgctgataattataagttgtttgtttactcattgtagctatttactgtgtgatcaactgtgaaattttgtgcaaccctctctcagaatggaaaaaaaagaggatttagtctgagtttctgagaataattttccaagtatatctggaaaggtaaattgattttaaaggatatataattgattaattaaaacatcatttcataaaactcattttatcatccactgtgagagcagcttcaaatgccctcagatctaagtatcaagccaagtggtacaaatcattttcatgcaactgaagataccatttatgttggaatagcccccaaaaacgaaaatacacgtgacctgtttaactttgtgctaactgttacaatgtatgtgtgttttgtttattctctcataggtatgagaaagtgccagtcatcttggttgggaacaaagtggacctggaaagtgagagagaagtatcgtccagcgaaggcagagcccttgctgaagagtggggctgcccctttatggaaacttccgctaagagtaaaacaatggtggacgaactctttgcagaaattgtgaggcagatgaactatgctgctcagcctgacaaagatgacccatgctgttctgcatgtaacatacaatagcatccaaatatggctgtcctggatgggatttgcccaatgtcgtaggtgatagaaaactcgcctactccactgcagaacttgcagaatgcgtggtgttaatctacagagaactgcagcccttattcagaattgagcagtgattgtcagttgatatctctgagtaacatttgggttcagtaactacagttttcaccatttgtcctcagtctcctttatgcatctgcaactttaaggcatagtccatcgatctacagggtgatctcatttgaaagctatgatggcattgtcgctgagttgacagaagcaactattgtacaaattaaaaataaccataagggagaaaccagaagaattcctctgaccacttacaattaaaatattttgtcttctttaaaaaaataagtaaaggagaaatattttcctacaagagtactgaatttcaggaaatgggatagagcttctaaccaatgtattccgtcaagtaagataataacagctgacctgccaacagcattacagggagattctttgctcagctaacacatttctgtttttcaaaattgatgcttaattgtagctgttattctaatttgtgacatggaactaactcatgcttcaatccttgatagagcaaaactcagaacaggttatgtaaaaatatagtctggctttagaatttgttaattcacctgctttgccacagaaaatggaggctttcacaagggtttgatcagaattaaaaccccaaacccgccctctgttaggggtggtctttataactttactgaacaagagggaagcaactgtgatgggaagagattacctagccttactaacaagaagcattctaatagataaactagtaccatcatgtaaggaagatgaagccatgttgcatccacatgttcccgtttgcagaaacctcacaggacagtacgaatatctggcatttttaagttcattaaagcagcaaattccttctcgcctttaagggctatggttgtagtgtgacccgtggctaacctgctttcaaaatcaagtatttgctgtagcagagctttattgcaggcattttaaaaattgaataaccatgtgaaataatttgggcttaaaagtgaacataaattatagagtggaaggtaagggacaaaagccttttacctttaattttcctggagaattatataaaggttttcttagaacaattttgccctgattactgaagcgtcaaataaagctggagtgaaaattttgttttgaaaaggtgctcaagctctgacatttttggttttcatagtcgtgaagtatttatcatttgcatgactaatggcacaggaaaaacctattcataagttttacaatcaagtatagaggggtcttcagctaacttagttatacataaatgctgaaaagattatcttgagctgggccttgggagaagaatttggccttcagaactgcaatatcactgagcctgcgatctatacaccaccccacattttgttggtttcacagtcttgtgcaagtaacctctggtcttacgtgtgtaactgag

SEQ ID NO: 3246 - DNA, 6000 bp, Homo sapiens
cccccatcaccatggatgttcagcacagggactctggagaagcacctggttagtgtctggtggctgctttgttgtttttgactcccatcttttttgcctgtctcttcctccagcttcaccctcaactcggtttgccctcaggagttctttacctcctttgatcagtttctccggctccttcttcaccctttgtggcttctcaaggccacatcactagagttaggaggggaaagaagcaagcaccctccttttatctagtacttcatttttttcagcattatctcatttgccctttacagcaaccctgtgttaagtgggaacagatactcttactccctttttactatcaaagaaatgaaatacagatatgtaaaggaaatgatctcattggcagaactggaagcagagcctccaaatctgggtgtagaatcttttctactgtcccaaattttaacagagagacaaaatttatcaccgtctggtattctgaaatgtacataatttttctcaacatcgtactcagtttaaaaatcttctgaggatattaatgtggatttctctagtgtctttagaaacttgattttagaaaaggccactgacaagttagtgatataataaacaggtcctctgatactgactgcattttcatctacatttaccagttattaaatgctgttatatgtggaactgtgtttgcaatattttatttactgttttgagaattaggttgatggtaagatttattcaaattcttgattttaataatgtatcaatacaacttaataatttgatttatttgcaagttttgaaaatccacatattctagtagatcctgaacttaactaaaagtgtaagaaatatttcacatataaaacatgatacaggctgggtgcggtggctcacgcctgtaatcccagcactttgggaggctgaggcgggcggatcacgaggtcaggagatcgagaccatcctagctaacacgatgaaaccctgtctctactaaatatacaaaaaattagtcgggcgtggtggtgggcgcctgtagtcccaggtactcaggagactgaggcaagagaatggcgtgaacccgggaggcggagcttgcagtgagcaaagatcatgccactgcactccagcctgggagacagagcgagactccgtctcaaaaaaaaaatatatatatatatatatttatatatttatatttatatatttatatagatatttatatatttatatatatttatatatatatttatatatatatttatatattatatatattgtatttaaacattctttaaaatatttatcatttatctcaactaatagaaagtgatcttatcactttttattattcatagacagactgaaatttgttttaacttaaattcaaccaatgttttacttaattttattaatgtttttaagttactccactgtcaagcaaagcattttaaagtacactgtgatgtatatactttcataagaaaaacgaaatgtaattacattttgcaagtaacacaaattggaagctgacattgtcctgacatggctggcagtgtctgctccctgccaagcttctctgtatagccaatcaagagagtttatatgcaaagtagcaaatacatggtgttttgtaatgcagctttattctcactgccacttgccctcctagaggccatgggatgcacaaattgtttgtatgtaagagtcctagaagatgttaaaaacccttgtgtcttatgttcagagctgtcagcatgatctaaggcccgaaatcgtaaggtacagtagtgtacagtaaatttatataaagtcctttgatataaattgaagttgtccaaattcatttcctataaaatgataatatccaaattctaggtttgcctttgatgttgttccttccactcatttttaagttgttttcatgtttcacattgccaaatggcacactacctggagtatgccctcttgttgagaccattcttagtttgatatagtgtcaaagaaaaaaagtgagaatgttgggaatttggtttgctttacaagttaggatgagtggagagaaccctcttgacaggatgaagaaatctgtggaagtatcatagcgaacaataaccacctgcctattatccagtttcctgaatgataaaaattgtctatgcatcctgcctcaaaggcttgaccatggggtggttttctcttctgacagatttagctgtttccagtcacatttgttatcacttttgtgcgatcttgctgtttagctcctttaaatcagaaatacattctgcttatgggaagacacacacacacaaacacacacacacacagatttatactaaaatcacaaaaaccttttaaaatgtcttgtgaaaatatattagctatctttcttagaacaaacataaagaagaatagtaaataaatgtgcagtccagcaccagtgttgacatctgttgtgaaatgtgctacatggagtaaccattgtagagacaatcatcttaggcaccaaaatgacttaggagcttctttctttgttctttcttatcacttactatttttattagtttagctttttccaaacgtgtttactcagagatacctattttagttaggaagaaaaagagaaataacaccaattaaagctaattgaggctgaattcttgtcagtcttaaaagaatcctaattgtttctctttgaactgactaatccataaaagttttctgaagggatggggtgtggttgtatttgatagcttccatttggatgatttctactaccttttttcttgtttgagaactattagaacgaacatgatcattttttcaagctggagtgcggtggcacgatctcagctcactgcaacctctgcctcccaggttcaagcgattctcctgtctcagcctcccgagtagctggaactacaggcacctgccaccacacccagctgatttttgtatgaacatgatcaattttatacacatagaacatagtaaaatgctgataattataagttgtttgtttactcattgtagctatttactgtgtgatcaactgtgaaattttgtgcaaccctctctcagaatggaaaaaaaagaggatttagtctgagtttctgagaataattttccaagtatatctggaaaggtaaattgattttaaaggatatataattgattaattaaaacatcatttcataaaactcattttatcatccactgtgagagcagcttcaaatgccctcagatctaagtatcaagccaagtggtacaaatcattttcatgcaactgaagataccatttatgttggaatagcccccaaaaacgaaaatacacgtgacctgtttaactttgtgctaactgttacaatgtatgtgtgttttgtttattctctcataggtatgagaaagtgccagtcatcttggttgggaacaaagtggacctggaaagtgagagagaagtatcgtccagcgaaggcagagcccttgctgaagagtggggctgcccctttatggaaacttccgctaagagtaaaacaatggtggacgaactctttgcagaaattgtgaggcagatgaactatgctgctcagcctgacaaagatgacccatgctgttctgcatgtaacatacaatagcatccaaatatggctgtcctggatgggatttgcccaatgtcgtaggtgatagaaaactcgcctactccactgcagaacttgcagaatgcgtggtgttaatctacagagaactgcagcccttattcagaattgagcagtgattgtcagttgatatctctgagtaacatttgggttcagtaactacagttttcaccatttgtcctcagtctcctttatgcatctgcaactttaaggcatagtccatcgatctacagggtgatctcatttgaaagctatgatggcattgtcgctgagttgacagaagcaactattgtacaaattaaaaataaccataagggagaaaccagaagaattcctctgaccacttacaattaaaatattttgtcttctttaaaaaaataagtaaaggagaaatattttcctacaagagtactgaatttcaggaaatgggatagagcttctaaccaatgtattccgtcaagtaagataataacagctgacctgccaacagcattacagggagattctttgctcagctaacacatttctgtttttcaaaattgatgcttaattgtagctgttattctaatttgtgacatggaactaactcatgcttcaatccttgatagagcaaaactcagaacaggttatgtaaaaatatagtctggctttagaatttgttaattcacctgctttgccacagaaaatggaggctttcacaagggtttgatcagaattaaaaccccaaacccgccctctgttaggggtggtctttataactttactgaacaagagggaagcaactgtgatgggaagagattacctagccttactaacaagaagcattctaatagataaactagtaccatcatgtaaggaagatgaagccatgttgcatccacatgttcccgtttgcagaaacctcacaggacagtacgaatatctggcatttttaagttcattaaagcagcaaattccttctcgcctttaagggctatggttgtagtgtgacccgtggctaacctgctttcaaaatcaagtatttgctgtagcagagctttattgcaggcattttaaaaattgaataaccatgtgaaataatttgggcttaaaagtgaacataaattatagagtggaaggtaagggacaaaagccttttacctttaattttcctggagaattatataaaggttttcttagaacaattttgccctgattactgaagcgtcaaataaagctggagtgaaaattttgttttgaaaaggtgctcaagctctgacatttttggttttcatagtcgtgaagtatttatcatttgcatgactaatggcacaggaaaaacctattcataagttttacaatcaagtatagaggggtcttcagctaacttagttatacataaatgctgaaaagattatcttgagctgggccttgggagaagaatttggccttcagaactgcaatatcactgagcctgcgatctatacaccaccccacattttgttggtttcacagtcttgtgcaagtaacctctggtcttacgtgtgtaactgagagaagagtgtgtgtttgtgtgtgcatgtgtgtttattgttcctaagaatttggcacaagtcagagataattgcctatactaagaatctatactgcagaatatagtgtatcaaaaacttttttcttttaaattattaaagtgtcttttatacttttatgaaatcattggtagccccccaagtgtttaataactggcattaagcttagagggtgaaaaaaaaaaaaaagattgatagtatttttcataatgaaaaaactgaagagatacgtgaatgaaaccaggccatagctgtcataaatctttgacttttgaatatttacattcttcagtataattttttataatcctcaattatgaaccaccttgtttataggacaaaaaaatttaaccaattttattgaaacgaatttcactgtgtaaaagttggtttgattcaaacatgtagagaagttgtagattcaagatatatgatttctctatggaaataaaaatatttgttagtgaattggttgagttttgattcctctaacttctcagaatgattctttagaattctataattcatagcaatttttgacaagtaagattgcaaaatagaaatatctataaagattccacagtttgacattatggcttgctatgcagatgtgaaaataggttaaataatatgaaagatatggcagaatgtaaagtggaaaagatgacctaaaattttgagttgtattaatagttaaaaacatttgtgtcagatgacagggtgggcttttactgtcaagacatgaataagaactgatctggctg

SEQ ID NO: 3247 - DNA, 6000 bp, Homo sapiens
aggataatttttatgataaacagaaaatgaaccgaaggaaggcaccagtattgaatcaaacgaaaacagtttctgaaatctaagaagaaatggtgcgggcagattgttgatgtaagtccttacctcattctagcactcgctgaaattctatctttgtcgacatcctgtttaaaatggagccccctgccaccgcctcagcctgcattcctcccgtctcctcctcccttttcttcatctagcgtttaatcaacaccaagggtgctatatcctgtgtgttgctgtgtattttgttggctctttctcccagcaggtgctgaggcccaggatgctgtcagtttccctcactgctctatttctgggttgggacttaagagtagaatgggcgcttttgctcctatctgctgaatgagtacataataaatggataatacattttttttttttttgagccaaagtctcgctctgaccaccaggctggagtgcagtggcatgacctcggctcactgtaacctctgcctcctggattcaagcgattctcgtgcctcagcctcccaagtagctgggattacaggtgcctaccatcacgcccagctaatttttgtacttttagtagagatggggtttcaccatgttggccaggctggtctcgaactcctgacctcaggtgatccatctgcctcagcctcccaaagtgctgggattgcaagtgtgagccaccacacccggcctatattttgtttttaagaaaggaggaaagtagcttaaaagagagttgttctacaacaaagtgtctaaaaatgctccttagccattttgcaaaatctaagagaaacaatcatattttcttatttctttaatgagactgttaatggtcacagaatttctcagtttgcatctcttttaaaaaaatgaactacataattttcttggcctcacagcacatttctttgatgaaactggaaaattaagtaccctgttaagccagtggtttaaactagacagaataaacatctaacttggccctaagcagctggtttaaatagacccttaaccctatactacctccttcctcaacactgcttcctgcaggtgaatacggtgatttacagcctttaagacatttttataaggagtggctgaaatttgatatggagacattctcttggtttagttttcaaagtgctggaaaattcctttaactttttcaaccaacttgctcggtgaattccaggtgccagtcactggggtaggtgcagggaacagtccctccctccacaaactctaaaagcagcagtgtttcaggtggtgtttcagttcactagcgaatttattaaaatgtgtattgattgagcatcaattgccttccagggccaggtacttgggagacataagagaaacaaaacacaaagattcctgccctcatgaggcttcttcaaacatttactgagtagaagaatgtgctgagaaagggacaaggcactgggtgaggtgttgaatgaggttaggacctgctccctgaccctagggaatttttaaattactagagatgatgagagtcaaatgagtccgttagtcattgtcaggggctaaactgcatcgaagaggccagcagggtggtagaaactcatatgaaggagcaggaaaggtctccccagagggagaggattagaagggggtgtgcctgggctgcacctcatggaatccctgagtcctgcacagaattccaaacctgcacagatgaggggttggagggcttttcaagtgggcaaactcagtgagcaatgaagtggagaatagctggtcatgatatgcttacaggatgttgcttctggcctcaccagggaggggaattcattcattcttctgcgactcagtgccttcttcagtgcccattgtgtgctaggtgcagtggtgttcaccaggcacagtggtgaacaacacagaagaagctgcttccccatggagctaacaccctagagaaggaaactgcaccatcaaacctgtaaataagccacacacagggcaacaggagctaaaggaggcgggagagctactgtaaaaagggtggtaagtgtgtgtgtgtgtgtgtggcggggggcaggatttggacttgtggagatagaaagtagggagccgtggcaggtctctgggtagagaaagcagtggttatgaaaggttagtctgacagtgattgggacggcaggagcttggagttaaggagaccaaataggagtggattctaactatttaggtgtaagaaggttccagacaagtgggcgtctgtgggaaaagagagagaagatgttagagggatttatttagaagggaaaatccattgggcttggtgatgaattggatatggttataaagaaggtgaaagaatgaatgactctgcatttacagaagggcagatgaacgatgtggtgggttgccatattgagacatccatgtagaaaggcttagtaggtggatgaagaaatggacaaagagctcaggtgagagaagcagacagggggtaaaatttggagaatcaaaaagcatgctccaggaagtgattaaacttcctgatggtaaaaaagtagaaagaagtgtaaaaattctaggtgagccttgaacacccgctgaataaatggagaggtataccatgttcataaatgggacattttaatattataaagatatccactcttcctaaatttaactatatatgtcattaatgtgtttcctgaggttagatacattgattccagaattcatatggaagtgtaaatgttccagaatagtcaaagcaactttggactaggactacaggtgcacaccaccatgcatggcaaattttttctgtaattttcatagagacgggggtctccctatgttgccaggctaatcttgaactcctgggctcaaaggatccatctgcctcggcctctcagagtggtgggattacaggtgtgtgccactgcgcctggccaacaggcaccaaacctgactcatgtttgtgtcgtcccaggccaggcactgtagcttgtgtgaaaattgtcagaatcgaaatggagccgctaatgttaagaaaaccctgacaaacagagccggggaaggccatgaagagagggttcttgcgcgtgcatgcctgataacaaaaaggactctctggaaaaaccgcaaccttgcacaaaggccactgcaatctcccacaaaaaactagtcctgcaaggacatggcccagccactggctgtcctactttgaactggcatcgccttcgttatggatctttgtagccacagataattattttcaaacaattgtgcaatccgcctcattttttttaaagcctttgctttccttgcctctctgaatatgcacaagtttaccatggcatgcatatttctactgcaaagctctattgcaaaataaatatctgtttcttttagagatcctctctgttatttaggttgtcacttgcatgcaacaggcattgaataaatgctgaattgacttaaatttgttctgaggatgaggcagtgctggctgagaaggagccggggtctcctggtgcgctttccacgccccagaaggtccgcttccacctcagccccacactgctcggtctcagcaacctgacatgccagggctgagcaggtacgaaataccttggcattcctgccttgtcggagtctcagggcacctacgaaggaggcaacgggcctatttccctttacaggacaccttcaggacacgggttttaacctgctcagggtctcatcgcctttcccagccaggccagcggccagagtgacactgtcccccagggtttaacttagagtccattctacctctcattttctctaaaaaaccccaaccaaccaactaaccaaattctacacgctgcatattttaaaagcatttcaaggtttatcctttaaaacggaaggaggacctgggaggccgaagcgggtggatcacgaggtcaggagttcgagaccagcctggccaacatggtgaaaccccgtgtctactaaaaatacaaaaattagccgggcatggtggcacatacctgtaatcccgcctactcgggaggctgaggcaggagaatcgcttgaaaccggaaggcggaggttgcagtgagccgagatcgcgcactgctctccagcttgggcaacaacagcaaaactccgtgtcaaaaataaaaaaaaaaaaaaaaaaagaaggaggaaatatttctcaagtagcgactgcaacttccatagtcaaattttcattccaagctataaatggagatgactgtccacttttcaggacaaaaagcttcttgcaaaagtagaagagcaaaagcaaaatcctccactagaaagcgcccccatctctaatctgtaacagtgagagcctcaggacgagttccgcagacgctcatttaaagcaaactttttcaatgaccttgagggtggctgtacttacacgcggagaagcaaatcgaccgcagctggaaaggcgctgggtcgagcgtgagaggaacacgggttttacctaagggagagtggaagagagaagggggttccccaagggccccggccccttcgcctcgttcgggccccgcggccaagctcctcgcaccgcagccccggctgtgcagaagcggaggggcggaaggtgctctcagaactttcattttccaccctgcagcagtcccgagcctcggctggagaactcggatgcttgcgaaacggcgaggtccagcaggggcgggacgggggcggtgggcggaggaggatagggcggggccgcggcggtgaaagggcccgggggcgggggcgggggcggggcgaggcgaggccgccgcggtccgggcccccgacgtgggctccgtgctctgcacccagctccttcccgggcgcgcacacgcgcttcctctcttgagctcccgggcgtccggaggcgaaggtcccggagcgttcacgagaatccgggtcccggcgagtccggggtccgctcctccagctgcgcccagggcgcacgagccggccagcctcggggagagggcgcgggggcgctgggggttcttacgggaagatgaggaagcccgacagcaagatcgtgctcctgggggacatgaacgtggggaagacgtcgctgctgcagcggtatatggagcggcgcttcccggacacggtcagcacggtgggcggcgccttctacctgaagcagtggcgctcctacaacatctccatctgggacaccgcaggtgaggccggcgccgcatgagccacaccgccctggggctccgccggggacggggggcgcggggcttccagcagggcacccggccgcgcacagggtcccggcctcggacagcaaatgcctccttctcggggtttcccactcgtcctcccttgctggttgggctgagcgctgcctctcagccactcagtgacctcagggacaacccaagttgcagagaacccgctggtcatttgtgtacctaagctgcctttgctcccgagccccgcgttcctgctctgccgccctgggaaccagagacgctcctctgtggctgctttgttaggtattttcagttttcacgtacccgtaggaacatgatatcctttgagattcacttgaggggtgagcagagctggtgttattagcccctttctaagaaaaagtaaaatgaggcacagagtgttcccccctgttgggtttagtcaggagagaggaaataaaactggagcctccggacctcttagcccggagcatatctgccttttacagttaatcttctgcttgatcttggctcagatacgtcatatgggtttgggttggagtgacttccggtggaagcatttttaagataggtaatgagttatttttattgtgtagtatttgtgacttttcaaaagtacaacttagaggatctcaattcaggctttctgtttaactttggaaaataacactggtgattgtagcattgcaatggaatatatttccttctccttacaaaagaa

SEQ ID NO: 3248 - DNA, 6000 bp, Homo sapiens
tggaatttacctggtcataggttaggggggcatgtttatctttagtaggtactgctagttttccagtggctcaattaacttacactctcactagcaataattaagttatccacatccactgggcaaggtggctcacagctataatcccagcactttgggaggttgaggcaggtggatcacttgaggtcaggagtttgagaccaacttggccaacatggtgaaaaccggtctctaccaaaaatacaaaaattagccaggtgtggtggcacatgcctgtaatcccagctactcagaaggttgatgcacgagagttgcttgaacgtgagaggtggaggttgcagtgagtcgagaccgcaccactgcactccagcctgggtgacagagcaagactctgtctcaaaaaaaaagttatccacatccttgccaactctcactggcaatttggacgtcttcttttgtgaagtgactgttcaaatcttttgcctccttttattttatttttttgagacggagtttctctcttgttgcccaggctggagtgcaatggtacaatctcagctcaccacaacttccacctcccaggttcaagcgattctcctgcctctgcctcctgagtagctgggattacaggcatgcgctgccacacccggctaattttgtatttttagtagagaaggggtttctccatgttgctcaggctggtcttgaactcccgacctcaggtgatccactcgcctcagcctcccaaagtgctgggattacaggcatgagccaccacgcctggcctttgcttccttttaaactggattctttcttttactctgcagaagtacttgatatattctgaatatgagttagatatatgtattgtaaatatcttctcccagtctgtggaatgcctatttgttaatcatgttttttgatgaaaggaagttcctaattacagtggagtccaattattcattttttttaatggttagaactttttatgggcaactacttttttgggggagggtcggcaaagtctaaaaatttcctctcttgtaaaaaaaaacttttttttaatattacctttacctacttctaagatatatttggaatggctcacagtaaaaccataaccccattaaaataaaagttataaacaaccattaccaccgctaccaagggaaagggaaggtgtagaagttgtaatgagaaaatggagaactgttaacaatgacaggagccttaggcaaaggaagctactgaaattgagcctaaaacttagctatcagtttcttggcaaaataaaataagatttcttaagtcacaaaaacaaaaacaaaggacagattcaaacctggaaagtttctttcttttttattataatattacttgttaatactttaaatttacttttcttcactatacaccatgattcttcatgggaagtttcttgatgtgaaaaggaaccacttctgtcctggcatggtggctcacacctacaatactagtactttgggaggccaaggtgggaggatcgcttgagcctaggaatttgagaccagcctggacaacatggtgagatcctgtctctattaaaaacaaaagcaaaagcaaaaaggaaccacttttttaaatgtggctacctcttgattgttcaacttcataaatggggtagagaattaagaacagtgggtaaacttgaaagctacttgtatttaattttaaaatgcactttctcatgaacgaggccaacgtaaaatttataacactctaaataacaaaatttaaactgtggagacctgattgaggagaaattgggaatttcatgcaggtaagtccaatgtgagatttgcaacactcaaataatgaaatttaaaaatgaagatctcacttagaagaaaatggcaactaagagtgcaaagcaccaagcagattttagctgtttttgtttgtttgtttgagatggagtctcactcgttcacctaggctggagtacaatggcgcaatctcggctcactgcaacctctgcctcccaggttcaagcgattctcctgcctcagcctcctgagtatctgggattacaggcgcgcaccaccacacccggctaatttttgtatttttagtagagatggggtttcacatgttggtcaggctggtctcgaactcctgacctcgtgatccgccctccttggcctcccaaagtgctgggattacaggcatgagccaccgcaccccgcctcacctgtttttttaaaattaattattattatcttttatagagacagagtttgatcacgttgcccaagctggtctagaactcttgggctcatgcaattctcctgcctcagcctcccaaacagttgggattactggcacgagctactgtgctgggcccagatttaggttttatatcatttcaaagtttgctgcatactagattcacacttatcctgcttatgagaataataaataaaagcaacaaaaaagttaaactggcactgggcacattggctcatgcctgtaatcctagcactttaggaggctgaggcgggcagatcacttgaggccaggagttaaagagcctgggtaacagggtgaaaccccgtctctacaaaaattcaaaaaaaaaaaaaaaattagctgggtgtggtggcgcacacctgtattcccagctacttgggaggttgaggcaggagaatcacttgagcccaggaggtggaggctgcagtgagccaagatcgtgctactgcactccagcctgggctacagggagactgtctcaaaaaaaaaaagaaagaaaaaaaaagttaaactagcaactggcccttgtcaaccccattttcatccatgaaaacgttaggattataggataagcccatgcaacagccactgacaattcttggtaaaaaaaactgatgcaaatggtccacaccacttttgaaaataaatataaaagtcctcaaaaaatggcagatggttcaagacttcagtttctcaaagacagaaatttttgtctgttccaccattctcttttgcctctcccaaacaagtgatacatatctatattatgacaatatttcaaccaaacttttttaacgaacacttcagggtttcatcataacctttacttctactttaaaacagcataagaaactataattacagctgtttgacagctggggaaactgtgacatacaaagatgaagtaatgtgcccaacgtctgagtcactggcaaattgaaacacatgtcctactcaactcttttatattctctagcagctatttcctttcctcctgacattagcaaaacaagctgacaccatgtaggtaaaggtaaccacaaattttttatcaaagtaggaaatttaggccgggcgcaatggctcaggcctgtaatcccagcactccgggaggccgaggtgggtggatcacctgaggtcaggagttcgaaaccagcctggccaatatggtgaaactgccatctctactaaatatacaaaaattagccgagcgtggtggcgcacgcctgtaatcccagctactcgggaggctgaggcaggagaatcgcttgaacccaggagacagaggttgcagtgagccgagatcgcaccactgcacttcaacctgggcgataaagcgagactctgtctcaaaacaaaagaaaaccaataagctcctcccctcaaccccaatttcttcagctgctgaaacattttctttccactgcgatcccctaagattactgtagctatttctccccagagaaaggagacaattccactctgtcttctaatccagaatcccttttctctttaaacaggttatctctttccaataccttgctttctgatgacagcaacttcccaagacttccccagatagtccccacaggctctagaagcaaccgccacttttctctaaacaccaattgcggcccttggttcccagcccccgtccccggagtccgtgctctcctccccactaccctaccccaccgctgcctcaggccctacccccgcggcgtcggcagctctggctcacctcggcccctgacaggaaggggtgcgaaggccctgtgatcgtcaggtaattgtcatttcctccgggaaactggaaaccaaaagaaagtcgcggggataagttagggggagcagggagtcagcttggagcgatggcttttgaccctgacattctgacaacactccccaaaccccgctctctctcctctcccgtcagtcgcctctccgcccggcttcccgtccctgcttcaacccggtcggccgcgttctctcgccagccttcttagctatcaggttcctacctccatcttcacacaaccgctcccaccgtctcagaccctcatcgctcccaccgcccccactggactcggaactgccgtcacttccgcaaggacgtgtgttctctctgctgattggaaggagcgccgtggggctgcagagagtcaggcgctgggctatcgccccctggagtttggagggataagggcatgtagaagtgctagaagcgtccctggaggtggcgtagggtactcccgacctaaggatgattccggggagtgcaatagagacgtgatctgggctagaggagccggaggggcgggggagcggggggaagggggagaagaagaagatcggtagattgagtggctagagaggtcggaggtaagtggctatagaagtcgggcggacccggaacccagaggacgcgacaccatgacttatgcttatctcttcaagtatatcatcatcggagacacaggtaaccctcaggtggttcgccttcaaggctcgggcgggcattcgaagctcccaaattgggtggcgggggcggggctcactttgtgggctgggcgattcgagacgggcggggcggttcggggcggccgggggcggggctcgggagccccccttctctggtccgggaagtccatactctggaaggtgttccagggctgcgtgattccgggagtgtgctttctctttcaggtgtggggaagtcatgtctcctcctgcagtttacagataagcggttccagcctgtccacgacctcacaataggtaagtgcatctacttgttccagaacagatgataaaacctgactagctaaattgctaaagtggaaagttagcagccttcagtgttcgaagtaaaaagttacccctcactactttaaactagtccaaacttatgttaatgaagtgaccaatgaaacgttgatatgtggggagtagtgtaagggagagtatataattgaaaggtaactttttagagtgtgaggtatagactcgtcatataattttttttcaaatacaatttgtatgtttatggaaaatcccacgaaagcataactgcttatttatgaactcatctgtgctttgaggtaaattaataccagccttacttttaaaaagtaaacaccaatacatggacattttttatattggtgaagaagcaaattgaggagtcatccctgccttagaattaataggcaaataaaactaaaaactttccttttaaatgaaagagtgtgttaacagttcctcaaacgcactggcgatcctggaaaatattaacctttcccacacgtttgtgataaggcatggcctgaagaggcttttaactaccccctcttcgttatctccgtaaccccagtccaaataaacaacatatatgaaactagctttcttgccatgcaaatgcagtttctaaataaacccctacatccccattcttaccatattgctacttccaagtcccacctgtatggaaacctgaagctaccactgttcctaacggatttatttagagtcaaataattgatggggttagaaaaggatttggcagtatcaactaaaaggtattttaaagggaatattgagcgaattctcactttgcgataggggctaatgatacaatgcttaacaaggcaacaatgcttaattgtgcctctggcaattattggaaatgtaaaatgtattgttaaaaaaatt

SEQ ID NO: 3249 - DNA, 6000 bp, Homo sapiens
aggaatacgtgtatacacacacacacacgattttttaaaatatgcttctctaaatccacataaatgccagaacaaagacaacaaaaacctttggacaacctgatctctttaaaatacctatcacagtaatccctaaacattttcatgtaggatgggtttggaagtaagtgagagaatgggtcaataaagtgggaagctaagatgggtaaacaatgggcaggagatcagggctgacaacggagaaatgaccagacttacccaaaaggcgacagactagatggacacattattatacgtatgaatcttttaaaattttcaaaatatatagaaaaccacagtgttctgaaactggttcctttttatgatttagcaaatattaatctcaagacaattttaagagggaacagaaaagaactaggccagttggatgaccatgtagttcttaaggattctgtccaaagtcgtggctctcaactttccttttttgtttgtttttctatgtatgcattctcagcagaatcaagctctcaactttcttactttcatgatccaaccatgtcccatatgagtgcttaaaaaaaaaaaaaaaaggccattgccatgaccattccattaaatggcacttattgggtttttttccccagcatcaaaacattcatctgggccaggtgccaaggctcaggcctgtaatcccaacactttgggaggctgaggagggcggatcacttgagtccaggaattcgagaccagcctgggaaacatgttgaaacccccgtctctacaaaaaatacaaaaattccccagtgcaggggatcaggggatagatctgtagagatagacggatagatggatggatagacagatgaacttaagcttcaactacttttaagacatacacttgcgtgtggtgaggagcattggggagggaaggagaggaaagggaggaaaagaaaaaaggaaaaataatgtgtacactgtttgcagatataatggctttagctctcagttcagagaagaaacagaatcacatagtaagaagtaagcaaaaaaagtaagagattttagccaaatattatttactagctatttactagctccctttaactagaatggagactaaggtattattttacttagggggaaaaatgtacaaatcaaatgagataatgcacatgaaagcaatttatctggatagggcaaaactacactaagccaagctaaattttggcattactacatgtatcaaatttgaaaatatgtacaagcttttgacagagtttccatttctgggcagatattccacaaaaattctcaaacattggcataaaaactttgtaaataaggatgttcaggctgggcactgtggctcacgcctgtaatcccagcattttgagaggcctaggtgggtggatcacctgaggtcagttcaacaccggcctggccaacatggcaaaaccccatctctattaaaaatacaaaaaacgtccgggagtggtggctcacacctgtaatcccggcactttgggaggctgaggcgggcggatcacgaggtcaggagatcgagaccatgctggctaacacggtgaaaccccctctctactaaaaatacaaaaaattagccaggcgtggtgtcaggcgcctgtagtcccagctattcgggaggctgagacaggagaatggcacgaacccgggaggcggagcttgcagtgagctgagatcacgccactgcactccagcctgggcaacagagtaagactccgtctcagaaaaaaaatacaaaaaatacaaaaaacattagccacgtgtggtggtgggtgcctgtaatcccggctactcaggaggctgaggctggagaattgcttgaacccaggcggtggaggtcgcggtgagccaagattacgccattgcattccagcctgggtgacaagagtgaatctctgtctcaaaaaaaagaatgctcagtgaaattctgcaatacttaaaaattggaaaacaacccaaatttctatcagtaggatgatggttacataaatcatgctactgacattccatgactacgcagtggttaaaaggaatgagacagatctatatgtattgatatggaaaggtccccacaacatagagattgtttaatatacaatctaagtcacacaactaggtctactctgtcacgattctatacatgtaaacactaataaaaacaaaactactaccatatatttctatgtgtttacatgtatgtatctaaatgcatagaaaaagtctgaaagcatacacgtggaatcatcagtaatgatttccctgctagagtaccaaccaagatgggaagggagaaagagtttatgtatcaaaaggggacatttactttctattctataaatttatattgtttgattttatttttactagaataaactattacttggatcgtttacaacacaaagatacagcatccagaatttgtaactgtaacagaatcaaaaacttctctctttgatttcacctttcccctactttatccccaccattagttccaccctcatcgcccctttcctttgcatcagcttttcttgttatacttggatattggtcagagactaaattattttgtactctcaccgtatcccagatttgcagtttgatttgttttccatcaatgttgaccatacgagctccaaactccacacctgtcggtaaagaccgagagaaagaatgtgattctcacgaacagcagccacgtggagtgggaggttcctgcctttcctcaatgtgttataaccatcctttgtctgaactcaatgccactaattccattattgctgcctatttgctccaattaattttgtgtttcttaaggttcttcatttcccttctagaattaaaaaattgtgctcaatgacctcaggaatgtaaccaaaaagcagatatgggaaaataaaaccaattaagaagtcaaatttaaaaaggtgaatacttttttagcaatgttaggttaatgcttaaatttggttaggtaacatttagttttgtaacttttccaaaaaactaaaaattttggaaatatttcctgacactttctcagtcactctttagtctctacttaaaacaatatttatttttttgcaattccagatgtttttctttaagaaaagagcctaagaaataggttctcagaaacaatacttttttttttttttttttgagatggagtctcgctccgtcacccaggctggagtgcagtggtgcgatctcagctcactgcagcctccacctcctgagttcaagtgattctcctgcctcagcctcccaagtaagtaccttacaggcacacgccacaacgcccacctaatttttttaacaatacattttacatttccaataattgccagaggcacaattaagcattgttgccttgttaagcattgtatcattagcccctatcgcaaagtgagaattcgctcaatattccctttaaaataccttttagttgatactgccaaatccttttctaaccccatcaattatttgactctaaataaatccgttaggaacagtggtagcttcaggtttccatacaggtgggacttggaagtagcaatatggtaagaatggggatgtaggggtttatttagaaactgcatttgcatggcaagaaagctagtttcatatatgttgtttatttggactggggttacggagataacgaagagggggtagttaaaagcctcttcaggccatgccttatcacaaacgtgtgggaaaggttaatattttccaggatcgccagtgcgtttgaggaactgttaacacactctttcatttaaaaggaaagtttttagttttatttgcctattaattctaaggcagggatgactcctcaatttgcttcttcaccaatataaaaaatgtccatgtattggtgtttactttttaaaagtaaggctggtattaatttacctcaaagcacagatgagttcataaataagcagttatgctttcgtgggattttccataaacatacaaattgtatttgaaaaaaaattatatgacgagtctatacctcacactctaaaaagttacctttcaattatatactctcccttacactactccccacatatcaacgtttcattggtcacttcattaacataagtttggactagtttaaagtagtgaggggtaactttttacttcgaacactgaaggctgctaactttccactttagcaatttagctagtcaggttttatcatctgttctggaacaagtagatgcacttacctattgtgaggtcgtggacaggctggaaccgcttatctgtaaactgcaggaggagacatgacttccccacacctgaaagagaaagcacactcccggaatcacgcagccctggaacaccttccagagtatggacttcccggaccagagaaggggggctcccgagccccgcccccggccgccccgaaccgccccgcccgtctcgaatcgcccagcccacaaagtgagccccgcccccgccacccaatttgggagcttcgaatgcccgcccgagccttgaaggcgaaccacctgagggttacctgtgtctccgatgatgatatacttgaagagataagcataagtcatggtgtcgcgtcctctgggttccgggtccgcccgacttctatagccacttacctccgacctctctagccactcaatctaccgatcttcttcttctcccccttccccccgctcccccgcccctccggctcctctagcccagatcacgtctctattgcactccccggaatcatccttaggtcgggagtaccctacgccacctccagggacgcttctagcacttctacatgcccttatccctccaaactccagggggcgatagcccagcgcctgactctctgcagccccacggcgctccttccaatcagcagagagaacacacgtccttgcggaagtgacggcagttccgagtccagtgggggcggtgggagcgatgagggtctgagacggtgggagcggttgtgtgaagatggaggtaggaacctgatagctaagaaggctggcgagagaacgcggccgaccgggttgaagcagggacgggaagccgggcggagaggcgactgacgggagaggagagagagcggggtttggggagtgttgtcagaatgtcagggtcaaaagccatcgctccaagctgactccctgctccccctaacttatccccgcgactttcttttggtttccagtttcccggaggaaatgacaattacctgacgatcacagggccttcgcaccccttcctgtcaggggccgaggtgagccagagctgccgacgccgcgggggtagggcctgaggcagcggtggggtagggtagtggggaggagagcacggactccggggacgggggctgggaaccaagggccgcaattggtgtttagagaaaagtggcggttgcttctagagcctgtggggactatctggggaagtcttgggaagttgctgtcatcagaaagcaaggtattggaaagagataacctgtttaaagagaaaagggattctggattagaagacagagtggaattgtctcctttctctggggagaaatagctacagtaatcttaggggatcgcagtggaaagaaaatgtttcagcagctgaagaaattggggttgaggggaggagcttattggttttcttttgttttgagacagagtctcgctttatcgcccaggttgaagtgcagtggtgcgatctcggctcactgcaacctctgtctcctgggttcaagcgattctcctgcctcagcctcccgagtagctgggattacaggcgtgcgccaccacgctcggctaatttttgtatatttagtagagatggcagtttcaccatattggccaggctggtttcgaactcctgacctcaggtgatccacccacctcggcctcccggagtgctgggattacaggcctgagccattgcgcccggcctaaatttcct

SEQ ID NO: 3250 - DNA, 6000 bp, Homo sapiens
tgtgaagagcccagagaaaacaaattattcaggctttttacactcagtgcttggttacagtatttgaattatagaaattataaagccttcttttttcagtacttcaagctttccaaattatttcattatccttactatttaattcccaacaataccttctattaacagtcttctcattttcttttcccctaaatttaggttgatacttgtaacgaactggtagagcctcactcatatgtctgtgctctatcattttagggcccactggcctgattttccgtcaccgtggggatgttctgacaccaggaggtattaatgccccactgtttccagcctgtgtaagggcagcgcagactccagtgaccagagaaagtgctcagaaaaagatgcagtgctggcagttgaagactggccagcatgaattgagttaatgccactaggaatagatcttgaccaatggctgaagggagctagtacatatatacctcagctttctcacacttccagtgggatagttctagggctagtgttttaaactggctccaagaaaatcacagtgagattaaaaacaatgacaacttgcttggcaatttacactttttttttttttttttttgctttccttcccttccctgcctcacttcccatgtcctactgtgcttcctgaaattatttccaaaatacattgcttgcacttgaatctttaaatcagggtctgcttctggtgagacacaaattcagaaaatgttttcccaaagcgttcaagagacattcaagtagtgggagtatttatgttttgtattatgttttgagtaacaggatcgattgtaggaaaagcaagagaatggagacaaagtgagtttagggatatctgtggatatcaactatctgtcctttgtcttgaaagccaatcattgttactgaaaatagaaaatcttatgtctatattacttagcctgaaacaggaagaaaactctctcaataaaagacaataaagaacagggatttttttattcatattaatatcattttctatcatagttgcttataactaacacaagttctatggtgtcttaaggtgttataaatattattaaattagtagagctgaattgctttgttaattaaaaaataaaattgtatttctttttggagaaaaggtcaaacgcttctattatatttttaaaaagtatattctaacagtttatttgtagcataaaaggtatatcataccaaatattaataaactgagatctactgtacatttttagttattcagctttattagctgatacaaaatgcagaaaacgaagggtaaaatgtttgtgatgtccatttaatcagaattatagggatatgcaataagaatgatgtagaagtataattttttttaaaaaaacaacaaaatatactaaaaaatggaagcttaattagaatgtattctctgataatcttcattgtccagattattaatagttcgtagctgactgatactttgatgtctgactaggtcttgggatagtctctgtgattcctggcatatcatacctaagttaccattcagcatcccatccacattaaaaattatatctaccatttctgggccccatggagtgataggtataatagtatttaaatattaagtctgaagaaagaaatcagagaagggtcaaataaatactataagaatacagtgtgacttttatttaatagcatgtatctgtaaagcaatttaacttacaagctctttttcaacttaactgatgcatggcaatgccaaatattttctaaactatgttagatatattttatttttagaaatttgttaaactaaggttttccaattctaacctcagtctttctccaattcaaaattacattctactgaatactttgctcgagctttagtgtaatatgtttgagttatctgtccttcaaatatctttgtccactgttgtttactgttttaaaacaatctagtgccaaataccagcccttttgtaatttttcatttaaaaacgtccttacataattttgtacactgaacactttgtacaacgtctggcatcagccttttactatcttgaataccacatacttattccaaaccttttttcctcatcacagctccatttgtacccaattgtatgtttaattcctctttattttggtcatgaaggctatatagtggtttcccataacattacacatcggatcaaaattttggactttggttaatagaccttttccaatatgcactaacttacctgctttccttttctttcagctctcagcataccttcttcactgattgaggcaaacgtgttttccgtagtccagatgaacttttagtccgaaactaaacgttattctcttcctcattcagtggactgatatctctcattgcttaaaaagcaccagaaatcccaatgcctcctagatgattcttccaacaagaacgctatgaggagcgttagcattccttgctattgcctatttaatctatcaggaattaaattttattctattcactttggttattgcctagatatgcatatattcttggttagaatatcataattacagtgaagttccttcttatgcttagtatgaaagccatctttttggctgaattgttgtagtggaaagtatagggaaggaataacttcattctacaaatctagtgaatatgtttatacctttgtacagcttagaatacattgccacagtctctctcgtttgactcccaataatggtggaaattggttggagtctcagtctctgttttgagtgggagggaatccggagctctaatgtattacaatacttaagacagcagcctttgcagtcacgaagacctgagtttgaaattactacaatgtttataactgcgtaactttgggtaaatttctaatatctttaaacctaaactacctcataaaatggggacagtaataactacacgacatactgcatgtaattgacacagcatgcaaagtggattgtttgccacgtggtaagtaagcccttaataaatggcaagacgttaagggatttgcccaagatacacttgtaaaacagcctacaaggaccagaaaccaaggaagatttcagactccgaatcccatgcttttctactaccctgcttcctagaacactgagttaattaaactactaatttgatgaacgaccttgagcaaaatacttcactgagtcagtttactcatctgtaaaatgagggacttgatttagataatgcctaacgtcctttcagagtctattccagctacattagatgttttatccggtgttgcagggttgacgttcaggtccgtgatatgtccaagatctgtataatcataagccgtgcacatggcaatgaattttattccgacactcgtatttcgttcaatatttagttctgtgtgcacactcagctgttgcctgtctttagtctgcctaccagcgccttgtgaagggaagacccacacctagctttatttatttatatcctggcttgttcccgaaaggatttaaggcggcgagtgacactctaagtcccctaacggtgtcacacagtgcgattaagaaatcctctttggatgaaatcataccgtagaaaatcgccgatgagtgagatgctaactaattaatgtcttttacccaactcttaaaaataaaaactaatgcacctagcaagaagtcctggaagcatacagtgctggctctccctccagctctgacgctgtcccacccgttgtcaacggtcactcgaatgcccttcttagactagccaaaattgtcgccgctccagtaccagctggaccaagatcccaccccaccccttcgctgcccctcatcacccaagtttcctgattgggaaggggcccgaagaacctttctcacatttctattttattggctggcacggctgtcagtaatctctccttcccgccttctagcctagcgcgtttcgtggaccccttggtttctgcgacaagccgcttacgtttgcctgagccgtgttgccggggaccagcgacctttcacccctcccttcccacaggagcgccccggcccccgcccccgccccaaccgccggcgcgcgtcctcaccgcgcacgcgctcccctcgcgcgcgcacacgctcgcgcacacacgctccctcgcccccgcccgcggagttccccctcacccctcagccgccccgccggctgaagcatcggcgctgggaggcggcggcgctgctgagaggcagggacccgagcgcgaagtgtgtgggagtctacgaactcaacccctctctaccctcccctcacagccacccccctccctccccgccagccccccccaacaagcgggagaaataatgagcgagaccgggcggcagcagcagcagcgccgagcagcccaggcaacggcagaaccgctccggcagcggcggcggcggcagcaccagcagcgggagcgagcgcaacgctagcgcggcgcggggaccgccgcgctccttcccggctcctgccctcctctgccgctcgctcctctctcggcatccacctccttcccctcctcctgctcattcactctttccctcactctcccctcctcctcggcttctccccgcgccccgccagccctcgcgctctcccactccctctgcctgtcctccccggtcccctcctcccgctcattcactcgcccctctcccttctccactctctccccctgtctcctttcttcttcttctttcaccctccgtctctcacaccccctccattcccctgtctcctttctgacactgcactgcagctgctcctcagccctgccccctccccagtgagaacaaaccagcaacattgctttttttcctaaagagatttatattgatccgattaaaaaaaaaaaaccttaagaaaccccaaacgcaaaaaaaaaaaaaaaaaaaaaagaaaaaagaaaagaaaaagccaaaacaaaagggagaaccttctcccggtagcagcggcaggaactgcaaacatgatggcggcagctcccatccagcagaacgggacccacactggggttcccatagacctggacccgccggactcgcggaaaaggccgctggaagccccccctgaagccggcagcaccaagaggaccaatacgggcggtgggtatcgcttccacctccccgctggccccatcccccgccgcccgcccctgcctccctccctcgccgtcctccctccctccttccctccctccctcccgcggcccggacacctccagcccgaacccggcggcccctgcgcccctgccccgcgccccctcccctgcacctgccccgcgcctaggtgtccccgacacatttccatttctgtgtttatcattcatcaaaatggcgaccagtttttcggaatagacctatctttccatttaatcggtccagaggttgaccatgtaaatatcctagacctgggcaagaaggtccattcaggaggaggaggaggatgaccccggagtgaggtgatggccgcccgaagatgcgcgctgcgtttaacagtctgataaaataaataaataaatggcacttgggtagcggattgcgaatgactggggcgccggagagtttttcctctctccatcctcttgctttgggccacaagtagtatgcaaaatcttgatgagtgcatgcccttaccgcacttagattgtcggtgcaaatatttcattgatttgtcttcaggggggtgcatacgagggtgggggtgtctggaacggtgacttgttagttaacatcctgcgcttccttggaagatgagttttaacgggaccgatatcgcttcttcatttgcactggaatcatcttaacaatgcacccaatgcatcgaagcagaggtgaatttatctccagcatatgcattgtagacggatgggggtcttttgagtggcacaccacaacatttggaacattcattcacattaagaaagctggatttaccggggtgtctcctgt

SEQ ID NO: 3251 - DNA, 6000 bp, Homo sapiens
accaatagtgaatttattattaagtagagaaacatgaaaactgtttaatttttgacaaggtaaagtacaataaataatttttctattagtgaaatcttagaaaagtatttctaatcaatacgtctatttatagaacttgttataaaagaattgggataggtcatgtatcttttggtatatatttgctcctattttctttgtgctacattgaacagcaacaacaaaacaataacaacaacaaaatcagaatacatacattgattcttcatgacttataccttaaaaaattaaaaatttgtttgtgaagagcccagagaaaacaaattattcaggctttttacactcagtgcttggttacagtatttgaattatagaaattataaagccttcttttttcagtacttcaagctttccaaattatttcattatccttactatttaattcccaacaataccttctattaacagtcttctcattttcttttcccctaaatttaggttgatacttgtaacgaactggtagagcctcactcatatgtctgtgctctatcattttagggcccactggcctgattttccgtcaccgtggggatgttctgacaccaggaggtattaatgccccactgtttccagcctgtgtaagggcagcgcagactccagtgaccagagaaagtgctcagaaaaagatgcagtgctggcagttgaagactggccagcatgaattgagttaatgccactaggaatagatcttgaccaatggctgaagggagctagtacatatatacctcagctttctcacacttccagtgggatagttctagggctagtgttttaaactggctccaagaaaatcacagtgagattaaaaacaatgacaacttgcttggcaatttacactttttttttttttttttttgctttccttcccttccctgcctcacttcccatgtcctactgtgcttcctgaaattatttccaaaatacattgcttgcacttgaatctttaaatcagggtctgcttctggtgagacacaaattcagaaaatgttttcccaaagcgttcaagagacattcaagtagtgggagtatttatgttttgtattatgttttgagtaacaggatcgattgtaggaaaagcaagagaatggagacaaagtgagtttagggatatctgtggatatcaactatctgtcctttgtcttgaaagccaatcattgttactgaaaatagaaaatcttatgtctatattacttagcctgaaacaggaagaaaactctctcaataaaagacaataaagaacagggatttttttattcatattaatatcattttctatcatagttgcttataactaacacaagttctatggtgtcttaaggtgttataaatattattaaattagtagagctgaattgctttgttaattaaaaaataaaattgtatttctttttggagaaaaggtcaaacgcttctattatatttttaaaaagtatattctaacagtttatttgtagcataaaaggtatatcataccaaatattaataaactgagatctactgtacatttttagttattcagctttattagctgatacaaaatgcagaaaacgaagggtaaaatgtttgtgatgtccatttaatcagaattatagggatatgcaataagaatgatgtagaagtataattttttttaaaaaaacaacaaaatatactaaaaaatggaagcttaattagaatgtattctctgataatcttcattgtccagattattaatagttcgtagctgactgatactttgatgtctgactaggtcttgggatagtctctgtgattcctggcatatcatacctaagttaccattcagcatcccatccacattaaaaattatatctaccatttctgggccccatggagtgataggtataatagtatttaaatattaagtctgaagaaagaaatcagagaagggtcaaataaatactataagaatacagtgtgacttttatttaatagcatgtatctgtaaagcaatttaacttacaagctctttttcaacttaactgatgcatggcaatgccaaatattttctaaactatgttagatatattttatttttagaaatttgttaaactaaggttttccaattctaacctcagtctttctccaattcaaaattacattctactgaatactttgctcgagctttagtgtaatatgtttgagttatctgtccttcaaatatctttgtccactgttgtttactgttttaaaacaatctagtgccaaataccagcccttttgtaatttttcatttaaaaacgtccttacataattttgtacactgaacactttgtacaacgtctggcatcagccttttactatcttgaataccacatacttattccaaaccttttttcctcatcacagctccatttgtacccaattgtatgtttaattcctctttattttggtcatgaaggctatatagtggtttcccataacattacacatcggatcaaaattttggactttggttaatagaccttttccaatatgcactaacttacctgctttccttttctttcagctctcagcataccttcttcactgattgaggcaaacgtgttttccgtagtccagatgaacttttagtccgaaactaaacgttattctcttcctcattcagtggactgatatctctcattgcttaaaaagcaccagaaatcccaatgcctcctagatgattcttccaacaagaacgctatgaggagcgttagcattccttgctattgcctatttaatctatcaggaattaaattttattctattcactttggttattgcctagatatgcatatattcttggttagaatatcataattacagtgaagttccttcttatgcttagtatgaaagccatctttttggctgaattgttgtagtggaaagtatagggaaggaataacttcattctacaaatctagtgaatatgtttatacctttgtacagcttagaatacattgccacagtctctctcgtttgactcccaataatggtggaaattggttggagtctcagtctctgttttgagtgggagggaatccggagctctaatgtattacaatacttaagacagcagcctttgcagtcacgaagacctgagtttgaaattactacaatgtttataactgcgtaactttgggtaaatttctaatatctttaaacctaaactacctcataaaatggggacagtaataactacacgacatactgcatgtaattgacacagcatgcaaagtggattgtttgccacgtggtaagtaagcccttaataaatggcaagacgttaagggatttgcccaagatacacttgtaaaacagcctacaaggaccagaaaccaaggaagatttcagactccgaatcccatgcttttctactaccctgcttcctagaacactgagttaattaaactactaatttgatgaacgaccttgagcaaaatacttcactgagtcagtttactcatctgtaaaatgagggacttgatttagataatgcctaacgtcctttcagagtctattccagctacattagatgttttatccggtgttgcagggttgacgttcaggtccgtgatatgtccaagatctgtataatcataagccgtgcacatggcaatgaattttattccgacactcgtatttcgttcaatatttagttctgtgtgcacactcagctgttgcctgtctttagtctgcctaccagcgccttgtgaagggaagacccacacctagctttatttatttatatcctggcttgttcccgaaaggatttaaggcggcgagtgacactctaagtcccctaacggtgtcacacagtgcgattaagaaatcctctttggatgaaatcataccgtagaaaatcgccgatgagtgagatgctaactaattaatgtcttttacccaactcttaaaaataaaaactaatgcacctagcaagaagtcctggaagcatacagtgctggctctccctccagctctgacgctgtcccacccgttgtcaacggtcactcgaatgcccttcttagactagccaaaattgtcgccgctccagtaccagctggaccaagatcccaccccaccccttcgctgcccctcatcacccaagtttcctgattgggaaggggcccgaagaacctttctcacatttctattttattggctggcacggctgtcagtaatctctccttcccgccttctagcctagcgcgtttcgtggaccccttggtttctgcgacaagccgcttacgtttgcctgagccgtgttgccggggaccagcgacctttcacccctcccttcccacaggagcgccccggcccccgcccccgccccaaccgccggcgcgcgtcctcaccgcgcacgcgctcccctcgcgcgcgcacacgctcgcgcacacacgctccctcgcccccgcccgcggagttccccctcacccctcagccgccccgccggctgaagcatcggcgctgggaggcggcggcgctgctgagaggcagggacccgagcgcgaagtgtgtgggagtctacgaactcaacccctctctaccctcccctcacagccacccccctccctccccgccagccccccccaacaagcgggagaaataatgagcgagaccgggcggcagcagcagcagcgccgagcagcccaggcaacggcagaaccgctccggcagcggcggcggcggcagcaccagcagcgggagcgagcgcaacgctagcgcggcgcggggaccgccgcgctccttcccggctcctgccctcctctgccgctcgctcctctctcggcatccacctccttcccctcctcctgctcattcactctttccctcactctcccctcctcctcggcttctccccgcgccccgccagccctcgcgctctcccactccctctgcctgtcctccccggtcccctcctcccgctcattcactcgcccctctcccttctccactctctccccctgtctcctttcttcttcttctttcaccctccgtctctcacaccccctccattcccctgtctcctttctgacactgcactgcagctgctcctcagccctgccccctccccagtgagaacaaaccagcaacattgctttttttcctaaagagatttatattgatccgattaaaaaaaaaaaaccttaagaaaccccaaacgcaaaaaaaaaaaaaaaaaaaaaagaaaaaagaaaagaaaaagccaaaacaaaagggagaaccttctcccggtagcagcggcaggaactgcaaacatgatggcggcagctcccatccagcagaacgggacccacactggggttcccatagacctggacccgccggactcgcggaaaaggccgctggaagccccccctgaagccggcagcaccaagaggaccaatacgggcggtgggtatcgcttccacctccccgctggccccatcccccgccgcccgcccctgcctccctccctcgccgtcctccctccctccttccctccctccctcccgcggcccggacacctccagcccgaacccggcggcccctgcgcccctgccccgcgccccctcccctgcacctgccccgcgcctaggtgtccccgacacatttccatttctgtgtttatcattcatcaaaatggcgaccagtttttcggaatagacctatctttccatttaatcggtccagaggttgaccatgtaaatatcctagacctgggcaagaaggtccattcaggaggaggaggaggatgaccccggagtgaggtgatggccgcccgaagatgcgcgctgcgtttaacagtctgataaaataaataaataaatggcacttgggtagcggattgcgaatgactggggcgccggagagtttttcctctctccatcctcttgctttgggccacaagtagtatgcaaaatcttgatgagtgcatgcccttaccgcacttagattgtc

SEQ ID NO: 3252 - DNA, 6000 bp, Homo sapiens
agagttgttcagaaggaaaaaacagtttttctcaaagaggctaaatctctagtactaattagttgcagtagtggcatgtgtgtgtgtgtggggggggggtggcatggtaatcttgtgcctccagtgttctaaataggggcaatctttttgctcacggtctgagccatcgaatgagtaacctcgacctcctaagacccttcactgggctcacgtgtgtgtgagtcccacaggaattgtggaatgcctctttctcttgttgggtccagacatttagaatgaataaattaaagggtagtggtaacatggtcattgtcattgcagacaatgtggtatttatatatgggcactagctgtctttctcatggggctcaggaacaagggtaagtttgatctttcatcatgaaccactggggtgttctttatacacagaggctgtaccagctgaaaatagcccaaacatcttgtaattttgtctttcccaatttttgcctattcatatcccagaataaaagagcctgttcagcctttccaaagatttaaagaacattatctatttgctttctaagtacccaaaaagcacaaccgtctacattcaccttggctggatgaggacatgcattcattcatccattcaagagatatttattgccagacctggtggctcacgcctgtaatctcggcactttgggaggcagaggtgggaggatcacttgaggccaggagcttaaggctagcctgggcaacatagcgagaccccatctctacaaaaaataaaaaattagctgggcatggtggtatgtgcctgtggtcctagctacttgggaggctgaggtaggggcattgagcctaggagttcaaggctgcagtgagctataatcacaccactgcactccagcctgggtaacagagtgagaccctgtctcaaaaaaaagaaagaaaaagaaaaagaaaaggggtatttattgaacacctactatgtttcaggcactgtgctagatcctaagtgaatatcagcacatgaacaagacaaaggcgaaaagttaccaaacaagtctaagttgatttcggtatatgcatcttcctgacttctggtcccgtgctttgaccacaacccttcaccactagaccagacttccccaaataaacaactacttctgcatgctggggatgggctgtgtgcggcagcatttacgtaggcggtacagacagcagcctttcacttaatgttgcaataacaccaggctaaacaatgtgcactgacttcaaaagtgtggggtcaggtctccttcaagtgccacagggagagtgcaaagtaggaaaagtctatcggatgaggaaacactgtagagggaaagtgaattttttttcaatttgggttaaaattcagatgtggaattctaccctccttttcacttttggatccccagataggaggaactcagcacatagataatcatgaactacacacattttggttttatatgctcagacttgtccagagcatgaaatccctgccctgttggaaggcagcgccgtgctcacggaggcacacaagcacctgtctcaaagtcaccctgacctgcagatctgcaaatggcaaaaataatttcacatgtttgttctgatttgtcttcatttttaggctaccttgtgtgagctccactttttagaatgtgattttgcagtcctgaaatggataccatgagcagattgagatgtgagaatatgttagaatgatcacaggttcggatgttagtggggcaggagagggagtctgagattgtattggcctatactgtggcttctggttgagcacttggtttgcctggatgatgctctggccttactcaatctttatcattccattatccagaggacagaggatctgagccccatctctgtattgcagtcacctcctctgggacctgtttccaagccttcttctgtgttgcctggcacccctttcttacctctttcaaaccacttactgctaccctgtaagctcgattgacttgttggtcttcctatgagactggaatctctctgagggtcgggacaggcctaccctcttcattacagtgagcaccagcctccagcccagtcaatagttttgttaaataaataattgaacaaaattatttgttaaataatggtttgtcctttccagaggatggacttagtttgtcctttccagaggatggatttagtaagtctccaactctggtcataatggtgccagaaggaaagagttaagctatctggaggaaataggctcactcaaagacccttcttcttttttttttttttaattggcaaaggcaggataagtgtatttgagataaatcctggatataaaatcttgacacatcttttaggtattggccgagatgctttggacctgaaagggaagtaaatcaaatcattctaggttttcttttcttttcttttggagacagaatcttgctctgttgcccaggctggagtgcggtggcacgatctcggctcacaggaacctctgcctcccgggttcaagcaattctcctgcctcagcctcctgagtagctgggactacaggcgtgcgccaccacacccggctgttttgtatttttagcagggacagagtttcaccatgatggccaagctggtctcgaactcctggcctcaagtgatccacccgcctcgggctcccaaagtgcaggaattacaggagtgagccaccgcacccagtcaggtttcctgttaagtggcctgagatctagttgtgaatggcagtcatggccagactcaggaattcaaagcttgacctattttgtctgaagctaatattaataataagagagatgtatttggcttcataacccctttccctcccgtccccctctttctttctgtaatcaaggatagaattagaagtaccgaaggccgcagaattgctttaggattcagagcagctccaaggaatctgtgtttacgtattatgtgtgtttttccgtttccctccctttttatgagtgagaaaaaaaagcgcctaaattcccaccaacataaaccaatgacatacaatgatgaaattctgttttcacctctgcctgtgacagggaatgcaaaaatagcaagtggcccagttccacgaatccccgcctcctgccctccccgctcctgccgggttggatctctaagaatggaggttagcgcacagcctcgcgcgggccgctcagcccccggacccggcggatgatgtcaggcgacgggagcggccgcggccgggccggggaggccgcggcccaggggagctgggagggagggtggcctcgccaggccgacggcgcgcccggccgcgcggcgttgcctggagacggccctggcggcgctgtgttgctgtaaacagccgcttccctgttactatctatagcaggatctcctggctcccgggcgcggcggctggaggcaggtctgcggtccggctccccgcgcgccccgaactatccgcccgccggcctcatcctgcctcgcccctctccaggtgcccaccgcgggccccgacccccgggcccgaagagtggagaagggaagaccggggctgtgcggggacatgcgtcttcgcgccctggaggtggccagcgcgctggggctgagccccggcagcgtgaccccggctgtcctacgcagcagggcaggagattggggggcgtggcacactctggagcaccttgcctccccaaagccccgtgttccaggacgtggagccgctcctggggtcccagcagtcgaggtattccgcccaggcgcagctggacactgtccttccagcccccgtcctccaccctccaagtccgcgctggaaaatcacccgctgcgggctcccgtaagcacagcttcctggcgggaccgaaccagccctcagcgcagatttgagttccccgcaggaagcacaccccgccttgtcatcccgaactgaccaccctgcccacataaccacacctcgcactccctacccctggggcccagctcagaaccgggcagacacccccttcaaatgtcttcgcacgtaggttttgcacagtgtttatctgctggtgtctcagggatttgacagtttccttaatattcccacacatggccgagaaaaataaataaataaatgcgctgtcttctttaaaaaaataaataaataaagtacccagtatcgtaaagtaggttatcgtattctcttattttggatcctccactttctgcttccaaacgcaggaacagtgctagtattgctcgagcccgagggctggaggttaggggatgaaggtctgcttccacgctttgcactgaattagggctagaattggggatgggggtaggggcgcattccttcgggagccgaggcttaagtcctcggggtcctgtactcgatgccgtttctcctatctctgagcctcagaactgtcttcagtttccgtacaagggtaaaaaggcgctctctgccccatcccccccgacctcgggaacaagggtccgcattgaaccaggtgcgaatgttctctctcattctgcgccgttcccgcctcccctcccccagccgcggcccccgcctccccccgcactgcaccctcggtgttggctgcagcccgcgagcagttcccgtcaatccctccccccttacacaggatgtccatattaggacatctgcgtcagcaggtttccacggcctttccctgtagccctggggggagccatccccgaaacccctcatcttggggggcccacgagacctctgagacaggaactgcgaaatgctcacgagattaggacacgcgccaaggcgggggcagggagctgcgagcgctggggacgcagccgggcggccgcagaagcgcccaggcccgcgcgccacccctctggcgccaccgtggttgagcccgtgacgtttacactcattcataaaacgcttgttataaaagcagtggctgcggcgcctcgtactccaaccgcatctgcagcgagcatctgagaagccaagactgagccggcggccgcggcgcagcgaacgagcagtgaccgtgctcctacccagctctgctccacagcgcccacctgtctccgcccctcggcccctcgcccggctttgcctaaccgccacgatgatgttctcgggcttcaacgcagactacgaggcgtcatcctcccgctgcagcagcgcgtccccggccggggatagcctctcttactaccactcacccgcagactccttctccagcatgggctcgcctgtcaacgcgcaggtaaggctggcttcccgtcgccgcggggccgggggcttggggtcgcggaggaggagacaccgggcgggacgctccagtagatgagtagggggctcccttgtgcctggagggaggctgccgtggccggagcggtgccggctcgggggctcgggacttgctctgagcgcacgcacgcttgccatagtaagaattggttcccccttcgggaggcaggttcgttctgagcaacctctggtctgcactccaggacggatctctgacattagctggagcagacgtgtcccaagcacaaactcgctaactagagcctggcttctccggggaggtggcagaaagcggcaatcccccctcccccggcagcctggagcacggaggagggatgagggaggagggtgcagcgggcgggtgtgtaaggcagtttcattgataaaaagcgagttcattctggagactccggagcggcgcctgcgtcagcgcagacgtcagggatatttataacaaaccccctttcaagcaagtgatgctgaagggataacgggaacgcagcggcaggatggaagagacaggcactgcgctgcggaatgcctgggaggaaaagggggagacctttcatccaggatgagggacatttaagatgaaatgtccgtggcaggatcgtttctcttcactgctgcatgcggcactgggaactcgccccacctgtgtccggaacctgctcgctcacgtc

SEQ ID NO: 3253 - DNA, 6000 bp, Homo sapiens
tcagcctcctcctgctttgcacaggctgggccagagcctgccacggagccccagcggctacacactccactcactcacacctctcagggccccgcacgttcccacagccctcagggtgtacgtgctgtaggtgtggctgtgccccaggtatgtgttccccaggtgtgcttgtgccccaggtgtggctgtgccccaggtgtgcgtgtgccccaggtgttcgtgtgccccagatgtggctaggtgtctagatgtgttctagatgtctgtgtattccagtgtggctgtgtcccaggtgtgcgtgtgccccaggtgtgtgcctcaggtgtgcgtgtgccccaggtgtggctttgcctccagtgtgtgtgtgccccagatgtatgtgtgccccaggtgtggctgtgccccaggtgtgcctgtgccccaggtgtggctgtgccccaggtgtgcctgtgccccaggtgtgggtgtgccccaggtgtgggtgtgctccaggtggctgtatttcccaggtactcagggtgaggttgggaaaaaagcaggacatttctacactaggtgggacaagcaggtttctggggtgcccccctcatgccagcccctctgtgggatctccatacccctcatcctctgaggcctggcgcacggcggggctcagagactgaaggaaggactgtaggagtggacgatggtgggggtttgacctgacgccgggccagatgccctgtgtggctgcctcagcctggagtagagtgtctgagctggaacaggggtcctagccccactctgtgaggcgagaaactgaggcttggagagaggaagagatggggcttcccaggacctggtgggtggtatgcaaggggagctggctggtgcagcgggggctgtggtgagggccctgggaggggcagggggatgcacgcagacagaggctctgcctgcccgcagagtgccagctgatgaagacggagcggccccggcccaacaccttcatcatccgctgcctgcagtggaccactgtcatcgaacgcaccttccatgtggagactcctgaggagcggtacgtgggctgtggcggccaggccaggcacttgggcagccccagcgcttaggagggacacggggatggcggggtgctggcacctctgcctgtagccatcctcactccccagtgctcccaggccctcctcagagcccagtttggaaactggcccagtcctgcctgtggggtttgggtggggaaactgaggctggagataaaaactggctagggaccgggtgcagtggctcacgtctataatctcggcactttgggaggccgaggtgcgcagatcacttgagaccaggagtttgagactagcctgccaacatggtgaaacccccgtctctactaaaaatataaaacttagctgggtgtggtggtgcacacctgtaatcccggctacttgggaggctgaggcacaagaatcgcttgaacccgagaggcagaggctgcaggagccgagattttaccactgcactccagccagggcgatagagcaagactccgtctcaaaaaaagaaaaacccggtggagagggccagtcctccttggggggcggagtcctgcttgggaggcggagtcctgcttggggggggcggagtcctgctggggggcggagtcctgctgggggttggagtccggttgtggggacagagtcctgctggggggctaagcctgggtgtcccccacgtccaagagggcttcgtgaccctgagtgtatgtggccagaccaggtcaagtggtggcctcctcagggctgtctctgggaaccccgacagctgtggaaccacgcttgtgaggctggcgggtgggtgaaagacgtggggtggagctcctgatctggtacaggcctgcagcctcacctgacctcctgcagggaggagtggacaaccgccatccagactgtggctgacggcctcaagaagcaggaggaggaggagatggacttccggtcgggctcacccagtgacaactcaggggctgaagagatggaggtgtccctggccaagcccaagcaccgcgtggtgaggcctgtccccacttctgcctgtgcctggggctgccttggactgtggagggctgggtgggtcatggggtcccagctcggcccaggagacactcagcactccacggcatctccacctaggccggttttccatgtagggcgcagctgcttcccaggtgggtcctcttccccatgtcagaggaaaactggggttgctgagccctgccaggcttgggcaatgttaccccacccttccctgaaccccatgctctgagctggggccgcagccatgtgttccctgtaagcctggactccccgctgagcccagtaggccaccaggtgtgaagtggacgcctctcctggctctgcctccgactctggggcccctcatgccaccccacgcatgccgaccagctgggcactgttggcagcgccgcttgctgaccctggtgcctgcccatagaccatgaacgagtttgagtacctgaagctgctgggcaagggcactttcggcaaggtgatcctggtgaaggagaaggccacaggccgctactacgccatgaagatcctcaagaaggaagtcatcgtggccaaggtggggccggggcggtggggcagggtggagatgagggtgcggggtggcagctcacccagccctgctttacaggacgaggtggcccacacactcaccgagaaccgcgtcctgcagaactccaggcaccccttcctcacagtgagtgggagcccagatggggctgaagggctggggccaggtagcgactcctggggctgtctctaggggacgatgtcctgtcttcttgggcacgtgagggctttacacaccgtggactccgccgctggtgagacaggcctgccctggagggtcaggctgtggaggtgcccagtgtgggctaggggctgtgctcgctgctcccgtgtgcgggcaggtgggtggggcaggtggccctggtcttccttgcactctgccgaggctccaggaggccccagctccccatgccctgcagccctgcctgccaggcttttgttgaggcccgggctctgtcctgcagaacctgttctggggacttggcccaggaggtatttactgtgaagggggccagggtccagccacttggttagttccaggtcactgtgtttggggacgattctcctgcagatggggcctttgctttaaaagcacagtcgcctgtggtggaaggcgggagggtgggtctcgcctgggagggtgtgtcctccctttgcgaaggccctggtgctgggagcactgtcccctgctgaggtcccaactcaccctggaggacctgagcccaggccaccttgctcacctttcaaacactccttggcacctcaggggctgccggggcccagcctgatggtggcgtggcatgaggcagtgtggtgtggggcagtgtggtgtggggcagcgtggcatgggggcagtgtgatgtgggggtgtatggtgtggggcagtgtgatggggtgtgtggtgtggggcagtgtggtatcgggcggtgtggtatcaggcagcgtggtgtcgggcagtgtggtgtggggctacgggcggtgtggtatcaggcgacgtggtatcaagcagcgtggtgtcgggcagcgtggtgcggggctgccgtcctgcctgtggggccgcagttccagctccccttccttgcaggccctgaagtactctttccagacccacgaccgcctctgctttgtcatggagtacgccaacgggggcgaggtaggggctggggctgcgggggatggacttcgcggcctgtgggccgcccatggtggggccggtccttcccggagcctcggctactctccatggcaccagacggtgctccctgctgggtgggtggtgtgatgcctgcccaggcagctgcctgctgtggggtgacttgttcctgctgagttagggcttctgagactttccaggcccccgtgccctctggtggctggtcccttccctgtgcaatgccgagacccggtctgagaaaccccagccctgcaggccatgggggcagaggcccgagccacggctgtgcctcaggttgcgcctcccgcagctgttcttccacctgtcccgggagcgtgtgttctccgaggaccgggcccgcttctatggcgctgagattgtgtcagccctggactacctgcactcggagaagaacgtggtgtaccgggacctcaaggtgcgctggcgggcaggcaggggggcagggccctgggggcctggcggcactgacctgaggccacctttcccctagctggagaacctcatgctggacaaggacgggcacattaagatcacagacttcgggctgtgcaaggaggggatcaaggacggtgccaccatgaagaccttttgcggcacacctgagtacctggcccccgaggtgtgcgccccacctgcgtgcatacgcgttgctgcgtccccacgtcctgagcacacgcaatgctgtgtcctctctgtgccccaagcacgtcacacctcccccggcagtgtcccggacaccccttgatgccgagtcctgcccatctgccacccgtgcaggtgctggaggacaatgactacggccgtgcagtggactggtgggggctgggcgtggtcatgtacgagatgatgtgcggtcgcctgcccttctacaaccaggaccatgagaagctttttgagctcatcctcatggaggagatccgcttcccgcgcacgcttggtcccgaggccaagtccttgctttcagggctgctcaagaaggaccccaagcagaggtgagggccgcccatcccagctacaggctacacctccatcccctcatccccaggctgcacctgcccctgcgccaggcggtcctggcacctcccagactacactgatagccaaagcttgatgtccttggccagggctgatctccaaagcctcaggcccaagcagagtggcgggcaggccggggtcagttgggcctctgtccccaaccctgcagcctgcacccacccactcaggaagcccctgccctgccgtgagctctgtggtgctttgctacccacagctgctcagggacgctgcaccaccggctcccctccctggccccggaacgtcctgtctggcgggccctacatcacaggaggaaggggcctgaacccagggcctgggcaggtggcggtaccgacactgtggccttgtttcctgcctgcaggcttggcgggggctccgaggacgccaaggagatcatgcagcatcgcttctttgccggtatcgtgtggcagcacgtgtacgagaagaaggtgcggctgctccccgcatattcacgcgcacgcatgctccccacatatccacactcacgcatgcacgtggcacgctcgccagatttcccacacactcgccctcacctcaggagcctgctgcagtcctggtacaaggagggccttgctgcaccaacctcagcgcctggtgctcagaggctctggcactgccgggttccaccaggaaactggcctggtcctcatttcctcctcccctcggaggtgtgtcacactctgagtttcctcctcccctcggaggtgtgtcacactctgagtgccagccttggggttcccttccctgacgctgtgcagtgaaggctggctggtggtggaccaggggtgctgccccttggcctccacgagttcctcctgtttgacctcaatcccttctgccgcaaggagagcccagccctatttctggctgtgcagggacagggacagcacctacttttctggcacatgggggagtccgccctggagggaggcagctctttctgcatgagtcgccatcctgggtgctcatctttcagggaccctaggagccctggccatcaccccagctgatggggtctgccagctgggttcggaagcctgcactctgagatgctgggtgccctgtcaccaggtgtgc

SEQ ID NO: 3254 - DNA, 6000 bp, Homo sapiens
gattgtgggatattccagcaccttctgaaagggaaggggctgtttggtcacttggtgcttaaaagttggcaggacgcaagtgggtgttcagtaaatgtttgttgagtgaatgtgtgacggttgcttctgtgagtgattacgatggtcccaccatccctaatcctgactcctctgtggcaacattccagccctgcctgcccacacccccagcccctgaaccttcagagcaagtaggggtggcctgccacactggggctctgggcaacaggctgacagctccccactgcaggctgggagcaagcaccctagcctgccctgcctggctggcgggacagagagagcctggacacttaatgggggttgtggtacacagggagggtcaggatgctgccttcaggagcctagggtaggacctggaaggagggcccagctaggaatgggctagatgaaggggaggggacagtgggagagaagctccttatccctctcaggtcgggatgtctgggttcaagtccctcctgccccacaccgatcagggaaggggggctgttccaggcagagaccgcccagagttggtgctgggatcctggccagcctgtagtcctcagagcccctgtgactggctgggtctcaagtgcaggaatgacaggacaccgtcacacagccactgtcgcggcggtggtggttcaggcagaacctctgcagactcaggcggccatctggcctgggagctgccctgaggccccgccctgcagctgctgctgggacctacacagcccagggccctcgagtcctgcccccggccagcagctgcagaaggtgacagggcaggaggcccctgagctctgggaggaggcagccgtcgggcccttccctggtgcagcagtttttgtcggaaacatctggccacagagcacctcagcagtcccagcagcagccgtggggctgggttctctcctgaccattctgtctggggtgggagggggtgttcttgaagagaggactctgctttccctctgggacgctggaggagagggagatggccctgcccactgggagatccccgtcttgggggagggcagttcatgccaaggtgaagacaggactggagtgtggggcccacagtgggttgcaggcaccagcagatgccagggcaccaggctgggaagactgggaggcctccttggagacagccagtgcaaaataagcaagaggtccaaccacttcaagaacagcccgcaatgtcactgcctcttccatgagagggtgccctgctccctcccacatccccaagcctcggccacttgctggccttgtctcatggccctcttaccctctgcttcctccctgaattccttcctccatccttgcatggcagagcccaggatggtggacagataccaggaactcttcctcggggagcagtgggcaggtgggacagtcccagagggagccccaggtggctcatggtgcaggtttgctgggtgagagacagacaccagacgcccaggctctgggggcaacccttgtgtcaggtatcccacccaagcggcgcagaccactgggcctctgacttggccccctggaggtgggcccttcctggggttacaaagtctgagctgggagggagcagaggtgctcaggcgagaggcaggaatggggagtcccctgtctgaggagcgagtgccctcatgcagggggagagagtccttctcttggtcagccccaagaggcagggatgaagcccgagttttggctgcagactctgtcctgagcactgggccgaacctgctgcctctgtctgcatctcctcccaccccctcccctgctgccagctgaactcactctggctgaaaataaaaatgctcccccaaccccaatacttagcagcctcaggaaggtaactcacaagagtctgtctttcacaaaagggttattatcaactgtgggcctctggaatgggggaggggcagttgtcggaggaacttctggctaggaaggggtcggggtggcagtcacctgcactctcctgtgagtgtccaggagaaaggggtctgtgtcccacttactcattccatacccgggccatctgcctcccagtggacttcggactgggtgtccgggctgaccaagtccacccagcagggagggctctgggctgtcagctgtcacagcccaccctagacaccgctcctcctctgtctggtgtctgctcccagctcaaggtgggagccaggcaaggtgtgcccctcttctcccactccccagcaaagtcccccttttgtgagtgtagctgccagtacctaggtgaatggttgactcccctcggagccttcctgctccttggaggcccacctccaactgacctcctgtcctggcatcctcccgcacttcccccagaggcacaaggtcttgggattgggccttttaggtcactcttggccgccccctccacgccccccagagtggggcagcctgaaagtcaacctaagccacccccgccccgcgcgcggaggcagaagtccgggattcgtccctgacctgtctcgggccccttctgctagggtcacggcagagcgagcccagaagcgccgggtcactttacagacggggaaactgaggccagagagggcgtggccccgggacgggctggctggtggccgggctccgttagcggcccagcccaggccccaggtcgtcgggagctgcccctcagcccggccgcgcgctccccgagcgcgctccgccctcgccgccggccgcgcggtggggacgccccgggcggcggaggcggatgtgggcgggcggctccgggcgcggggcgggcgcggggcggggagagggcgggccggcggcggcggcaggaccgagcgcggcaggcggctggcccagcgcacgcagcgcggcccgaagacgggagcaggcggccgagcaccgagcgctgggcaccgggcaccgagcggcggcggcacgcgaggcccggccccgagcagcgcccccgcccgccgcggcctccagcccggccccgcccagcgccggcccgcggggatgcggagcggcgggcgccggaggccgcggcccggctaggcccgcgctcgcgcccggacgcggcggcccggtgagtccccgcccgccgtggccgcccgggcctggatttcctccccgcgggccgggccgctttgttcgcggccggtcgggccggggcgcgagccgcggcgccgccagaatggaggagcgggagcaggaagtggccgagcgggcctgggcggggagggcgcggggcgcgcgggcccggccaagggagggcggccccacgccgggcgccgggggtgcaggctgccggccccagcctccctcatgaccttggggaggccgctccgccgggcgaggccgggacccgagagaagggacgccgccgggcctggagctggggctcggggtgcccctgcgggccgtggggctccccgggcgctgggccagcgaggcagccggcggaggtgccccggggttggagaaagactcgccgcggccggccttcaagtttgtgggagggccccggaaggagacttcgtttcccacggacgaaaagttgtacgtggtggcggggtacccaggctagccacaaaggactgtgaccctcctgggccccggaactgcttcctgtcttgggtgggccctggaggtcctgcccgcccatcccagaggccaaggcttggagggcagctggggcttgccccttagattgagtatcctggggcgctagcgagcttggtcctgtcgggacggcctctgagtgctgccttggtcagcgggtgagcttgggcccctgctctgcagccagaggccgccccacattcactcctgggtctctcggccttgctccaggtggccacttcttgactgctttgagtccctcatccgagcgaagggcggacggagtccgttggtgggggtccggttgcctctcccgggagctgtgtagacttctcatacaccagggttctggaggcagatggaggagccctttcgaaaacagagtatttttttttaagttgtgacttaataatagtagcaagaatatgtgcttatggtaaaggcaggcggcaggtacggaggctgtgggaagtcggggtccctccgcccccacaggcagccctgtgctggcctggtgtatacgtttctgtgcagacgtacaccaccctgtgtgagcacagatgtatttttacacatggctctggacagctgtctgactctgtcagcagcaggccttggaggggctcaggcccgtgtgggggtggggggacatccagaggtctttgagtccagccctctgcctccaggccacgcccactcagtgtcgtcagagccccctgtgcctgaggcgtgcgcggctcggagccctgccctcggagtcctgcggtgccttcctcgagtctggcctgctttccatcctgctaagtacttggggcatttccctctttgggtaaggtgtggtcttccctgtcctggcattagacacaaggcagtgggccttcctgccattctaagtgtagcttaagacaatcagtgcaaagcaaccctttgtgggtgtccagcccttgcctcgggaggccagaaaggtggcctggggggagagcgtctaagctggctgtggaaagacccatgttgggatccattccacagaggtcgtcaggggtctctgcctggcctggaggtcccagagaggaccctcctcccctcaggaaggcccatctggaagggtagcagaggactgctcacaggaagagcatgcgaagtgctctttctggggatgcctgtagttggtgatgtgggaactgggttttgagggatgcctaggagttcatccatcagaggggaaatgaggaagccatgcaggatcaatggataaagtgtgctcaggtgagggttggctggtgggccgctgcagggcgggggcctgtccagtgctcccccacttacttgctgcctcccgactgctgtaattatgggtctgtaaccaccctggactgggtgctcctcactgacggacttgtctgaacctctctttgtctccagcgcccagcactgggcctggcaaaacctgagacgcccggtacatgttggccaaatgaatgaaccagattcagaccggcaggggcgctgtggtttaggaggggcctggggtttctcccaggaggtttttgggcttgcgctggagggctctggactcccgtttgcgccagtggcctgcatcctggtcctgtcttcctcatgtttgaatttctttgctttcctagtctggggagcagggaggagccctgtgccctgtcccaggatccatgggtaggaacaccatggacagggagagcaaacggggccatctgtcaccaggggcttagggaaggccgagccagcctgggtcaaagaagtcaaaggggctgcctggaggaggcagcctgtcagctggtgcatcaggttagggaggctgggaaggccttttggggatgggggtgatttgtccaacggctgggggaggtgggaatggggaggtgagcaaggcagcagctctcagggcctggctgttgcgggtggtggtggcaggggctggaggctctaagcctagaataaggagaggcccaggtccagggaactgtgttcaattacatggatttgacacttggcagccctgagtgttttggggagagggaaggcaggcgggcagatgggggtcagagagcttagagggatggcagcccacctgggaaggcaggtgcgggtggagcccccaggcacgtgcagtgggtctctggctcacccagggcgaggagctgcccttagccaggcgtggcctcacattcagcttcctttgcttctcccagaggctgtggccaggccagctgggctcggggagcgccagcctgagaggagcgcgtgagcgtcgcgggagcctcgggcaccatgagcgacgtggctattgtgaaggagggttggctgcacaaa

SEQ ID NO: 3255 - DNA, 6000 bp, Homo sapiens
ggcggggagggcgcggggacggcgagggcgccgggcggggcgcgctccaacttggctggcccagcgccgcccgccgctcgccccgccccagagagagcgaaactcggggcgggggccggagggggcgggccgagcgacttcccggagcggcggaaccgctgaggtcaccctcgcccccccttccctgtccgccccacccggccgggccccgcgcgcagccagcaggggcgctggggtgtgaggggggtttagggcactgcgcgggggcagggggtctctcgcgatacttggcgctttggcctgggtcccccacctcccaacctttcccggcatggggtccttactgcgccagtctgcaaaaggaacccttccgagggtccgcttgtatcccagcccgcgttgggcagtcacccgagggtaaacccgggaccctggcctcccgccacctcgcagggcgccggccttgggatggcgtaggggttgcgtggattgggggtcgttaattttgcaaagatgacacctccttcttccttgaaagcctctttttgaatttaattcagctgggaccctcttccaaacattcaagcaggatgtcgatcctagagtccagaacggggacttccaccctctccacagaccccagcccagcgtctatgggggacccagcgcagagaggcacggaaaacgggcacctcccagcagacatggtggcacggggggacaaacgccataacagagacagtcggaagccctccagagcccagggtaggcaggaacgtgttcaaagaggaggagactccggacaggggctggcatgggagtgggggtagggaggagtgggggaaagtgttctagggcaaagaagcattgagaagatgtgagggggacgcctggttgtgggagagggaatcgccagagaagtagagagtgtgtttggcggggttagggtccctcccaggcagatggagccttttcccaggggcacaacctgggctgcccttgactgagcaggtttgaaggtactctagaccaccggatcatcttcacaacagtcccattaactagacgctcttattttcatacctttttggtgagagagtttaggtaaggtacccagagccatgtatcaggcagtaagtcactgaaccacgatttgaattcagccggtctcattcttctctgccttggagtccgggaaatggagaatgtagtggaggagtcaccccagtcaaggccaagcagtggggtgggggtggtgctggaagaggggctggatcacaaaggacaggacccggccaggtatgtgtgtgcaggaggagtggagcccacagtgggatctgaagtctgggaaggaaggcctcgttgttatactaaaatatcattccttgtttcaccggatggactgcatctttatttcctaaacctggcaactgcagcttggacccctggaatgacactgcacttacagccactgagactagcttagggacggcagaggcctggctcccactgccgccggccatccaccctaaggaccccttcctgaggaaggtcaactcccctctctccacgcatttaaataatcatctgccttgccccagccaccagcaggaatagctgaattcaagtaagttaagggtgaactcagatgtgactgctcccttcctgccctgcctggatcacagccctgccccggcccctcccaaccttgagcacgaccaaacctttaacctctttgaacctcagtaatcctcatctgcaaaatgggagtcagagtgcatcccggggtcttcgtgaacattaacgacagggcctggcactcagcaagctctcaggctctggaatgttcttccccaaagaacccttcactggtttctcttcatccctgtctctgctgaaagtccactccttagtcagggtggccattcctgcccaccttcgctaagttccctcgcagtcccttctgctgcataccctcctttccagcccattccgggtgtcctgtgattgtgggatattccagcaccttctgaaagggaaggggctgtttggtcacttggtgcttaaaagttggcaggacgcaagtgggtgttcagtaaatgtttgttgagtgaatgtgtgacggttgcttctgtgagtgattacgatggtcccaccatccctaatcctgactcctctgtggcaacattccagccctgcctgcccacacccccagcccctgaaccttcagagcaagtaggggtggcctgccacactggggctctgggcaacaggctgacagctccccactgcaggctgggagcaagcaccctagcctgccctgcctggctggcgggacagagagagcctggacacttaatgggggttgtggtacacagggagggtcaggatgctgccttcaggagcctagggtaggacctggaaggagggcccagctaggaatgggctagatgaaggggaggggacagtgggagagaagctccttatccctctcaggtcgggatgtctgggttcaagtccctcctgccccacaccgatcagggaaggggggctgttccaggcagagaccgcccagagttggtgctgggatcctggccagcctgtagtcctcagagcccctgtgactggctgggtctcaagtgcaggaatgacaggacaccgtcacacagccactgtcgcggcggtggtggttcaggcagaacctctgcagactcaggcggccatctggcctgggagctgccctgaggccccgccctgcagctgctgctgggacctacacagcccagggccctcgagtcctgcccccggccagcagctgcagaaggtgacagggcaggaggcccctgagctctgggaggaggcagccgtcgggcccttccctggtgcagcagtttttgtcggaaacatctggccacagagcacctcagcagtcccagcagcagccgtggggctgggttctctcctgaccattctgtctggggtgggagggggtgttcttgaagagaggactctgctttccctctgggacgctggaggagagggagatggccctgcccactgggagatccccgtcttgggggagggcagttcatgccaaggtgaagacaggactggagtgtggggcccacagtgggttgcaggcaccagcagatgccagggcaccaggctgggaagactgggaggcctccttggagacagccagtgcaaaataagcaagaggtccaaccacttcaagaacagcccgcaatgtcactgcctcttccatgagagggtgccctgctccctcccacatccccaagcctcggccacttgctggccttgtctcatggccctcttaccctctgcttcctccctgaattccttcctccatccttgcatggcagagcccaggatggtggacagataccaggaactcttcctcggggagcagtgggcaggtgggacagtcccagagggagccccaggtggctcatggtgcaggtttgctgggtgagagacagacaccagacgcccaggctctgggggcaacccttgtgtcaggtatcccacccaagcggcgcagaccactgggcctctgacttggccccctggaggtgggcccttcctggggttacaaagtctgagctgggagggagcagaggtgctcaggcgagaggcaggaatggggagtcccctgtctgaggagcgagtgccctcatgcagggggagagagtccttctcttggtcagccccaagaggcagggatgaagcccgagttttggctgcagactctgtcctgagcactgggccgaacctgctgcctctgtctgcatctcctcccaccccctcccctgctgccagctgaactcactctggctgaaaataaaaatgctcccccaaccccaatacttagcagcctcaggaaggtaactcacaagagtctgtctttcacaaaagggttattatcaactgtgggcctctggaatgggggaggggcagttgtcggaggaacttctggctaggaaggggtcggggtggcagtcacctgcactctcctgtgagtgtccaggagaaaggggtctgtgtcccacttactcattccatacccgggccatctgcctcccagtggacttcggactgggtgtccgggctgaccaagtccacccagcagggagggctctgggctgtcagctgtcacagcccaccctagacaccgctcctcctctgtctggtgtctgctcccagctcaaggtgggagccaggcaaggtgtgcccctcttctcccactccccagcaaagtcccccttttgtgagtgtagctgccagtacctaggtgaatggttgactcccctcggagccttcctgctccttggaggcccacctccaactgacctcctgtcctggcatcctcccgcacttcccccagaggcacaaggtcttgggattgggccttttaggtcactcttggccgccccctccacgccccccagagtggggcagcctgaaagtcaacctaagccacccccgccccgcgcgcggaggcagaagtccgggattcgtccctgacctgtctcgggccccttctgctagggtcacggcagagcgagcccagaagcgccgggtcactttacagacggggaaactgaggccagagagggcgtggccccgggacgggctggctggtggccgggctccgttagcggcccagcccaggccccaggtcgtcgggagctgcccctcagcccggccgcgcgctccccgagcgcgctccgccctcgccgccggccgcgcggtggggacgccccgggcggcggaggcggatgtgggcgggcggctccgggcgcggggcgggcgcggggcggggagagggcgggccggcggcggcggcaggaccgagcgcggcaggcggctggcccagcgcacgcagcgcggcccgaagacgggagcaggcggccgagcaccgagcgctgggcaccgggcaccgagcggcggcggcacgcgaggcccggccccgagcagcgcccccgcccgccgcggcctccagcccggccccgcccagcgccggcccgcggggatgcggagcggcgggcgccggaggccgcggcccggctaggcccgcgctcgcgcccggacgcggcggcccggtgagtccccgcccgccgtggccgcccgggcctggatttcctccccgcgggccgggccgctttgttcgcggccggtcgggccggggcgcgagccgcggcgccgccagaatggaggagcgggagcaggaagtggccgagcgggcctgggcggggagggcgcggggcgcgcgggcccggccaagggagggcggccccacgccgggcgccgggggtgcaggctgccggccccagcctccctcatgaccttggggaggccgctccgccgggcgaggccgggacccgagagaagggacgccgccgggcctggagctggggctcggggtgcccctgcgggccgtggggctccccgggcgctgggccagcgaggcagccggcggaggtgccccggggttggagaaagactcgccgcggccggccttcaagtttgtgggagggccccggaaggagacttcgtttcccacggacgaaaagttgtacgtggtggcggggtacccaggctagccacaaaggactgtgaccctcctgggccccggaactgcttcctgtcttgggtgggccctggaggtcctgcccgcccatcccagaggccaaggcttggagggcagctggggcttgccccttagattgagtatcctggggcgctagcgagcttggtcctgtcgggacggcctctgagtgctgccttggtcagcgggtgagcttgggcccctgctctgcagccagaggccgccccacattcactcctgggtctctcggccttgctccaggtggccacttcttgactgctttgagtccctcatccgagcgaagggcggacggagtccgttggtgggggtccggttgcctctcccgggagctgtgtagacttctcatacac

SEQ ID NO: 3256 - DNA, 6000 bp, Homo sapiens
cccacttttttttgtctttttttttttgttgttgttagatggagtctcactctgtcacccaggctggagtgcaatggagcaatctcgactcactgcaacctctgcctcctgggttcaagtgattctcctgcctcatcctcccaagtagctgggattacaggtgtgcaccaccatgccccagttaatgtttgtatttttagtggagacgggcttttaccatgttggccaggctggtcttgaactcgtgacctcaagtgatccacctactttggccttccaaagtcctgggattacaggcgtgagccactgcgcccgactggattatttagagtatctcttattattctttgtacctctgtggtatcagttgtaacacctcttatttcatttataattttatttatttgagtttttactcttttttttagactagctaaagttttgtctgtctctctctatacatatatatatatatatatatatatatatataatttatttatttttttaaggacggattcttgctgtgtcacccaggctggagtgcagtggtgcaatctcagctcactgcaacttctgcttcccaggttcaagtgattctcctgcttcagcctcccaagcagctgggattacaggcacctgccaccacgcctggctaatttttgtgtttttaatagaaacggggttttgccatgttggtcaggctggtctcaaactcctgacctcaggttatacgcacgccttggcctcccaaagtgctgggattacaggcatgaaccaccgcacccagccagttttgtcaattttgtttattttttcaaaaaacagtcttagttttattcatcttttctttcttttctgtttttttggtctctatttcattttggctccaatttttattatttcattctttcttctaattttgggcttagtttgttaccttttttctagtttgttgcagtataaacttaggttgtttactggagatctttcttttttcttaatggaggcatttatcgctgtaaacttccctcttaaaactgcttctcctgaatcccctaaaattttgatgtgttgtattctattttcatgtatctcaagatttaaaaaaaattccttttgattttatttggcccattggctgttcaggattatgttactaaatttccacagatttgtgaatttttcagttttcttcctgttattgatttctagttacatatcggtgtggtcagaaaagataattaatatgatttcgatcgtcttaaatttgttgagacttgttttgtggcctactgtatgttctatccggaagaatattccacgtgcgcttgagaagaatgtatattctcctctagttggatagaaagttctgtatgtgcctgttaattccatttgttctataatgttgttcagatctgccatttccttattgattttctatctggatgatctgttcattgttgaaaacagggtattcaaatcccttactattattgtatggttatctatttctcttttcagtttggttaatatttgctttatatatttaggtgctttgatgttgggtgcctacatgtttacaactgttatatctgcttgatgaattcacctccttgtcaccacataactaccttcttagtctcttgggactgttttttacttgaagtctattctgatataagtatagtcacccctgctttcttttggtttccatttgcatgaaatatttttttccatccctttacttccagtctgtctgcccttaaatctaaagcaactctctttcaggcagcaaataattgtatcttattttttatatatattctgtcattctatgtcttttattttttatttttatttttatttttttttttttgagatggagtctcgctctgtcgcccaggctggagtgcagtggcgcgatcttggctcactgcaacctccgcctcccgggttcaagcaattctcatgcctcagcctccctagtagctgggatcacaggtgccctccaccatgcctggctaatttttttgtatttttagtagagatggagtttcaccacattggctaggctggttttgaacttctgacctcaagtgatctgcccgccttggcctcccaaagtgctaggattacaggcttgagccaccgtgcccaacctctatgtctttcagttggagaatgtaatacatttacatttaaagtaattatcgatagatagggacttactatgccattttgttcattattttctatttggtagttcgttctttcttttcttcttctcttggtgtgctgagctgctttttaagcagatgaccaccattctgtctgttttgagtccctatgttactgtcccccaaattccagaagttttggggttctgaatccctgagactttctggagattctgtgatgagttccttcttggatttccctactggcagataaagagtcagctttccgaggtctgctaatcagttacctctagtccatctactctgtagcttctaccattttgttgcttccactacctgatctttgtccttgtgagtttatgtctaaaagaaataaaacattctttattgctatattagtgagattttgggaggcagcagaaccacatgtacatgttgagcatgccatctttattctgaagtctgaaagatattttagaaagctttcaatacaaaagcatccaaaaaaggttttgttgctttaagcagactatgaaaattggtattgtcataattttacttgctattcaaattatagttccagagttaggaatgttagtattacctgggcatcacctgggtgcttactaggagaaatacagactcctgagccccctacaggattttttttgtttgtttttgtttttttgagacggagtctcactctgtcacccaagctggagtgcattggtgcgatctcggcccactgcaagctccgcctcccgggttcacggcattctcctgcctcagcctcccgggtagctgggactacaggcgcccgccaccacacctggctaatttttttgtatttttagtagagacggggtttcaccgtgttagccaggatggtctcgatctccccctacaggaatattgaatcagaattagcattttgaaagatccctaggagattcctatatatcctgatggttgagaagtgctaatatgaacttgtaattaaaggaagctaactctaatgaattttaatctgggatttaaaaatctggatacattttcttactaaattgttctcaaaattctcgaggttgctgtgtgatataaaaaagaaagaggtgcattttcatgagattttcgtcaggtgtgaaacgaaaattccatttcatttaccatgagaagagatgtcagactggttgtgctcagacttttcttagttgcccacagttcttgaggccggtggtggtttttttagattggacagattgagtcttcagtcacacgttgagctgccataatgaaagcgtagcttctcctagaggcaagggatagattgattagttctatgtccgacatttcacccaataattcataagtgctcaataagtgattgtggggtgaatgaacaaaaaacaagatacaacccctgtcttcaagattgtcacaaagcaacagcaaagaccaagaaataaattgaataattagcatacaggggtgaccatttctagaaacagtaagcacagggaaggtgtatccagctcagcattgctggcacaaggagccaaggagctgattctcttagtgaacagaacttggtggatttacagcagcagctctcacactttagtgtgtatcagaatcacctggagtgcttgttgaaccacagacacctgtgccctatcctcagaatttctgattcagctgggtgggcccaagaatgtgcaaatctaataagttcctagaagatgctataatactggtcttggaaccacagtttgagaaccacttaacttagcgaattataaaacgtactgatggctggactctagcagcttataggaaggaggcggtgatactgaaggcagaagcttaaggagcagggattttattgtggagattgtggggagccattaacaggagagtgatggactctcatttgccttttggaaagatcactttgggtgtggtgtggaggatggatcagagtcaagaatacgtggggaccagaaaaccaaataagtggtttattatagccatctaagaaataataaaaacttggagtaggagcaagaagatgaatatccttaggacttggtggccaattggaagtgggaggggcagagagggaggagttaatgagagccatcagatttctggctgtgttgggattgtgtgattcaagacacaggaagagaagtgggtttgaagcaaggttgtggagaaaagcaaaggaggtgagtacgggacatgctggatttgagatgccagcaagatatctgggtggactcccttgtaggcagttttacttatgaaattggaggccagctgcaaggtctggtaagtaatctagccccatccctcctgccacttccatttgatcccccatattgtttgtttggatcaggcattgtatttgtaagcaacaatatgaatataacctttaagggccttgagaatacaaggcactttctcaagaaaacaaatgttctactgttttgattcacggggtaggtgggcggaagaaagagctgaagtgcagagtcttctaacaccagaagaggttaataaagccgccctctgagtggccagtcgaactggaacttggtaagcttgaaaggggcaaaaatcacttgactggtctgcagtgccatatgacaaacagctgagactaattagctggattgtgggtttttacagcgatgcctgttttgaaagttgatggagcgaactgcttttccaaagactcttttgaaaaactttttaagtaggccattctgactttaacatttctctttgtcttaacattagacaaaaagtaaccttcctgaagaggacatgtgattggaagttgtcaattgttgaagcattggtaactccagtctctaacgttttagaaaatcataacaagcggttctctaccctgtaaaggtatggttttgtatttatcttttttttttttggtagtggttttgagctctgtcatgtcaattttcatgcgcttaaattatgtgcaatataacatacaataccattgcacgtactgtttttaaactaaagacttaatgatgtctactaaatttcttgggattagtttgaaaagtgcattttcagtgaccacggagtgggtatgaatactgaccgcattcttcctttcttttctgtacttgaataaagaaacataggtttttactttcaggaaattgttgaatatgagagctgattaggaaattgaattattctgagagtcttgcttatcctctgagggttgtttgacaaaaattcaagcttattggtgttttgtttttgatagtattaatagcttttgttttgttttgttttgttttttaaatttgagacagagtcttgctctgtcgcccaggcttgagtgcagtggtacaatctcgggtcactgcaacctctgcctcccaggatcaagtgattctcctgcctcagcatcctgagtagctgggaccccacgctaccatgcctggctaatttttgtatttttagtagagatggggtttcaccatgttggccagcctgctttctaactcctgacctcaagtgatcttcccacctgggcctcccaaagtgctgggattacaggcatgagccaccgtgcccggcctaaaagtgttaatagttttaatggaggaatgtaagtgtgtgttttagtataaggtttatttcttctgggaattaaatctgcttttaaattagtgttaattctgttaggtttgataagggtattgttatgtaaggaaatgtccatatattttagaaatacgaaatgaagtatgccggag

SEQ ID NO: 3257 - DNA, 6000 bp, Homo sapiens
tcctagcagatgtgaggtaatcaaaatcattgtggttttgatttgcatttctctgctgattagtgatgtcgagcactttttcatatacttgttgaccatttttaatgtattctttgaaaaaatgtctattcaggtctttcgcccattaaatttttttttcttttgggggttgtttttttggtattcagtagtatgaggttcttgtatattttggatattaacccctgatcagatttacctttttttcccttctataggttgccttttctttctttctttttttttgaggtggagtgtcattctgtcacctggctggagttcaatggcacaacctctgctcactgcaacctctgcctccaggctcaagtgattctcgtgcctcagcctcccgagtagccaggattacaggtgcccaccaccgtgcccagctaatttttgtatttttagtagagatggggttttgccatgttggtcaggctggtttcaaactcctgccctcaagtgatctgccctctttgggttcccaaactgctgggattataggtgtgagccaccatgcccggccagttgcctttccattttgttgtttcctttgctgtgcagcagctttagtttgatgtaatcccacttttttttgtctttttttttttgttgttgttagatggagtctcactctgtcacccaggctggagtgcaatggagcaatctcgactcactgcaacctctgcctcctgggttcaagtgattctcctgcctcatcctcccaagtagctgggattacaggtgtgcaccaccatgccccagttaatgtttgtatttttagtggagacgggcttttaccatgttggccaggctggtcttgaactcgtgacctcaagtgatccacctactttggccttccaaagtcctgggattacaggcgtgagccactgcgcccgactggattatttagagtatctcttattattctttgtacctctgtggtatcagttgtaacacctcttatttcatttataattttatttatttgagtttttactcttttttttagactagctaaagttttgtctgtctctctctatacatatatatatatatatatatatatatatataatttatttatttttttaaggacggattcttgctgtgtcacccaggctggagtgcagtggtgcaatctcagctcactgcaacttctgcttcccaggttcaagtgattctcctgcttcagcctcccaagcagctgggattacaggcacctgccaccacgcctggctaatttttgtgtttttaatagaaacggggttttgccatgttggtcaggctggtctcaaactcctgacctcaggttatacgcacgccttggcctcccaaagtgctgggattacaggcatgaaccaccgcacccagccagttttgtcaattttgtttattttttcaaaaaacagtcttagttttattcatcttttctttcttttctgtttttttggtctctatttcattttggctccaatttttattatttcattctttcttctaattttgggcttagtttgttaccttttttctagtttgttgcagtataaacttaggttgtttactggagatctttcttttttcttaatggaggcatttatcgctgtaaacttccctcttaaaactgcttctcctgaatcccctaaaattttgatgtgttgtattctattttcatgtatctcaagatttaaaaaaaattccttttgattttatttggcccattggctgttcaggattatgttactaaatttccacagatttgtgaatttttcagttttcttcctgttattgatttctagttacatatcggtgtggtcagaaaagataattaatatgatttcgatcgtcttaaatttgttgagacttgttttgtggcctactgtatgttctatccggaagaatattccacgtgcgcttgagaagaatgtatattctcctctagttggatagaaagttctgtatgtgcctgttaattccatttgttctataatgttgttcagatctgccatttccttattgattttctatctggatgatctgttcattgttgaaaacagggtattcaaatcccttactattattgtatggttatctatttctcttttcagtttggttaatatttgctttatatatttaggtgctttgatgttgggtgcctacatgtttacaactgttatatctgcttgatgaattcacctccttgtcaccacataactaccttcttagtctcttgggactgttttttacttgaagtctattctgatataagtatagtcacccctgctttcttttggtttccatttgcatgaaatatttttttccatccctttacttccagtctgtctgcccttaaatctaaagcaactctctttcaggcagcaaataattgtatcttattttttatatatattctgtcattctatgtcttttattttttatttttatttttatttttttttttttgagatggagtctcgctctgtcgcccaggctggagtgcagtggcgcgatcttggctcactgcaacctccgcctcccgggttcaagcaattctcatgcctcagcctccctagtagctgggatcacaggtgccctccaccatgcctggctaatttttttgtatttttagtagagatggagtttcaccacattggctaggctggttttgaacttctgacctcaagtgatctgcccgccttggcctcccaaagtgctaggattacaggcttgagccaccgtgcccaacctctatgtctttcagttggagaatgtaatacatttacatttaaagtaattatcgatagatagggacttactatgccattttgttcattattttctatttggtagttcgttctttcttttcttcttctcttggtgtgctgagctgctttttaagcagatgaccaccattctgtctgttttgagtccctatgttactgtcccccaaattccagaagttttggggttctgaatccctgagactttctggagattctgtgatgagttccttcttggatttccctactggcagataaagagtcagctttccgaggtctgctaatcagttacctctagtccatctactctgtagcttctaccattttgttgcttccactacctgatctttgtccttgtgagtttatgtctaaaagaaataaaacattctttattgctatattagtgagattttgggaggcagcagaaccacatgtacatgttgagcatgccatctttattctgaagtctgaaagatattttagaaagctttcaatacaaaagcatccaaaaaaggttttgttgctttaagcagactatgaaaattggtattgtcataattttacttgctattcaaattatagttccagagttaggaatgttagtattacctgggcatcacctgggtgcttactaggagaaatacagactcctgagccccctacaggattttttttgtttgtttttgtttttttgagacggagtctcactctgtcacccaagctggagtgcattggtgcgatctcggcccactgcaagctccgcctcccgggttcacggcattctcctgcctcagcctcccgggtagctgggactacaggcgcccgccaccacacctggctaatttttttgtatttttagtagagacggggtttcaccgtgttagccaggatggtctcgatctccccctacaggaatattgaatcagaattagcattttgaaagatccctaggagattcctatatatcctgatggttgagaagtgctaatatgaacttgtaattaaaggaagctaactctaatgaattttaatctgggatttaaaaatctggatacattttcttactaaattgttctcaaaattctcgaggttgctgtgtgatataaaaaagaaagaggtgcattttcatgagattttcgtcaggtgtgaaacgaaaattccatttcatttaccatgagaagagatgtcagactggttgtgctcagacttttcttagttgcccacagttcttgaggccggtggtggtttttttagattggacagattgagtcttcagtcacacgttgagctgccataatgaaagcgtagcttctcctagaggcaagggatagattgattagttctatgtccgacatttcacccaataattcataagtgctcaataagtgattgtggggtgaatgaacaaaaaacaagatacaacccctgtcttcaagattgtcacaaagcaacagcaaagaccaagaaataaattgaataattagcatacaggggtgaccatttctagaaacagtaagcacagggaaggtgtatccagctcagcattgctggcacaaggagccaaggagctgattctcttagtgaacagaacttggtggatttacagcagcagctctcacactttagtgtgtatcagaatcacctggagtgcttgttgaaccacagacacctgtgccctatcctcagaatttctgattcagctgggtgggcccaagaatgtgcaaatctaataagttcctagaagatgctataatactggtcttggaaccacagtttgagaaccacttaacttagcgaattataaaacgtactgatggctggactctagcagcttataggaaggaggcggtgatactgaaggcagaagcttaaggagcagggattttattgtggagattgtggggagccattaacaggagagtgatggactctcatttgccttttggaaagatcactttgggtgtggtgtggaggatggatcagagtcaagaatacgtggggaccagaaaaccaaataagtggtttattatagccatctaagaaataataaaaacttggagtaggagcaagaagatgaatatccttaggacttggtggccaattggaagtgggaggggcagagagggaggagttaatgagagccatcagatttctggctgtgttgggattgtgtgattcaagacacaggaagagaagtgggtttgaagcaaggttgtggagaaaagcaaaggaggtgagtacgggacatgctggatttgagatgccagcaagatatctgggtggactcccttgtaggcagttttacttatgaaattggaggccagctgcaaggtctggtaagtaatctagccccatccctcctgccacttccatttgatcccccatattgtttgtttggatcaggcattgtatttgtaagcaacaatatgaatataacctttaagggccttgagaatacaaggcactttctcaagaaaacaaatgttctactgttttgattcacggggtaggtgggcggaagaaagagctgaagtgcagagtcttctaacaccagaagaggttaataaagccgccctctgagtggccagtcgaactggaacttggtaagcttgaaaggggcaaaaatcacttgactggtctgcagtgccatatgacaaacagctgagactaattagctggattgtgggtttttacagcgatgcctgttttgaaagttgatggagcgaactgcttttccaaagactcttttgaaaaactttttaagtaggccattctgactttaacatttctctttgtcttaacattagacaaaaagtaaccttcctgaagaggacatgtgattggaagttgtcaattgttgaagcattggtaactccagtctctaacgttttagaaaatcataacaagcggttctctaccctgtaaaggtatggttttgtatttatcttttttttttttggtagtggttttgagctctgtcatgtcaattttcatgcgcttaaattatgtgcaatataacatacaataccattgcacgtactgtttttaaactaaagacttaatgatgtctactaaatttcttgggattagtttgaaaagtgcattttcagtgaccacggagtgggtatgaatactgaccgcattcttcctttcttttctgtacttgaataaagaaacatagg

SEQ ID NO: 3258 - DNA, 6000 bp, Homo sapiens
ccagggtcataaagattgatgcctatgttttcctctaaaagttttagagttttagttcttatattcagctatttgattcattttgagttaatttttgtgtatcatgtaattttatatatggtattggtaagagtccaattccttattcttcttccttttttttttttttttttttttttcggagacagggttttgttctgttgcccaggctggtgtgtagtggcacgatcttggctcactgcaacctccgcttcctgggctcaagcgatcctcccatctcagcttcccgagtagttgggactacaggtgcaagccaccacgtctggctaatttttctatttttagtagagacagggtttcaccatgttgcccagttgggtctggaattcctgagctcaagggctctacctatgttggcctcccaaagtattgaaattacaggcgtgagctaccgcgccaggcctcagtttcattcttttgcatgtagatatccagttctcccagtaccatttgctgaggaaacttctttctccattgaaagatcttgactatagatgcataattttatttctagactctcaagcctattccacttatctatatgtctttatatcaataccataggttttttttttaattactatacctttgtagtacattttgaaatcaggaagcatgaactttttaaatttttgggtcctttgcaatttcatatgcattttagcatacacttttccatttcttcaaaaatgttgttgaatctgtagctctatctggggaatatagccatcttcacaatattatgtgtttgattccatgaacattaaatgtattttcttttcttttttttttatctgagaagtttcactcatcacccaagctggagtgcagttgcacgatctcggcttactgcaacctccacctcccgggttcaagcaattctcccgcttcaaccacccgagtagctgggattacaggcacccaccaccacgcccggctaaattttgtatttttagtagagacgggtttcgccaagttggccaggctggtctcaaactcctgacctcaggtaatccacccgcctcagcctcccaaagtgctgggattacaagcgtgagccaccgcgcctggccatgtcttttcatttatttagattttctttttttttcagtagtggtttgtggttttcaatgtataaatcctgcaccttcttggttaaatttatgcctaggtattttattctttttgatattattgtaaatggaacttttaaagtttccttttcaattgttcatttctaatacattgaaatgcaactgatttttatgtgttgatctagtatcttgcatctttgcttatttcatttattagcactaatagattttttatttaggattttccatatataatattatgtaattggttccttttgttggaaagggatattaagaaatcaacatccaggtgctaagtgtactcgtagctactttgatataattgcttctaggacctcttagcagacagagctagataatacatacatatacacatacatatatctatatttatttattaaaatccatgaattcttactgattccatccactttaattctattaggaaaactggaggcagaactctccatgttgcaagtagcagtgtcagaaaagccccagtgtgggaagcaagaggtatactgtgatcgattctgtggctgcagtaagaagtggcgtagagatgactttgaactgacacacgagatgtgttcagtgtacttagtttctgtaataacactctccttgttttcttcctacctctctggatactctttttttggattcctttttgaacttccattgctcatgccttaaatgctgggtgttcatctgggttctgtaacaagcctattgccctctcagctcactttctagattagctcattgattctaatgccttccagtaccttttgggtaatagctacagcacatgttttctgtgcttcagataggcctgtttgactacatactaaacagcttcacttggatattctgttggtgctagtgtgtcaaaatggaaatgtcctaaactcatcactatggcctatttcacccttcctcctggttgcaactaggttttcttcctgttgcttaatggtttcttgttgcccaaaccagaaactgggcatccccatggactactgcctctctttcacacccctacatcccagtcctcttgattcactctcctaaatatgtcaaatatgtccattcatctccatccttatggccactgccgtaatcagatcgctattatccctcacttggattacagcgtgctaattgacctctcagacccattcttagaaccattaaaaacttgagttctgagttttaggcctggctgtgccacttattagctgcatgatcttggtcagactgcttaatcgctttaggactcagtttcctcatctgtaatacagaggtaagaatagtacctacttcataaagtagttgtaagacacgtatgaggtgatgtagtcaaaactattagcatattggctgactcatagtaaatgatcaagaaatgttagttatgatcatgatcatcattgcagggttattcaccgcacagcctctgttatttctccattttcttttctgattgctttcagtctttcagcttttctgaacctcttcctgttgctccagtgttgaatgctatcttttgcttccaggccttccctctgctccattttcctggaattctcttctcccttgccccttgccctcattcattctaagtttatccttaactttctcttgatttggtgtcatttatctgtgctccaataacactctttaacttcctttattgaggctcttatctcactactggagttgcctacttattcgatggtctctcaagtaagtcctgacgtcagggaccagtttaccttgtttactaatagggtgcctgacttgatgaatgagtgaatgaatgggtgatgaatgggccatagcaccatcctaggttttctgatctcctgtctggtatactcctggtgagagccttgcctggccacaggagtggggaaagctgaaggcaggctttccctgtgccatatcagccattagcaattactacattattggtttcccagattttagctgatcagtgattcccaggactattcctctggacatgaacatgaggctaccttttccctttttttttttttttttttttttttttttttttgaaacagagtctcgctcggtcgcccaggctggagtgcagtggcgccatctcggctcattgcaacctccacctctcgggttcaagcgattctcctgccctcagcctcctaagtagctgagactacaggcgcgtgccacgacgccctgctaattttttgtatttttagtagagacggggtttcaccgtgttagccaggatggtctcgatctcctgacttcgtgatctgccggcctcgggctcccaaagtgctgggattacaggcgtgagccacctaacccggcctttttctctcttaacctcaccaacagtctgatggcccttctctcacacgggaagagctcttgaagttatcaacctgttaggacatttgttatctctaaacccgagtttactgtgttatgtttgcctggaaatgttatatcaaatgtatgaaattgccaactgtttgtaatttcatatggttcatcctatatgtgattttgtaaattggacccacctgagaagctaactgctgtaatgccaactgtgagtagctacagactggaaaggtgatggagttgaccgggtgggcctgcgacagctggaatttgcggtggaggtagacacaagtcagcgagacggcttagaaggcagaagggaagctgaactaaggcttctcaacattttactctgcttagaagtggaaacatttggttcaaagggcctttgccttagactccatagggacaggcccaagggctgctgttcacacctcctggccactgagagggatgaacttggctgcctctgagtgggaaccacgaggtctgaccccctacgcagtcccaggttcactaccccgcaggccggagcgacaccgttggcgctgggagaagagagccgctgggtggcagcaaaggcgcgcaggtttcttccgacagaggcggttccttaacatactgtagttttcttctttttaaactcattgctctaacactcttagaaatttacagtggttttatattcttgaattacacagtgtgagcagagactccgtttgccatttcctcccggaattacattgatttttttcctgcgaaattttttacttatttttctcccatgttatttccaggaatcctgggcattcccttgccccggaaacgccgtgtccaggccgacctaagccaggagccgcaggggcgggaagccgggggcagggccgggcctgggacgccgcctcaggagccgcgcggactcgggaacctcgggcggggccggcgtgagtacgcccggcacctccggctgctacggtggcgaccgcgaactgatgccgtggaaaacacccttagaacatggctttttggggaggtgaataggggagagtccccaaacgacacctcgccgcgcaccggtccttggtgcagtttgtaaatgtccctcctgtgtcccaaaacgaaaacactcctatattttgtagcgccttccagaatggggcagcggaaactagtgttgggacaaaggaggcgagcggggccttttcggggctcacagaggacccctcggaggcgcggccgccggggagagcgcgacagcaccccgccccccgccagccgggcgggggccgctcccgaggtgacaggagaaggcgggaggtggaggagagaaggtcccgccccacctcgctctcctttacgggaagtgatgtggggccaggcggaaaatacccgccaacgacccaaaaaaggccggcggcgggtggacgcggcgcgcgaggacccgagccaggcggggacaggacggcggggcgagccaggtgagggggcctgaggagcgggaggcgcgcggcgggtccggtccctccgggagggccgagcgaggcgtccccctggggccgtcctagggctggggtccgagtgcgccgcccttcctccccgcctccaggcgcccgagcccgcctgaagagtggcttctctcccaggccctcagcgcagaccccagtgatgacaactgcctggtgctggccaggtgcggtcccaggtccggccagggtctcagatcgcctccgggttgcatccaggtgggaggatgcccatcaggggtaggaaactttccaggagggaaaggaggaaagtccccgacctcccgcacgccccccggttcattcctccctcttttgctttcagtttaactgtttaacctggttgccctccggttggtgagggtctggactgcagactagctgcgagggaggggctctctcttctcctgtcagttagactgaaaactacctggcagccaggccctccggtcgggactggtggtggtgcagatatgatgacaggctttggtaactattgccaaagcctgtctctgtcccaatagatcaccagttcagcaaagtcaggcctgaagcgaagggagtcttgtgagccctggactgaggagccttcccagcctttccgctcctgctggccacctgggcccacatggcctcagggtcttctgccacagggtccttacccctacagcttaacagctgttctttccttctggatggattctcacattttatggttggttgatcagtcagatgttggaattgggggtagagggattatagagttgtgtgtgctatttaagttttctgtaatcattgctaattaaatttgttgattctccactcactgttcttgttcttttttttttttcggccttaaaaacttgctttagagggaaaatacaatctggaaaacagtttct

SEQ ID NO: 3259 - DNA, 6000 bp, Homo sapiens
gaatttacattttaagaaaaaggatatcaatataaaaacatgttgatttagataaagaactttgtacatatgtgattacatttatagatctcattgaaaacacaagcttaatggaagcattccctttgaaaaccggcataaggatgctctctgtcactattcatattcaacacagtactggaagtactggccagggaatcaggcaagagaagaaagaaagggtattcaaataggaagagaggaagtcaaattgtctctgcagatgacatgattgtgtatttagaaaaccccactgtctccacccaaaaactccttaagctgataagcaacttcagcaaagtctcaggatacaaaatcaatgtgcaaaaatcacaagcgttcctatacacccttaacagacaaacagccaaatcatgagtgaactcctattcacaactgctacaaacagaataaaatgcttagggatacaacttacaagggatgtgaaggacctcttcaaggagaactacaaaccactgctcaaggaaataagagaggacacaaacaaatggaaaaacattccatgctcatggataggaagaatcaatcatgaaaatggccatactgcccaaagtaatttatagattcaatgctattaccatcaagctaccaatgactttcttcacagaattagaaaaaaatactttaaatttcatgtagaaccaaaaaagagcccatatagccaaggcaaccccaagcaaaaagaacaaagctggaggcatcaagctacctgacttcaaactatacaaaaaggctatggtaaccaaaacaccatggtactggtaccaaaacagagacatagacaaatggaacagaacagaactcagaaataccaccatacatctacaaccatctgatctttgacaaacctgagaaaaacaagcaatggggaaaggattccctatttaataaatggtgctgggaaaactggctagccatatgcagaaaacagaaactggaccccttccttacaccttatacaaaaattaactcaagatggactaataacttaaatggaaaacctaaaaccataaaaagtctagaagaaaacctaggcaataccattcaggacataggcacgggcaaagacttcatgacaaggccaccaaaaagcaattgcaacaaaagccaaaatcgacaaatgggatctaattaaagagcttctgcctagcaaaagaaactatcgtgagagtgaacaggcaacctacagaatgggagaaaattttcgtaatctatccatctgacaaagggctaatatccagaatctacaagggacttaaacaaatttacaagaaaaaaacaaccccatcaaaaagtgagtgaaggatatgaacagacacttctcaaaagaagacatttacgcagccaacaaacttatgaaaaaaagctcatcatcacttgtcattagagaaatgcaaatcaaaaccacaatgagataccatctcatgccagttagaatggtgatcattaaaaagtcaggaaacaacagatgctggtgaggctgtggagaaatacgaacgcttttacactgttggtgggagtgtaaattagttcaaccattgtgaagacagtgtggcaattcctcaaggatctacaaccagaaatgccatttgacccagcaatcccattactgggtatatacccaaaggattacaaatcattctactataaagacacatgcacggccaggcgcggtggctcatgcctataatcccagcactttgggaggccgaagcaggtggatcacgaggtcagcagattgaaaccattctggccaaaatggtgaaaccccatctctactaaaaatacaaacattagctaggtgtggtggtgcacacatgtagtcccagctactacgtaggctgaggcagaactgcttgaacctgggaggcggaggcagaggttgcagcaaaccaatattgcgccactgcgctccagcctgggcaacagagccagactccgtctcaaaaaaaaaaaaaaaaaaagaatttatgtactttgtagggacatggatgaagctggaaaccatcattctcagcaaactaactaacacaggaacagaaaaccaaacaccacatgttctcactcataagtgagagctgaacaatgagaatacatggacacagggaggggaacatcacacactggggcctgtcgggggcgggtggggggcaaggggagggagagcattaggacaaatacctaatgcctgcagggcttaaaacctagatgacgggttgacaggtgcagcaaacaccatggcacatgtatatctatgttacaaacctgcacgttcagcacatgtatcccagaacttaaaaaaaaaaaggagaaaaaaagaaaatacaaacttaacgctagagtaaaaagtaataccaattcttagtaacttcaaaaaaaattttaactatatgaataatagcttcataataaattaactactcccttaacacaattattaatgcaaatttgcttagtggattaaaaaacatctgtgtcatatctgccatcctctcaaacaacatctaccttctctaaaacctcaatttgatctgagccatcccaactctcaactactcctccacactgcctgagatgaaaaacggctgggattgaatgactgccaaaatatattaaaccaatctaactgcagggtaacggagtggatttctgcctgaggtagtttaagttggttcacatatctacaaacactattgcaaacacccttcccaattattatatacacactgagactggcaccccatgatactgcatatgctgaattcctagaaaaataaacctcaagtagaaaatattcctaaaatattcacttttgtttaaaaggaaattacttatctgtcctggtaaaaagacataaaatgacaaatatacaataaacattaaaattaacagtgttaggttaaaaaatcattatccatgatttatttttaagtacatctatgtttttgctagattagagttaacataattaaatggaactttaagcaattattacagttcatctccatgaggtatttgtgggtttttttgctttttgtttttttagatggagtctcgctctgtcacccaggctggagtgcagcagcgtgatcttgactcactgccacctctgcctcccaggttcaagtgatgctcctgcctcagcctcccaagtagctgggattacaggcgcatgccaccaagcctggctgatttttgtattttcagtagagacagggtttcaccatgttggtcaggctggtcttgaactcctgaccacctgatccacccgcctcggcctcccaaagtgctgggattacaggcgtgagccactgcgccaggcctaactccatgtagtattaacttttcttctcttctgattcttgtaccaactgcatcttttcttttaattccttctgatctttggcatactgttcaaatactggttgaaaaatatatactcctccagcaattccaaggacagtggcaaaaagcagttgtgcaaaagtcaatctcctaaacattgctgcaacaaatacagctcaaggaaaagctggttttggaaagtcacactccacacccaggaaatctcttcaaatctgcatacaaaaatggaaagcaaagccatcacttagtacaatgtccttttaaaagatgttatgtcactactttgcactggagtgaacaatatttttataatatgttactaattaaaacaagaatataaatacataaggagtacaggaagtgaattagggaagggtataagacaaaactaaaaccttttctattacagaatgttctcaatggttttaaatgcatactttttctttttttttttttttttgagacggagtctcgctctgtcgcccaggctggagtgcaatggcgcaatctcggctcactgcaagctccgcctcctcggttaacgccattctcctacctcagcctcccgagaagctgggactacaggcgcgtgtcaccacacccggctaattttttgtattttttgtagagacggggtttcaccgtgttagccaggatggtctcgatcctctgacctcctgatccgcccgtcttggcctcccaaagtactgggaatacaggcgtgagccaccgcgcccggcctggttttacttttaacaagaggagtgggccgcacgcggtggctcacgcctgtaatcccaacactttgggaggccgaggcgggcggatcacgaggtcaggagttccagaccagccaggccaatatggtgaaaccccgtctctacaaaaaaacacaaaaattggccaggcgtggtggcgcgcctgtagtcccagctacttgggagctgaggcaggaaaatcactggaacccgggaggcagaagttgcagtgagcccagattgcgccactgcactccagcctggactacaagagcgaaactccgtctcaaaaaaaaaaacaaaaacaaaaacaaaaaaaaaacctaacaacagcaacaacaacaaaaaaaataggaaccattcggcctgtttccacatctgtacaacaagctaaatcatccctaccctgcctacctcgttgaacaggcattttttgtgagagcaacgaacctgaaatgttaacaccaacactgacgtctacaattaccgttaccgtttttaataaccactcaggtacctccgactgttctgcgcctgctccacgtcactaaactcgctaccgcctgctcccctccagagaccgggggccttccagcagttttcggacccccgagcacagagaccgccaagccaaaggcgagtagcaatccctcggttcggaaacggcgaaaggaaaccgcaaggaggccaccacgtcgggtgggagctacgaagttgcccgttcccggttacttccgggcttgcgagcgacgactgctctcaaaggccaaacttaatggatggacgagcagcgcgctactgcagctttcttccgccttaggaaggtggcggccagggatgaggaggcccctaagcaagtgcggaatggagccggggggcggagatgccagcctcactttgcatggtctccagaaccgctcccacggcaagataaagctgcgaaagagaaagtctaccttgtacttcaacacccaggagaagagcgccaggcgccgcgggggtgagtgaggggacactgtctggagagctcctacccccatctaaaaggaaccccctccatttcattaccagccagttgcccgttgagctctgtgttgccagatcttgagttttgaaatgctgggaaatgctggaaacacagattttaatataaattctgatttttaaatgttggcaactaaattcaattttttaaaaaatactctgtatttggccgacaggctgtccatttgtggtcaagagcaggactttggagacatcacacagacccgggtttgaatcctgataagtaatttacaactttatttggacaaggcagtttaatttctgggcctcaatttgctcgtctgtaaaatggggctaataatacctatcccataatattgtttggaggattaagtgagatgcatgtgaagaaattaacacagtgcctggcatatataatagtaatcatcaatatatatgtacagaggaccattttatattgcacatatacaaagggctgcttcccaaattagtaatttgttagctggtttctttcattagatacacacatagtatgacctaattaattagcctaaggccttagttaacccactcttttttttttgtatttattttaatattatctttacacaataagttgcaagaaaagttggttaaactaaaagagtggcagtcacccagtgatgacgctgtggtgcttgtataaccaaccaagttggctttaagaatggtgtggagggaccagaggtcactactgtgccttacaaggagccaaccagagcagcagattttaagttttgcaagtggaact

SEQ ID NO: 3260 - DNA, 6000 bp, Homo sapiens
aaaccccgtctctactaaaaatacaaaaattagccaggtgtggtggcagacacctgtaatcccagctactcgggaggctgaggcaggagaatcacttgaacccgggaggcggcagttacagccagccaagatggtgccactgcactccagcctgggcgacagagtgagattccatttcaaaagaaacaaaacccaacaaaccttactgtggttccccattcaggtttcccctcctcttcctctttctttttacatgttccatgccatcacaggccaaaagacatataacatgagccacatgtggaattttaaattctatagctggcaaattaaaaagtaacaacagagatgacccccaaatccaaaacaggtaaaattaatttcatcttgtctaacccaatatatctaaggcatcatcatttgaacatttaatcaataaaaattataaaaatatttttattctttttttgtactaggcctttgacattcagtatgtattttacattttcagcacttctcaaattggactagccacatttgaagtcttcaacagctacatgtagctagtggctaccatggtggacagtgcagctctaagccatctatcctttttaaaaattttttgtagaaacagagttttgctatgttgcccaggctgttctcaaactcctggcctcaagcaatcctcccacctcagcctcccaaagtgctgagattacaactgtgagccaccatgcctagctgtgcataagccttatgcagtttgtagaggagccatctgggaagagcactaggctgtgagtaaatagacctgggatttagctctagttctgcttttaacacgttgtgaccttggtctatttacttcacttctccaacctcttctagcttcaaaattatgtatataatttgcttaaaataatcaatatgagagtatgaatgactgatcatatcctaatgaatctctacagggtcaagttctagatacgacaatgagttccttttagaggggttggagcaggtcaggggaggcttccttcacatcacaaaatgacctggtgggtcagctacagatggagggcagtggataggtcttggaggagcaggaaatttttctatcttgaagacctcttcatttgtaatctgacctacttcctgggatataaactgtcattgatgagattatgtatattttcttgtgattccagactttatggataccttgcataatctataaactagtagataactgtaagagaagaaaagccaggttgcggctcctaaattctgcctgttgttaatggaagaaactctgctactgctctgaattctccttccccatcatcttcccatttgaagcatcggtttcactggtttaaccctaatttctcaataacggaagcaaatattgcaatggggagagtacaaccccaccttaaaacaaataccctagaacctgtgtctttctaagctacacaaaacacgtcaggatttggactgcctttggaatgctgagccattaacccccactgacagaaatcggggggagcacaaactctgagtctcatctgatgacagcttaaaagatcatgggagtgaggctagagaaacttttacaccattagtcctgcccttgtactatctcctggcaactgaccccagcaattaatagcctaggaattacaatcctacttactgttgatgcctaattactatataggacgatgattatgcagatcattaaatgtttgtcaaattaaaaattttaaagttttaatttcaacactaaatcctcagtgggtttagatgtatacagacttcataaaatcatatcacacggtcttcttacaaggtaaaaaacacaaaatacaacggtgctctcaagtgatactttttttgcgggggatgggggaaggagtttcgcttttgttgcccaggctagaatgcaatggcgtgatctcggctcaccgcaacctccacctcctgggttcaagtgattctcctacctcagcctccagaaagtctgagattacaggcatgcgcgaccacacccggctaattttgtatttttagtagagacgcggtttctctgtgttggtcaggctggtctcgaactcccaacctcaggtgatccgcccgcctcggcctcccaaagtgctgggattacaggtgtgagccaccgcacgggcagatcacctcaggtcgggagttcgagaccagcctgaccaacacagagaaaccccatctctactaaaaatacaaaattagccgggcatggtggtgcatgcctgttatcccagctactcgggaggctgaggcaggagaatcgcttgaacccgggaggtggaggttgtggtgagccaagatcacgccattgcactccagcctaggcaacaagagcaaactccgtcccaaaaaaaaaaaaaaaaaaaaaaaagaaagaagtatacttctaatgtccaaataatacataatatagtcattttgaaaatctgcacatcataacaggattcctcatagcaggatattttcatgctcagtcttgtatttcagcacaaactaaagagttacacatcacagtatgtctgtagtatcatgggcttcccagatatggctggacttcagcaacagtagccttttaaaaacaaattccatggccccaatatcatttagttacttttatttaaacttaccagcaactgaacactatctttccctaaaagatgaagaatcttgtaaatgcttgcaaagattaagggataagtgtaactcctcagtctctctgtccattcccaagtcaaataaccataattagtaacattaaggagtaaatgtccaataatattgaaacctatttccgtgttttttttttttttaagatggggtctcactctcttgcccaggctggtctcaaacttgggctcaagtggtcctgcctctacaggtgcacaccacttcacctggcaaaatctattttcatttccatttataaaacaatattttattttgtggcagtcttaaaacagcattttatactggatatttgcattaaaaattcaattggccaactaaactcttaacttcttcaaggcagtaatgtgttttttactttctctgtatcctccaagtgctaagtactgtgggaatgtatgctaacggctgtgtcaagtatattaacataaaagaaagatacaggagaaatatttgtataaaataatggtatactttgatgagttaaaattatttggggaaaatacggaaaactgaaaatatgtatagtagtccccccttatctgtggtttctctttccatgtttcagttgcccagagtcaaccactgtctgaaaatatgaagatattttgagagagaccacataaaagttcacataacttttattatagtattgtgttatacttgttatattttaatactgttaatctcttactgtacctaatttgtataaactttatcataagcgtgtgtgtattttttacatatataaaaacaatatatatagagtttggtactgtctacagtttcaagcatccactagggattttggaaactatctactgaagacgagggagcaagggggactactctaaaagaaactgagcacaatttccaagatgaatacacactcatagtctggaaaagaaaccacaaaggatatttgaaaaccatgtgatgtgaaacttcaagagactgccagtattcatctggaacaaaacttgtctgcactaaaaagcagtttaatattcgtaaagctatggtaaacaagagcagataaatattttctccaagaagatctgaaaaacagaacaaaacaggtaatagtggcacaaaagtcaggcagttccacttgcaaaacttaaaatctgctgctctggttggctccttgtaaggcacagtagtgacctctggtccctccacaccattcttaaagccaacttggttggttatacaagcaccacagcgtcatcactgggtgactgccactcttttagtttaaccaacttttcttgcaacttattgtgtaaagataatattaaaataaatacaaaaaaaaaagagtgggttaactaaggccttaggctaattaattaggtcatactatgtgtgtatctaatgaaagaaaccagctaacaaattactaatttgggaagcagccctttgtatatgtgcaatataaaatggtcctctgtacatatatattgatgattactattatatatgccaggcactgtgttaatttcttcacatgcatctcacttaatcctccaaacaatattatgggataggtattattagccccattttacagacgagcaaattgaggcccagaaattaaactgccttgtccaaataaagttgtaaattacttatcaggattcaaacccgggtctgtgtgatgtctccaaagtcctgctcttgaccacaaatggacagcctgtcggccaaatacagagtattttttaaaaaattgaatttagttgccaacatttaaaaatcagaatttatattaaaatctgtgtttccagcatttcccagcatttcaaaactcaagatctggcaacacagagctcaacgggcaactggctggtaatgaaatggagggggttccttttagatgggggtaggagctctccagacagtgtcccctcactcacccccgcggcgcctggcgctcttctcctgggtgttgaagtacaaggtagactttctctttcgcagctttatcttgccgtgggagcggttctggagaccatgcaaagtgaggctggcatctccgccccccggctccattccgcacttgcttaggggcctcctcatccctggccgccaccttcctaaggcggaagaaagctgcagtagcgcgctgctcgtccatccattaagtttggcctttgagagcagtcgtcgctcgcaagcccggaagtaaccgggaacgggcaacttcgtagctcccacccgacgtggtggcctccttgcggtttcctttcgccgtttccgaaccgagggattgctactcgcctttggcttggcggtctctgtgctcgggggtccgaaaactgctggaaggcccccggtctctggaggggagcaggcggtagcgagtttagtgacgtggagcaggcgcagaacagtcggaggtacctgagtggttattaaaaacggtaacggtaattgtagacgtcagtgttggtgttaacatttcaggttcgttgctctcacaaaaaatgcctgttcaacgaggtaggcagggtagggatgatttagcttgttgtacagatgtggaaacaggccgaatggttcctattttttttgttgttgttgctgttgttaggttttttttttgtttttgtttttgtttttttttttgagacggagtttcgctcttgtagtccaggctggagtgcagtggcgcaatctgggctcactgcaacttctgcctcccgggttccagtgattttcctgcctcagctcccaagtagctgggactacaggcgcgccaccacgcctggccaatttttgtgtttttttgtagagacggggtttcaccatattggcctggctggtctggaactcctgacctcgtgatccgcccgcctcggcctcccaaagtgttgggattacaggcgtgagccaccgcgtgcggcccactcctcttgttaaaagtaaaaccaggccgggcgcggtggctcacgcctgtattcccagtactttgggaggccaagacgggcggatcaggaggtcagaggatcgagaccatcctggctaacacggtgaaaccccgtctctacaaaaaatacaaaaaattagccgggtgtggtgacacgcgcctgtagtcccagcttctcgggaggctgaggtaggagaatggcgttaaccgaggaggcggagcttgcagtgagccgagattgcgccattgcactccagcctgggcgacagagcgagactccgtctcaaaaaaaaaaaaaaaaagaaaaagtatgcatt

SEQ ID NO: 3261 - DNA, 6000 bp, Homo sapiens
tcatttgtgggctctcccctcaattagctgggagcaaactgagggcaaggaccacatgagacatctttttgtatcctccaggtggccttgcttagctggtttcaaagtgtgaacttaatgaatgtttgagtggacatttttcacctagtgattgctcaggaaatatcagtcagtggaaagggtacagtttgtccctctgattaggataattgtagaattatacactggagtatcactaaatagcattttttaatgacacacaggtgacatgaaaaattggtatttttaagggcttatcattcaatgtgatcttgacaaaccagaaaaataatacataattatgctgatttcttaaacacaacaatgaatagtgtacttactgaatgaataacatctaaatacaaggtagagtacaaacagaaagatattagcgaggtcccaaacacctaatatagcaaataataaactaaaggtgtccagatgttttaaaattagctagactgctaagatgctagtcagatcttcattcattggttcattcaacaccttgagtgcctgctatgtataaaacatcatgctaagcatgctggggatgcagcaatacattagcagtctctttcctcaaagagctcaacttttaagggagcagacaaagaagcacacaaaccattcaataacagagagagaacttattcaacagctgagtcatcagtcagtgaagataatcaccataaaggacatctttgtagcccaccgggacagctgtgctcaacagatggcagagggccagaacctaagagtagttgggcagaagtgtcaaccgagatgggtacacactgattcccagaggctgctttgcctttaatttttcaggaccatgtgagctcctggattcttgtaagatacaattaaggagaggaaaagtcccaataataactgattttgggccgggcgcggtggctcatgcctgtaatcccagcactttgggaggccaaggtgggcggatcacctgaggtcaggagttggagatcagcctggccaacatggtgaaatcccgtctctattaaaaatataaaaattagctgggcattgtgatgggaacctgtaatcccagctactcgggaggctgaggcaggggaaatgcttgaatccaggaggcagaggttgcagtgagttgagactgtgccattgcactccagcctgggcaacaagagtgaaactccgtctcaaaaacaaacaaaaaaaacctgatattggttttgccagcctttgataagtaggggtctcagccaaatttaatttcgttaaagccattaagaaaggtgatttcttgctctcaagtgtcatggagcaacttaaaccagtttaaaaattcttaaactattttgaaaatttgcttagagaacacacagaccctcaagactatgtttgtagaatcttgggagtggacctccaagatgaatacattactgtggagagtgaataatgcctttggaattgtgcaacatggcagtcttgcttgctaccatgaggaaagctagcctgaggacaaagtaaacacagagaagagcaggaacaagagcatacaggaaaatgaactaaagctttgatcaaaaccagccaaaagctcacatagacctcataccagacagacctactttcagcatcaaaacccatttccttagaaagttcacagggaagaactcggattgacgcagcctgggtcatatgcccacctctgtggcatgtggagtgaagtgacatgattcacagccatcattagaaagaggagtggctttccaaaaacagaaagagtgctggtctgacaaaattcacagaaggtagactccttggacatctagatttctgtagtcaagctgtcatgtacaatattaaccctatagaaggcttcaataaacatttgctaaatcaaattgaatgtgcctggtgctctgcagtgatgtagtatttacagggtgggcttgggaaactgacagaaagtattgatgtggttcactcagagcatagtaacttggagtttaaaacggggtccactgatagctctcggagaaagaaggaacagtggcaaccagcaacctgctacctgaagtaactgtactgctacaaatatacttaatgtccagtcctttgagcaaaatgccttgattcaatagtactcagttactaccaccagaatccgatatctaaataacattgttgcacaaaatatgaaaatgaataatgtgtaagagaaaaaaatctgattctttttgaagtagtatcaatatgtcaaaatgcttgaatggttcaacagtggtgcacaaacttaccagctagaaagtcccaatattatatatacttggtagcagagaaaaactggggaagtgaaaataagacaacattattattttttaaaattcccatcaattaacaaaattcccctaagaaaatttagggactttaaaattcctaatgctagtttctcttttgaacttaagttctttaccgtatcactacatttttattcatatagaaagagagtgataatagttgcatacagacagtgggactaaacatcattttaataaatatgcggtttttttttttcttttgagacagagtcttgctctgtcaccctggctggagtgcagtggtgcaatctcggctcactgcaagctccgcctcccgggttcatgccattctcctgcctcagcctcccgagtagctgggactacaggcgcccgccaccatgcccggctaattttttgtacttttagtagagacggggtttcaccgtgttagccaggatggtctcgatctcctgacctcgtgatctgcccgcctgggcctcccaaagtgctgggattacaggcgtgagccaccgcgcctggccataaatatacatttttaaaaagaaataaattccactggtctttgcggaattttttccccttcttttccaggaatgaggaggaagatatagaacaatccacactgttcagatcatggctgaagccacgttcagaggcttgctcaaggactggcttgggcaagagggctcagcctgtgccagagggcagaatccttcttcattaggggcagacactgtgactttgaactcattagagctttgttcctatctagtggactctaggaatgagacattccgtaagcagcagcagcagcagcagcagccctctggctactgtatgatcaatcagttaatgatgacacatttcatcttttacccgcatagaaaatgaaggccaattctagggccaactaagtcttctgccacaatgcaactgagaatggattatcagtggcactgttcctaaagtcacaaggcacacagtatgtgtccttagaaaagcctgctggtttgttcaactaactgtccacggtttttcccccccccccttttcttattccactaatggtggagtccactggttcccttaataacctctagccttccagaaggtgtttccttatagctaaggtaaatgtctggaccagtggttctcaaatactttggtttcaagaccccttcatcctcttaaaacttattgaagactccaagaagctttttttcatgtgggttttacctgtcggtatttgacatattagaaattaaaacttcgaagggagaacaacagatgagagacacagagccctggcagggtggactcctagtcccacaccttcttagccttttgcttccacattacctgaaccagtcaacacccctttcacaacagctaatccggttgggtttctgccactagcaaatgaaaggggactgaacaatacatccacaaaacagagaattagcctaagacaataaataataaaggattaacttgagtataacagaatgctgtttcctccctatattcgtcatcaattaagtgagagcctactgaagagtaatgaatattaccatcactgctaacagtgccttatgggtttcaaagaactttcacatttagtatttaagtttcactggaaccctatgaagtatcttgtttcatatccattttacagatgagaaaactgaaatgtccagtgcctgtgtgacttgtcacagcggttttgcagcagagccaagactaaattcaaatcttactctctaaattcccgtggcccgcctcacaggatgcttgcagtttcatggggcacagacctgtagcacaagacttcccagatttaaaaatccatcctcctgcgaggagaggggagcgatcagcgtagcagattctctaaatactcattgtatttggctctggtctgtgtggcgtgaagaagggggcacgagtgaggttcgagttagcatggtaaccattctttctcagctctgtgactgaggggctgcgggagggggttatagtggtgctgggcatggcctcggggagaagctggataatgccctctgcagataacccgtaggctgcgccacagcagcgccaaggaaagaaagcatctctgctccaggtctcggcggaagagatgcgggaactacggggctctgattctgaggtcctggatttggaaggcgtctgcacacaaagaaataacaaagttaagttcccgcggctcgaccagcagagtacgaaacggggcctcccttcccagctcgggtggaaacgcctccaccctgtcaccccgcccatagcaggtcttttatccgctggagccgcctggacagtcctcgcggggcacgcccgaggctccccggaggaactacaagtcccatgaagtcccggggcgcgggcggtgatgacgaagccctcgccgattggccgcacggggcggggcgcgcaggccttctccgagaggaggggcggggcgtggggcggggcgagcagcggcggattggcgggcacgccccctcgcccgcggccccctccccgcctctctccaccgcctcctctggctccccggtcagagggccggagcgagaagatggcgaagacgtacgattatctcttcaagctcctgctgatcggcgactcgggggtaggcaagacctgcctcctgttccgcttctcagaggacgccttcaacaccaccttcatctccaccatcggtgagggaggggccgcggcccgggaccgggtagagaattggggggcgggtactaggggacggggaaagggcggggggcgcttgggagcccgggagaggagaccccggggactgcaaggtggcgggggcactgagaggggcgagggcgtgagggagaggggcgagggcgtgagggagagaggcgagcgggaacgtgaggctaagggcgaagggggaacttgggggcaaaggaacgggaaggggaacagaggaacaaggactaggggtattgggggaacgagagggttcggagactgacagggaggggtctttgagggacaaaatgtgttggggggaagactcaggaaatctcatgtagagagaaggggatagtggacgtgccaatgattaaaagacaggagaggaaggaaatgtgaagggggaaatgagggatgggggcaatgagagggatgtgaagtaaagggacagaggacacaagggacagagaggtgagaaccaggcaactggaagggaattcaggggaatgagcggtcaggaggtgaggaagaaggggacggctggccacaggaggtctggactgagatgtcgtaggaggggacagaagaaaattgtaggtggaagaagagttcaagggatcagagggcagaatgaggatacttgatggagaaagtaaagggatctgggtgtgagacagaaaggaaaagaggaagcaacatcatagtaaagggaggttgagcagagaagacagaggagatggaaaagagaggaaatggaaagtagtggggcgcaagacttgctatagtaactgattaccattttctcttcacttcctttggatcaagtgcaggagaaagcaaaatgtgactaatgatggaataatgtctatagagcgttaatttgttctgtgagtgt

SEQ ID NO: 3262 - DNA, 6000 bp, Homo sapiens
tatatagattctaatatatataatatggtattatatagattctaatatatataatatggtattatagattctaatatatattctatataatataaaagataaaaaagacaaaagacaaatttcacctctttttaaattttttacttatttttattttattggagacagggtctcgctctgttgcccaggctggagtgcagtcatgcaatcacagctcactgcagccttgacttccctgggctcaggctattctcctacctcagcctcccaagcagctgagactacaggtgaacgcaaccatacttggctattttttcttatttttagtagagatgggattttgccatgttgcccaggcaggtctcaaactcctgagcttaggcaatctgcctgccttggcctcccaaattgctgggattacagacaggagccaccatgctgggccaaatttcacttcataaggtttgtcaacttttctctctcaaaaacatttttgttttttttttggagacagagtcttgctctgttgcccaggttgcagtgtggtggtatgatcatggctcattgtaaccttgaactcctcggctcaagtgatcctcccacctcagcctcctgagtagctgggactataggtacataggtgccatcatgtctggctaatttctccattttttgtagagatagggggggtctcgctaggttgcctaggctggtcttgaactcctggcatcaagtgatactcctaccttggcctcccaggcacaagccaccatgccccatctaaaaattgtattgtgaaataaacctaatactattacaaaagtgcataaaactggtatgtagagtttaacacacagttataaagggaacaaccctgtaaaaatcctttgagttaagaaatagaacactgaggccgggcgcggtggctcacacctgtaatctcagcactttgggaggccgaggtgggtggatcacttgaggtcaggagtttgagatcagcctggccaacatggtgaaaccctgtctctacaaaaatacaaaaattagcccggtgtggtggtgcatgcctgtaatgccagctactcagaaggctgaggcaggataatcacttgaacctggcaggcagaggttgcagtgagccgagttagtaccactgcactccagcctgggcgataaagagagactccatcttgaaaaaaataagaaaaaagaaagaaatagaagagtgataggtttatttaacaaatggaagccactatggaagctttctgtgtcaggccggtggcccccaggctctgctttatgggatactgacgggaggaacgtctgtccctgggcattcttcctgagacctagggagtgagttcgctttcttcaaatgagctaggacagggaggtgaggatcatggcaccctgcccctttcccatcataggctctggcctcgcatctggctaattcttaaaataataactcatggttctcaactttggtaactattaacattttgggccagataattctttttgatgggagtgctatcctgtgtgttgtagaacgtttagcagtatccctggtctctactagataccagtagcactcccaagtagtgacactaaaaatgtctccagatattatcaaatgtctctggggaccaaattgacccgttgaaaatcattgcatttggccaggtgcagtggcttattcctgtaatctcagcacttttggaggctgaggtgggaggatcgcttgagctcaggagttcaagaacagcctgggcaaagatggcaaaaccccatctctacaaataatacaaaaattagccaggtgcgatggcgcacacctgtagtcccagctgcttgggaggtggaggtggaggtgggagaattgcttgagcccagcatatggaggttgccgtgagctgacatcgcactactgcactccagcctgggtgacgcagcaagaccctgactcaaaaaaaaagagaaaagaaaatcaatgcattcataaatatttattatatgccatgcatgatattaacagctatacattgttacttaattccttcttcctgtttgtccccattttgcaggtaagaaactgggattcagcaggattaaattattgaaattgacacagctttagtgaatggctgagctgaagtataaacacagacttatcagtcctcactttgtttttaacaaacatgtaaagttacctccccagatgtggagggtgagatatatttcaggtcttgcttctcccccatagtctaaggctaggcatttctaaatttataattccaggctttttactagagagttccttttgattttcttaccaactgtactagtcagggttctctagaggaacagaactaataggatagacacatatataaagggcaatttattaagtagtattaagtcacatgatcacaaggtcctacaataggccttctgcaagctgagaggcaaggaagccagtgcgagtctcaaagctgaagaacttgcagtccaatgttcgagggcaggaaacatccagcacgggagaaagatgtaggctgggaggctaagccagtttagccttttcatatttttctgcctgctttatattcgctggcagctgattagatggtgcccacccggattaagggtgggtctgcctttcccagcccattgactcaactgtttctgctttgggaacaccctcacagacacaaccaggatcaatactttggatccttcaattcaatcaagctgacactcagtattaaccaacacaccatttttattagtcatgcttgagactaaattaaacattagtgttcttttttttttttttgaggagtcttactctgtcaccaggctggagtgcagtggcgcaatctcggctctctgcaacctccatctccttggttcaagcaattctcctgcctcagcctcctgagtagctgggattacaggaccttagataaacttactatcactttatagcagtagagaaagcacggaaattggcactgtatttgttttctattgcttctataacaaattaccacaaacttggtgacataaaacaacacaaatttattgcttaaagttctgtaggtcacaggtctgacaagtgtctcattgggctaaaatcaagttgtcagcagggctgtgttccttctgggggccttatggaagaatctgtttccatgcctttcccagcttctagaagcctccagattcctaggctcctgggccctttcctccatcttcaaagccagcaagggcagattgaggtcttttcaagtcacatcactctgacctcttctgcctccattttccacttttttttttttttttttgagaacgagtctctctctgttgcccaggctggagtgcagtggcgtggtatcagctcactgcaacctccgcttcccgggttccagcaattctcatgcctaagcctccagagtagctgggactacaggcacccaccaccacgccagactaattttttgtattttagtagcgacagggtttcaccttgttggccaggctggtcttgaactcttgacctcaggtgatccacccaccttggcctcccaaagtgctggaattaaggcctgagccaccgtgcccagcccattttctacttttaaggaccttatgacaacactgggcccacccaactaatccaggataatatccctaatttaatgtcagctgataagcaaccttaatttcatctgtaacctcaattcccctttgccatgtaacctaacctattcagtctccaggaattgggaagtggacatcattggcagggggcattattctgcttgttataggcatacttgcccacaagtctaaatcgagagtttgcatataggaggtaggaggtgtgacaataattggataaaggcttttctggaatgacaaaattctcttcaaatacagggaggccctgcgacatgatatctggcaaatcacttgagtcttagtatccaaacttccgctaaaatggaaattaccatcctttgcttggcatgttaaatgaaatacttatgtaaacggacttagattagaggcctacaaataggactcaagttcttgatgaatcttgatgaggagggtgggcgaagtactctaaatgaaaatgagatagattgcgagatttccggagaggagtgagtgacaagcgcctacccgtgcatgaagctggaggtagaaaattccagcaaaaggaattttcaagtttcactgaagcttttgaatcaaggcttgaaagcccagggttaaaaaaaaggcagtgaagaagctcattaagacaaccccccgccaggtagcagatagcacctgaaatgcagtgggaaatttgtgaggtcttcataggcaaggattaaattttacatctccatcttaagatgtgtcatagttgttcaattacttagtgaccaaaaaagtgaattaaagatgttgtcaagattaaaaaaacaaaaaccaatgcaggttccaccgagatttgaactcggatcgctggattcagagtccagagtgctaaccattacaccatggaaccgccacgcatgtgtagctgccttcggctgtctaatcctcagagaaccccgcccccatccacaaacccaccactcacaggcggtcccgcctggttccagcgagccgcttccggcacggtagctcgagaaatgagcaagcggccactaagactatggtagctaggagttccaggactcagtttcccctttgagcctcctttagcgactaaagcttgaagccccacgcatctcgactctcgcgcacaccgcccttgttgggctcaggggcggggcgccgcccccggaagtacttccccttaaaggctggggcctgccggaaatggcgcagcggcagggaggggctcttcacccagtccggcagttgaagctcggcgctcgggttacccctgcagcgacgccccctggtcccacagataccactgctgctcccgccctttcgctcctcggccgcgcaatgggcacccgcgacgacgagtacgactacctctttaaaggtgaggccatgggctctcgcactctacacagtcctcgttcggggacccgggccactcccggtggaccctcgtgccggccacccctgcactgatataggcctccctcagcccttcctttttgtgcggttccgtctcctacccagctcagcctcttctcccccgctcagacaggggtccccatcacatgccgctctctgagcgacctctccataggccttcgctggcctcagagcccctccctgcgtgtccttcccctggcggactgccttctcccacatcgtcgaattcctttccccgggttctacggccccgccgctcctcccaccatctctcttttcgggtgtagcgccccctccccctcggcgtacacccttcccagctcgcgtcctctcccgaagcccctctgacgggttcttcgcttccctcttggccttgccttcggtgcagactcccattacaggtctttttcttatctgccctctttcccccctcgagcgagcgtctcttctgtatctcccctccacttggacggccgcccctctaagcttctcccatcccgggtccaggaccccgtaaaatctgagcgggccaagggcctccgcccccaccctccgccccgcggttctcgcggtccttaaccttctctgaccgctccctctcccactccccatttggcaactctctctaccttccctccccaaatcgtgtttagagctcccttgtctccgttgcgacctgggtggtgggagggagggtaagagggatcgcccatcacccactcgcgcacttgtcgcagtgacccggcaggctgacattacttcccacctagccttttcttttcttgccctccctactcagtggcacccaacccgggataactctttactcggttcgcgagatgaggttgcggatgggtggtggctgttatccttgccaga

SEQ ID NO: 3263 - DNA, 6000 bp, Homo sapiens
ttgctctcaccctggaggccaagtaagtgggtgggggccagcggcaaccctgtccctaccagcactctctgtagggcagcccttagggcagctggagagctgctcccaaaaaagactgatccccagcctctcccttccttctttgcagtaagaacctcacatggcgggacatgcaacacctggtggtacagacctcgaagccagcccacctcaatgccaacgactgggccaccaatggtgtgggccggaaaggtgagggcaggctggcccggcaggctggatgtggagttaggtagaaggcactctgtgcctgacagctgaccctaccttccctgtccccacagtgagccactcatatggctacgggcttttggacgcaggcgccatggtggccctggcccagaattggaccacagtggccccccagcggaagtgcatcatcgacatcctcaccgagcccaagtgagggctggacccaggctgggagggggccagtgggacctgagagtcgcagggggtgcccgctggtccctctgggccaggctgaccatcatggtgctctcctgcacagagacatcgggaaacggctcgaggtgcggaagaccgtgaccgcgtgcctgggcgagcccaaccacatcactcggctggagcacgctcaggcgcggctcaccctgtcctataatcgccgtggcgacctggccatccacctggtcagccccatgggcacccgctccaccctgctggcagccaggtgcttgctctgtccctgcccgccctgcccagcgccgccgcctctcacagcccgcgtgcttgcctttgctcgctcacacggcccagggggcactgagtgctactcagtggggcactcttggcattttgggagggacaattttgtcctgtgggactgtcccatgttgcaggaatccctggcttgcaaccatttaatgtcagtagtgtgccccaccttgtgcggtgcctgtgtacctttctagaatcccccagttgagcacgtctggctcactgagaaacagccaagccagcaggcacttctggccccatggggttggtctgcgtgggggaagggtgtgtggcccatgtgctgtgggttagatgtccctggcttggggtcccgcagaggcctcagggctgtgtgcactcccctccccaggccacatgactactccgcagatgggtttaatgactgggccttcatgacaactcattcctgggatgaggatccctctggcgagtgggtcctagagattgaaaacaccagcgaagccaacaactatggtactgggggcacttgaggggtaggggtacgaggtggagggctggcaggatctcgagcactgggtgtggtgccagcactgtcttaactcttgcctcctccccgctctggaacagggacgctgaccaagttcaccctcgtactctatggcaccgcccctgaggggctgcccgtacctccagaaagcagtggctgcaagaccctcacgtccagtcaggcctgtgtgggtcagtagtgggtgctgttgggctttgggggcctgagtctgggggtaaggcgggtgcctgtcctgaagcccagctctaacagaaaaaagtctcaagagacctagggcccctggggctcttgggatgaccacagtcctggggctggaggatcctggggatgtggtgacttggcttggggctgctgtggtcctggggctacagtctgtttagctgacacacacttgccctctctcccacgccggcagtgtgcgaggaaggcttctccctgcaccagaagagctgtgtccagcactgccctccagggttcgccccccaagtcctcgatacgcactatagcaccgagaatgacgtggagaccatccgggccagcgtctgcgccccctgccacgcctcatgtgccacatgccaggggccggccctgacagactgcctcagctgccccagccacgcctccttggaccctgtggagcagacttgctcccggcaaagccagagcagccgagagtccccgccacagcagcagccacctcggctgcccccggaggtggaggcggggcaacggctgcgggcagggctgctgccctcacacctgcctgaggtggtggccggcctcagctgcgccttcatcgtgctggtcttcgtcactgtcttcctggtcctgcagctgcgctctggctttagttttcggggggtgaaggtgtacaccatggaccgtggcctcatctcctacaaggggctgccccctgaagcctggcaggaggagtgcccgtctgactcagaagaggacgagggccggggcgagaggaccgcctttatcaaagaccagagcgccctctgatgagcccactgcccaccccctcaagccaatcccctccttgggcactttttaattcaccaaagtatttttttatcttgggactgggtttggaccccagctgggaggcaagaggggtggagactgcttcccatcctaccctcgggcccacctggccacctgaggtgggcccaggaccagctggggcgtggggagggccgtaccccaccctcagcaccccttccatgtggagaaaggagtgaaacctttagggcagcttgccccggccccggccccagccagagttcctgcggagtgaagaggggcagcccttgcttgttgggattcctgacccaggccgcagctcttgcccttccctgtccctctaaagcaataatggtcccatccaggcagtcgggggctggcctaggagatatctgagggaggaggccacctctccaagggcttctgcaccctccaccctgtcccccagctctggtgagtcttggcggcagcagccatcataggaagggaccaaggcaaggcaggtgcctccaggtgtgcacgtggcatgtggcctgtggcctgtgtcccatgacccacccctgtgctccgtgcctccaccaccactggccaccaggctggcgcagccaaggccgaagctctggctgaaccctgtgctggtgtcctgaccaccctcccctctcttgcacccgcctctcccgtcagggcccaagtccctgttttctgagcccgggctgcctgggctgttggcactcacagacctggagcccctgggtgggtggtggggaggggcgctggcccagccggcctctctggcctcccacccgatgctgctttcccctgtggggatctcaggggctgtttgaggatatattttcactttgtgattatttcactttagatgctgatgatttgtttttgtatttttaatgggggtagcagctggactacccacgttctcacacccaccgtccgccctgctcctccctggctgccctggccctgaggtgtgggggctgcagcatgttgctgaggagtgaggaatagttgagccccaagtcctgaagaggcgggccagccaggcgggctcaaggaaagggggtcccagtgggaggggcaggctgacatctgtgtttcaagtggggctcgccatgccgggggttcataggtcactggctctccaagtgccagaggtgggcaggtggtggcactgagcccccccaacactgtgccctggtggagaaagcactgacctgtcatgcccccctcaaacctcctcttctgacgtgccttttgcacccctcccattaggacaatcagtcccctcccatctgggagtccccttttcttttctaccctagccattcctggtacccagccatctgcccaggggtgccccctcctctcccatccccctgccctcgtggccagcccggctggttttgtaagatgctgggttggtgcacagtgatttttttcttgtaatttaaacaggcccagcattgctggttctatttaatggacatgagataatgttagaggttttaaagtgattaaacgtgcagactatgcaaaccaggcccagtctccagtgtggtaccgttgctcctgcatcgcagctgaggatagggggccagttaggcctacacagtggcctgcctgcctggatgtgggcccaagtcagaaggccaaagtcctccaaggggcgggaggatgcgccagcccctagtggaggagctggtgcccctggggtggggctggtgacccctggtcctcaggagctgagcactaaactcccaaagtcctggtttccagcagtgtgaagaactgggcctattgtgtcttcctgggctgaagtgatctggtcgccacaggctatagggctgaggcctaaggtggagggaggcctgactgaatcaagatgacttcttgtggggagcctgagtcccaaatggaaaactccacgcctgtccgctccccaacccctgccccttgatttccccaggtctcccttgggacaggaagcccctgcctgggggtaggaggatggggacaaaaccactaggatctgtatccgagaagcagtctctgttcgggatatttacttggaaattttattcaaatggaagctggcgcctgagcctctccttagggaattccgtgaggtggggagggctgggaccagggttccctctttctcttctgcggtggccctggcctggtgctaggactgcgcgcctcccctcagtacccgcggacaccctgggcttccctgggcccagcatctgcctggggcctcgccctgggctccccctcctgacccccaccttgcgccccttcccggtgttcccggggcgctgccgggccctggggcctgcggggcgcgggcggctcttggctgggccattctttcccggccccctcctcccttccgtttccgtggccgtgcggccggctagaggctgcggcccagcgcggagcaggggggctggcaggcgtcggggcggtcgggccggtcccgcccgccccttcccctccacaggcccgccccggggcctgggccaactgaaaccgcgggaggaggaagcgcggaatcaggaactggccggggtccgcaccgggcctgagtcggtccgaggccgtcccaggagcagctgcccgtgcgggtacctctagccccggggcctggaggagcggtgggagctgggggcgcggcaggcaggggcagagcaggcgttccgagggccagagacccacccaggtgggggtaggggccgcggaagggcggggatggccgcaggggcagggctcaggctgtgggcgcctgaggcttcagctggggcaggcttggcctgtcgaggacctgggcaagggtgtccctgtaaggggtggtgggtggaagggcctggggagggaggctccaggttggctcctgttcccgaacgtgcggaggagaccctgacgctaaggaagcaatgagggccagtccccaggccaggctgctgctgggtacccatggctgcgtgtgagcgaggcaggaccccacctcctccccgtctgcagtccatcctgaccctacagtccccagtctcctcgtcccatgcctccgtctccagctgctgccttgcctccagggatggccccttttctgtccccagaacagcactatgggcttctcttccgagctgtgcagcccccagggccacggggtcctgcagcaaatgcaggaggccgagcttcgtctactggagggcatgagaaagtggatggcccagcgggtcaagagtgacagggagtatgcaggactgcttcaccacatgtccctgcaggacagtgggggccagagccgggccatcagccctgacagccccatcagtcaggtgggtctctatgggactctggtgggtgctggctgtatctgccttctccttcctctcctgggggccctctggggcagtggctggagatctggcaggccaatgcttgggagccattgtgcccccctccctgcctcccccatctgtgctgtatagtcctgggctgagatcaccagccaaactgagggcctgagccgcttgctgcggcagcacgcagaggatctgaactcagggcccctgagcaagctgagcctgctcatccgggaa

SEQ ID NO: 3264 - DNA, 6000 bp, Homo sapiens
cctctgcctcccaaagtgccgggattacaggcatgagccaccatgcccagccctgacctctgttttaataaggccactctggctgctgtgctgcaaatagacttcagggagcaaggacagaagctgggaggccagagagcaggctcttgccataatccagatccaagcttttggccactaggacggggaggtagcaatggaggtgaggcgcggtcaggtcctggaaggtgaagccagtgggatttccctatggattggaagtggggcgtgaaatagaggagtcaggggtcactctggggatttggcctggagcagctggaagatggagtggctgttaacttatgtagggaaggctgtgggaagaagaggtttaggagacaaggatagcagttcatttatttatttatttatttatttatttatttatttatttatttatttagagatgtagtctcattctttcgccaggctggagtgcagtggcgcgatcttggctcactgcaacctccacctcccaggctcaagcgattctcttgcctcagcctcccgagtagccaagtagctgggactacaggcatgtgccaccatgcctggctaatttttgtatttgctttttcagtagagatggggtttcaccacgttagccaggctggtctcgaactgacctcaggcaatccacccgcctcgacctcccagtgttggtattataggcgtgagccactgtgcctggcccactggatccttattacaactgccagtgtccctcttatatatatcaggaaatagaagattagggagaggttaaataatttgcctagagtggcatggctagctcgaagtgaggcaggggtcaaccccagccctgactccaaacccagggtcctaggcctgaactgcccagccttgcccagcctgaggctcccctgactggggatcccgtctcgggggcaggaaggagatcctgcaggaatacctggagattagcagcctggtgcaggatgaggtggtggccattcaccgggagatggctgcagctgctgcccgcatccagcctgaggctgagtaccaaggcttcctgcgacagtatgggtaagccccgtccttgctcctgctgggcccagggctgctggcctgtccactgacggggcgctgtcccccacaggtccgcacctgacgtcccaccctgtgtcacgttcgatgagtcactgcttgaggagggtgaaccgctggagcctggggagctccagctgaacgagctgactgtggagagcgtgcagcacacgtgggtggtggctttgcacctgggctgcggcggggctcccagcagaccacgagtgtttatgtaggcagggctaggtcgtggagactgtccacacagagctgtcaccaggtggccgggcttgcttggctctacagggatgcactggacctgggttgagggggcaggagggctcggttctaatgctgcccttctcttgggtgcaggctgacctcagtgacagatgagctggctgtggccaccgagatggtgttcaggcggcaggagatggttacgcagctgcaacaggagctccggaatgaagaggagaacacccacccccgggagcggtgagtgggcccctgcctgcagcagcctcctgggcctccctccctcctacctaccctaactgctgctggctacccgccgcagaccgagcccttattctcatccaccctcccacccgcccctgcctgcagggtgcagctgctgggcaagaggcaagtgctgcaagaagcactgcaggggctgcaggtagcgctgtgcagccaggccaagctgcaggcccagcaggagttgctgcagaccaagctggagcacctgggccccggcgagcccccgcctgtgctgctcctgcaggatgaccgccactccacgtcgtcctcggtgagctgccccatccgcggccgctgcccgccaccggcctgcccacctggggctgcgctcctcattttcgccctccccctccctaagcctggccacccgctgacgtctgtccctggcctcaggagcaggagcgagaggggggaaggacacccacgctggagatccttaagagccacatctcaggaatcttccgccccaagttctcggtgagtggcgcccagcctgggcccccctactgttgtgtttcgagtttaatcactgggatgtcctagagaggaggctctgcccaggctgcttgtattgggaagttcctctcttccctgggattccaggctgcagatgtccccagaccctgcccctgtgacccctccctttccatcgccccagtgtgctaaagggaccagcaacctcgactattccatggctctccctgcttcaggagcgggttgggggcctgtggcctggaggaggaggcaccagcttggtttggggtcttcctgcctgggcttcccttcccagctctgcccagcgtgagcctgggccagtccagtgcccactccaggggcctgtggatggctctgcatgccactccatggttgtaagggctgagggcatataggggggagagagagacccccggctgcccccacggcctcttcaacaaggtggttaagtgactcctcctcgatcctcccttgcccagctccctccaccgctgcagctcattccggaggtgcagaagcccctgcatgagcagctgtggtaccacggggccatcccgagggcagaggtggctgagctgctggtgcactctggggacttcctggtgcgggagagccagggcaagcaggagtacgtgctgtcggtgctgtgggatggtctgccccggcacttcatcatccagtccttggatgtgagtggggctgggacccgagccttccaggcctcactcttcccctcccttcccttccccaagggaaatggcctttcagggtagggggtagctgccaggtcttggatgcctccctagcagggctggctggaaggggccacagagaccaccctgtccctgcaacaaaatagaggcttaagtgtgagtcctcccctggtggggcagcaggatgtcatgtgccatcagatggcatcttttctggaggtctctctgcccctggtcctgggcaggccctttctcccctgctgctctccctttccccctcccagggctcacgccccctcagaatggaggctgctgaccccgggtcccctgccctgcagaacctgtaccgactggaaggggaaggctttcctagcattcctttgctcatcgaccacctactgagcacccagcagcccctcaccaagaagagtggtgttgtcctgcacagggctgtgcccaaggtgagcctgcacccagcctggcccatgccacctgtggcagggcttggggagtgtgggtcaggcccacccagcgtctgagcagaaagggctttccaggccctccgtctacatacaagatgcagagtgagtgaccctcagggccagccttgctctaggtttggaatgtcagggccactcctatgccatgggctgtacacaccaggttggtgcttacctggtcagggcacctgcctggaccccgtagtcatctcagtgtgctccccacgtggtcccacccctggtcacatatggaggcgccaaaaaatggaggacacagcccttctaagggcccagcaccccttttcttcagacttctgatcccctgtctcctctcttccccaggacaagtgggtgctgaaccatgaggacctggtgttgggtgagcagattggacgggtgagtgcgcctctgctggcctccttgtcgctggcgacttctcctgagtcgcgcctgggccccctgccctaccacccagagacctccctgccccatctgattccccacttgtaccccgactccctgcccagcccccaccacacaccatcctccaggaaacgggacagtacctaccctgaaaactcccagcagacagctctgccagcaccctgacctcatcacccccacccaggccgcccccatcgagctcttgtgtgcacgcagggagacaccctgttactgtaagccataagatacctgtttagggaagaagtcactgtcctaaaaatcagaatgcttttcaaacccaagggagagtgatttttggatttccatgtcacttctctcaggaagggtggcacatcggaggcaactttccctgcctgccccatgtgctctctaggttccccagcgagggtcaaactcccagagagcctgggtgaggggtccgaacacgggggcccctcacccaggggtaggaagcagaatgggtaggaagcggagaagagaactgcgggactgggaaggccgtggtaggagcccaagaccgtttcaggggaactttggcgaagtgttcagcggacgcctgcgagccgacaacaccctggtggcggtgaagtcttgtcgagagacgctcccacctgacctcaaggccaagtttctacaggaagcgaggtgggtgataaactaatgatcaccacgggtcccgcatacacagaggttacactgcatggcacagtgtgaagtgcttgaccaccgtggtggtgtttagtcctcgaggccccccattgcgggtagtacccccttatagtgccgaagggtagaggctgccccaggtcacacgtccgggtctgctggccttggaggccaagctcttctcccatcatccctggggggccctggggaggcgggcctggccacgtagatcctgagcagcagtgccctccaggatcctgaagcagtacagccaccccaacatcgtgcgtctcattggtgtctgcacccagaagcagcccatctacatcgtcatggagcttgtgcagggtgagcgcggggcgctgagctccaggtagggcgcgcagcctggtcaggtggcagccttacctcaggaggctcagcaggggtcctccccacctgcagggggcgacttcctgaccttcctccgcacggagggggcccgcctgcgggtgaagactctgctgcagatggtgggggatgcagctgctggcatggagtacctggagagcaagtgctgcatccaccggtgagtgggcggtggccacgggccctgccaacacccccgaccagagtcaagaggtacctatacccctagggccccccgctggaccatcaggcatcagctccagagggggagttggcctctgtggtagacaggggtgcccagggccgggagcagcttttgtccttggctttcctagagtgttcagccagggctgggcaggcgactgttggccaaatgagcccctgccctgtctcacccagggacctggctgctcggaactgcctggtgacagagaagaatgtcctgaagatcagtgactttgggatgtcccgagaggaagccgatggggtctatgcagcctcagggggcctcagacaagtccccgtgaagtggaccgcacctgaggcccttaactacggtacctagtccctgtctaccctggactccatggccagaggccaggcctgggtcctgccggctgcctcgccctggccccagggagggtgcactcacgctgcctcacctcctcgcctcctctgcaggccgctactcctccgaaagcgacgtgtggagctttggcatcttgctctgggagaccttcagcctgggggcctccccctatcccaacctcagcaatcagcagacacgggagtttgtggagaagggtaagcaccctgtgatgacagcagcctcaggctgcaccctcttccagatgctccagccggactcttctaactcccttaatgccaaccttcccaccaggcagaataagaataacctggccagttgctcacgcctgtcatcccagcactttgggaggctgagctgggtggatcacttgagcccaggagttcaagatcagcttggacaacacagtgaaactccatctgtacaaaaaatacaaaaatagactgggcacggtggctcacacctgtaatcccagcactttgggaggccgagg

SEQ ID NO: 3265 - DNA, 6000 bp, Homo sapiens
tgaagtcttccaggacccgggcacacacaccctgaccaacgtggcgggaggaaaacttgctcccaggaaggtttgtggggacacggtgccgagggtggaactgccttaatccaggaccttcgatgccccctgcagagcgggagcggctgggcttggggaagggtgtgcaccctgtgcgggtggttcctgggggccaacacgggcccaccaccctggcccacaccctggagcctgactgcaggttcgctcctgaactgcagctttctcctccccgccgcgtgcaccacccacactcctggatgaagcataattcctgccgggtaactcgccaccatcacccaggggcactctatgcaaagcgctctgttccatcctgaagagagcatgaagcactccctaagatcactgctgggtgtcaaagaaaggaaagcctttccagacctagagatccagaaacccagcgcacacccacattaggagacacggaagagctcacaggggctcccacaggtgctgggcgtgtggtcacacgccactgcctcaggtgccagtactaagaaaaaggtcacttcgatgactcatttgtttgtgaagctggagagggcaatgtacgctcacacacctgtctgaggaacatgccagacaagacttccaggcaggtaagcgatccggtgtgagctgaaggagctgtgggccatgctgaagcagtaagccttgcacagaaggggcctccctgccaagggcacccactgcccagcaggcagccctgaagaaacacggaagctggaaacacagagggcacctcccaacaaaggagagaaagcaatggaggttaacacgtacgtccttcccacgagggccagaggcctaaagctcctgctacaactctttcaaaggagaataaattctcaagatgctgagtcctgagaaccagctgctcctgagcttctgagaccctgaatagcccccttgggaaaccctcagatccaccaacttcaccctgatgaagagggctggcccctgaggttggcaagctgccacctgaccacaaagacctgctccttgtgctgtgcacgtcttaaccttgagaccttagacacagaaagcgcgttccacagcccagaggcgcttccttctctgctcgaggccacaggactcctgcggggacctggaagtgtgccccgggccctgagagcacgtggtgtctttctaagagtggactctcctctctgcctctggtccaagccactgtgagcctctgaagtctctgcaagcaggcaggtctccacgtcttacacaatactggccccacttcagtgagcatgtcagaggaagtgtggcaatgccccacagcccgacgaaggggacagggaggaaggagggtcctgtctctccagctcctggctgtgtggtgcagttgggtaggcgagctggccagcatggctgagccggccctcagaagcacgccttcatgtcctgggaaaacaccgattgatgaaacccaatccttcccgtgctcttctgaacatgcacaaacacgcacgccgccagcctcctgggagtgcgcagcgcccctggagccaagctttagaaggcaacgccaccttcacaatcaacttggccgcccaccacctgagtcaggagttaccaattctggggcagtcactgtcaagtgcaggaccaggaggcggcaggtgcaggggcctaacgtgtgagcccccaatgccccagtgggccttacacttcccccacctcaaaatggacacagagctcttcctccctggccctttccaacccctcctccaggctgaagccaggagcacaagcttccagagcccccggtgctgctgcccactgctgaagccatgccaggaggaagcgcgctcagcctcagtccaggtaatcccacgctctgccaacccccgagttgagagagtgggggatgctgcgcccacactctcagcagccaaaggcagacaattcagcaaatagcagacgctcagggcagtcagacaggacggacaagagcccaagaaacaaagcaaggggagagggcagggaccaggagaggtaagttcgccagcgtagatggcattccctgaagcgcagatggactctggggaggctggatgctgactgctcccagttcatctggggccacatcccattcggctgggtccaggcccccatgagaggggatgaggaccacaccgtctcactcactctgttaaccacctaaattaagaggcatgctcaggcaggcaagccccagtgatgccacctatctagtgtattttagccatgccactggaagttaaaaacaaacgttcaggccaggcgcagtggctcacgtctgtaatcccagcactttgggaggccgaggtgggcagatcatgaggtcaggagattgagaccatcctggccgacatgctgaaaccccgtctctactaaaatacacacaacaaaattagccgggcgtggtggcatacacctgtagtcccagctactcgggaggctgagacaggggaatcgcttgaacccaggaggcggaggttgcagtgagctgaaattgtgccactgcactccagcctggcgacagagtgagactccgtctcaaaaaaaaaaaaaagaaagaaaagaaaagaaaacaaaacaaaacaaatgttcagtaactcattacagaggtattttcttctagcacaaagcgttgactccctcagcagtaagcaaatacctcaggggaacagcgtgcctataaggacctgtcatctgtgcacgctcgagacagggtcccaagagcagcccagcagcacctgccaccagacctgggtccgtgacaccttccccgggcccatgacacctttccccagatctataacaccttccctcggaccccagatgatcccagacccatgacaccttcccttaggaccatgatgccttcccccagatctatgacaccttccctcagaccccagatgatcctagacccatgacaccttcccctgagatcccagaccatgacaccttcccttaggcccatgacaccttcccctgagatcccagacccatgacacctttccccagatctatgacaccttccctcggaccccagatgatcccagacccatgacagcttcccttaggaccatgatgccttcccccagatctatgacacctttcctcggaccccagatgatcctagacccatgacaccttccttttggcccatgacgccttctaccgggaccatgacatctttccccggaccccagatcctggacccatgacaccttccctcggacctatgacaccttctcccagaccccagatcctgcacccatgacaccttccctccggcccacgacaccttcccccgagcccatgacaccttccctcggaccccagatgatcctagacccatgacaccttccccaggcccatgacaccttctctaggacccatgacaccttcccctgggctccagatcccggacccatgacaccttcccctgagatcccggacccgtgacaccgtcccccagaccccgggtccatggcaccgtccccgctgggcgcgtccctctggtccgtcctcctgccccccggcgtcacctcgggactggagcacgggcaccccgcagccaccgagctaccgagtctggaagccaggcaaaggcgttcctgggaacgttcggcggcgcttggaagggccgggccgagggcgagctccgtgcccagctcgccgggctcgggccccgcgtagcagcgcgcgccgcgggccgggccttaccgttactgtaggcgtacggggactctgccgcgccgtcctgcaggctctccaggatctcgcccttgcccacgtcgctgtcgcccaccagcaggaacttgagcaggtagtcgtagctcttcaccggactgccctgcgagcccatggccgcgccgcctgcgccccgcgccggccgcctgccgaagcaccgccgggtgaggccgcggcgtgagagagcccgcgccccgcacctgcgcccgttgcgtccgccccacggcggccgagtgggcgcgcccgaagcccagcgccggccccgccccgcccgcgcccgggcgcacctcagcctcgccgccgccccgccgcttcccgcaccaccagggccgccgcgccgccccacccccggccgcgccgccgccattggccacccttcgcccgccctcccgagcccattggcccacccgcccgtccgtcacgacttccccgccctcacggcgttccacacggcgccgccagacctccggtcgcaccgcctcttcaccaccccgccctgccttcccgtagtcaccagaggtcgcccgccgccctccttccctcagccattggcctgtctgcacgtctgtcatgaccgcccctcccccgcctttcccacacggcgttgcggagacagcggacgcctgcctcatcgccgtcgccattggccactcgcctcctgctttcccggaaccattggttcgattataagttcaccaagatcattcccttccctgcggctgcctcccagagaaatcccagagccgccggccgccccgcccccggcccacaacgccgttgtcctcgcccgccccgtcgccggcgccattgggtcgcttgcatgtccatcacggctctgctaaccccgcccctttcctacacgctcgccaatcaggggctcggaagtccacgttgtttgtatccgccccttcaacgcgcggacgggcggcaggatgcaggcgcgcccgagccgaggcgatgcggctgagtccgggaaacgaaagcccctcgcaggctgtgccgcctgcttccgcagaaccctcggagggagcggcggggtggccccgggcgcgtcctctctaaggcggtgcggccaatcggcgctcgatgaggcggaacttcctctccggggcaggggcgggacttccgcccggcggcggcggggcgcaccgttgggtcaccagtgagtctgcaaagtcgctgaggttctgggacagcgcggcgtcaccgagcgtgagccttccgcccggggacgcggccgccacagctcgggacgcggggagcgcggccggcgcgagctcaagacccggcccgacgtgctcactgcggcagcggcgcctcctggacggggacccagggcccggaccgcgctcttcccgggggcgccgccgagccctcgtccctgccgggcccggctgccgcaggtgcgtgggcgagcgaggcggctgcgtccgcgggccccggcgtggggtcgggggttgagtgggcacgtggttctttctggggtgacgagaaggtcctaccgtcgtggggatggtcctgcctctctcggtgaagttactcactcggaacgggtgagctttgtgatacgtgctctgcgttcagtagcgctgttacagtcgtaagtaaaagcagtaacgtcagcgccgacccagcgcagccctctccagaccgggtgcggagcccgtcacgtctgccccgccggcgaggagcagagcccggcaagaaccctcctccagaggggccccgaccagggctgtgcctccgggagcaggtgctgcttacacagagggacgccaggacgggcagccccacacctccagtgacctcccgtcccccagagctgaagacatggcctgactaagcggcgaccacatcgacgcaccagttttttcttttttgaaacagggtctccctttgtcgcccaggctgcagtgcagtagcgcgatctcggctcactgcagcctctacctccccggcacaagcgatcctccagcctcagcctcccgagtagctgggactacaggcgccaccatgcccggctaccttttgtattttttgtagagatggcgccttgccaagttccccaggcattaacccggaaacaacctggcgggtcagggagagcctcttctgctcagaggtcattgtgcccagacttgagccctggctgtgaagtccctgaggcccctcactccaggg

SEQ ID NO: 3266 - DNA, 6000 bp, Homo sapiens
aacctgtgcctcccgctccccccagctgcccaccgggtccaccaacacccccaacctgtgcctcccgctccccccagctgcccaccgggtccaccaacacccccaacctgtacctcccactccccccagctgctcactgggctgccacgcctcctggggcttccaccaggtcaaggtcttgacacagctcagtccactgctctgtgatggccatgtcatgggtcgtgcctggcagcggtcaccccctctgctgggcactgggctgactgcctatcccgagggccagctaggtttggcgccagagctggccaatggaacaccgtcaccccagccactcgcagccaccaagaggtgccgcctgcacctgcaggctccgtctgtccttgctgcacagcccctgcctggagacagcctacacctgtggggtgcccctcatccctccaccagagctctggtcccccctgccttgccgacccagacagggcaatgggctggagcttttccaaggcctgcccaggaccatttatggaccctcagggcaccctcagaagcagacaccttccctttcagagttggggccgcccacagagaagggtctcaccagtacttcacagattcagacttacagaaatgctgtgagaataacacagatgcttccagcacccttcacctacatccccccacgaccacatgccatgtgtatgttttcacattttttctttttttttttttttgagagcgggtctctattttccaggctggagtgcagccttaaccttcctgggctcaggtgattctcccacctcagcctcctgactatctgggattacaggcacccaccaccacgcctggctcatttttgtacttttagtagagatggggtttcaccgtgttactcaggctggtctcaaactcttgggctcaagccatgtgcctgcgtcggcctcccaaagtggtgggattacaagtgtgagccaccgggcccagccagcacattctttatgtttttctgcaccatttgagtcagctgcccattttggctctggaattttcagcgtgcatttcctcagaacaaggcagccagtgcggtgctcaaacccggggcttttgcagggatgccgtccaagccaccgaccccattccagcgtgtcccacgtgtcatgggccagtctccaaagcctctgggggcttagggatggagcccgttactcaggagtgtccctggctgggtctgctggtgaccctcatgatgagatgccactcatgcttgtggcagcagcagagggcaccacccagggtggcacacagagcccacctgttcatcccagtgatgccaacgtgactacttggtcgaggtcttgtctgcaggattttccgctgcaaagctacattcccttgtcattaatttgtccacagaaatgggaccatgttgacgctccatccctcactgccctcatccactgcacgctgtgtccaccaaggtgattggctctgtccactcatgggatgtgagtgaggcctccccttggcagcaggccaggactggggggggtccctgagtagctgaaacttgtaggtgctccctgggcacagggcttcaggggccaaggcttgtctgccccactgggcaactgtccacccccttagcaggactttgaggacatcccggcggctgctgggctccccgggggcagggtggacaccccaaactgctccctttgtctcccaagcccctcacttggacagaggctccgcttagtgtcctggcccgtctctgccatggccattgagtgtggggtgtggcagaagggggctgtcagggtctccaccagacactgctcaggcctccgagatgggcccagaaataccctgactgctcaacaagtgggtgcccaggtggtggctcaccccaaacttctgggtggaggtctcttcccacactccactgtctttggctgccctgtccctggcctgagatctctcagctgcagggatggtgtcctgcccctgcccaggcctggcttggccatggtggaccccaggacaccctgcgtaagtgcacgcagctgcccctcggtccacaaggcctggatgccagaggatggcacccctctgtccatccctcccttcactgggcctgctgccccagagtccgtccctcccttcactgggcctgctgccccagagtccgtccctcccttcactgggcctgctgccctagacccatctgggttccctgggacacttttctgctcggaggctgggaggtcagagggcacagcagctttccaaggatctcaccctatggaaaggttcctgaacccaggaacccaggacagggctgtgtccacaggctgtggtgggcagctccagtgggagaaacctgacttcttcatcagccaggggatgaccctttcttgtcccaggaggtgggaactaggcagcagtggcccacggctgggtctggagagcgttttactttgtttttcttttttaaaaaagtttatttttgtgaagaccataagaacatttttaattgtttatttttgaggcacttttttttttttttttttcctgagacaagagtctcactctgtagcccaggctggagtgcagtggcacaatctcagctcactgcaacctccgtttcccgagtttaagcaattcttctgcctcagcctcctaagtagctgggattacaggcacgtaccaacatgcctggctcatttttgtattttcagtggagagggggttatcacgatgttggccaagctggtcctgacctcaggtgatccacccacctcagcctcccaaagtgctgggattacaggcatgacccaccgtgcccggcctcagaaagcgtttctgatttatgttctcaggaaaggaggagacggctgctcaccactatccaccccccgcttccaggcagtctcagaaaccgaggaggaaacatcacatctttggtgcttcccgtccctggagtgaggggcctcagggacttcacagccagggctcaagtctgggcacaatgacctctgagcagaagaggctctccctgacccgccaggttgtttccgggttaatgcctggggaacttggcaaggcgccatctctacaaaaaatacaaaaggtagccgggcatggtggcgcctgtagtcccagctactcgggaggctgaggctggaggatcgcttgtgccggggaggtagaggctgcagtgagccgagatcgcgctactgcactgcagcctgggcgacaaagggagaccctgtttcaaaaaagaaaaaactggtgcgtcgatgtggtcgccgcttagtcaggccatgtcttcagctctgggggacgggaggtcactggaggtgtggggctgcccgtcctggcgtccctctgtgtaagcagcacctgctcccggaggcacagccctggtcggggcccctctggaggagggttcttgccgggctctgctcctcgccggcggggcagacgtgacgggctccgcacccggtctggagagggctgcgctgggtcggcgctgacgttactgcttttacttacgactgtaacagcgctactgaacgcagagcacgtatcacaaagctcacccgttccgagtgagtaacttcaccgagagaggcaggaccatccccacgacggtaggaccttctcgtcaccccagaaagaaccacgtgcccactcaacccccgaccccacgccggggcccgcggacgcagccgcctcgctcgcccacgcacctgcggcagccgggcccggcagggacgagggctcggcggcgcccccgggaagagcgcggtccgggccctgggtccccgtccaggaggcgccgctgccgcagtgagcacgtcgggccgggtcttgagctcgcgccggccgcgctccccgcgtcccgagctgtggcggccgcgtccccgggcggaaggctcacgctcggtgacgccgcgctgtcccagaacctcagcgactttgcagactcactggtgacccaacggtgcgccccgccgccgccgggcggaagtcccgcccctgccccggagaggaagttccgcctcatcgagcgccgattggccgcaccgccttagagaggacgcgcccggggccaccccgccgctccctccgagggttctgcggaagcaggcggcacagcctgcgaggggctttcgtttcccggactcagccgcatcgcctcggctcgggcgcgcctgcatcctgccgcccgtccgcgcgttgaaggggcggatacaaacaacgtggacttccgagcccctgattggcgagcgtgtaggaaaggggcggggttagcagagccgtgatggacatgcaagcgacccaatggcgccggcgacggggcgggcgaggacaacggcgttgtgggccgggggcggggcggccggcggctctgggatttctctgggaggcagccgcagggaagggaatgatcttggtgaacttataatcgaaccaatggttccgggaaagcaggaggcgagtggccaatggcgacggcgatgaggcaggcgtccgctgtctccgcaacgccgtgtgggaaaggcgggggaggggcggtcatgacagacgtgcagacaggccaatggctgagggaaggagggcggcgggcgacctctggtgactacgggaaggcagggcggggtggtgaagaggcggtgcgaccggaggtctggcggcgccgtgtggaacgccgtgagggcggggaagtcgtgacggacgggcgggtgggccaatgggctcgggagggcgggcgaagggtggccaatggcggcggcgcggccgggggtggggcggcgcggcggccctggtggtgcgggaagcggcggggcggcggcgaggctgaggtgcgcccgggcgcgggcggggcggggccggcgctgggcttcgggcgcgcccactcggccgccgtggggcggacgcaacgggcgcaggtgcggggcgcgggctctctcacgccgcggcctcacccggcggtgcttcggcaggcggccggcgcggggcgcaggcggcgcggccatgggctcgcagggcagtccggtgaagagctacgactacctgctcaagttcctgctggtgggcgacagcgacgtgggcaagggcgagatcctggagagcctgcaggacggcgcggcagagtccccgtacgcctacagtaacggtaaggcccggcccgcggcgcgcgctgctacgcggggcccgagcccggcgagctgggcacggagctcgccctcggcccggcccttccaagcgccgccgaacgttcccaggaacgcctttgcctggcttccagactcggtagctcggtggctgcggggtgcccgtgctccagtcccgaggtgacgccggggggcaggaggacggaccagagggacgcgcccagcggggacggtgccatggacccggggtctgggggacggtgtcacgggtccgggatctcaggggaaggtgtcatgggtccgggatctggagcccaggggaaggtgtcatgggtcctagagaaggtgtcatgggcctggggaaggtgtcatgggtctaggatcatctggggtccgagggaaggtgtcatgggctcgggggaaggtgtcgtgggccggagggaaggtgtcatgggtgcaggatctggggtctgggagaaggtgtcataggtccgagggaaggtgtcatgggtccaggatctggggtccggggaaagatgtcatggtcccggtagaaggcgtcatgggccaaaaggaaggtgtcatgggtctaggatcatctggggtccgaggaaaggtgtcatagatctgggggaaggcatcatggtcctaagggaagctgtcatgggtctgggatcatctggggtccgagggaaggtgtcatagatctggggaaaggtgtcatgggtctgggatctcaggggaaggtgtcatgggcctaagggaaggtgtcatggtctgggatctcaggggaaggtgtcatgggtctaggatcatc

SEQ ID NO: 3267 - DNA, 6000 bp, Homo sapiens
aggctctaaaaaccctaattttcagatggacagtgccctcttctttcagcctcagcctcttgtgtgataggctcttccattacgtgaaggttttgtcagcctaggagtagggtggatcacagctcattggctggatctggttgcagaattgtagggtgggagtggacgttggggagaggcgggcataggggaatgggcctgtgatgtcaccgtttcgcccgacagggctctgagtgtgagcagtgtgctcccctgtgctgctggagagccatgactgtcactgccgagatatttagggcaggtggaaacagcccagagctgagctccaagtaattggtctctaagggatgtggcaaaaagtccccgtggcaaaacctgctctgcctggctgggggagcttcacagaaactgtcctggagggactggcattctgctctgcaagttttaggttggaaaactcagaaatgcccccactcagctctgtcccaggtactcccggggggattcactgatggactggccgagaggacacttagcttccacagctgcacgtcccccggctgccagaaccccgcatctgcctgcccaggaaacttccacaggctgatggctccaggggagggaggggaagcggcatttctgacaccatggaaggcgcccacccccctgctgcagtcctgccaggtgagggcaggggtgaggggcagggctgcaccagctctgcctggagggcatggctcatctgcccatccgccaagtaataagcatccttggccctgcccgggaactgaggcccctgcacctgagcgtccctgggcctgggctggccatgcgtgtcagtgacccctgatgacccccaagtctctgttgcaggggatcctcttggtgtatgacatcaccaaccgctggtcctttgacggcatcgaccgctggatcaaggagatcgatgaggtaggcctgggtccggggagccctcccggggaaggcaggctggatggaggtacctgggccccgggtaggctctggattcccgcctgccgcccctcctgtggccccggctctgcaccctgcactgtcccacggcctacgcctgggcatgctggtcactgtgcacacgacagtcgggcgtggagcccagcaagaccaggagctacggggccacccggaagggctgcactgtagggcctgagccctggggtctgcccaccttgacctccgcccaccttgacctcccacggccctcaccccatcatagtccagacaatgagggcgggccctgctgcggctgaggggtgggtggcaccctgcgtttgtgcgtctgctgagttctgtgcccccagcatgcacccggagtcccccggatcttggttggaaaccggctgcacctggccttcaagcggcaggtcccgacggagcaggcccgcgcgtacgcagagaagaactgcatgaccttctttgaggtcagccccctgtgcaacttcaacgtcatcgagtccttcacggagctatcccgcatcgtgctcatgcggcacggcatggagaagatctggaggcccaaccgaggtgggtgggcgggcgccggccagccctgaggtccccgaacctgggctgccctgatcacatggaggctgaggggggccaggggccagtgagggaggttcaggcaggtcccttggcaacgcgcagtaggggctcggccggcggcaggtcagtgacttggtaagagcagcctcgggggagaggcggcagcactggggggcacaggagcagctgatgaccccccctcagggtgccgccgtggccgctgcactctgccatgcctgtgggtccctggcattgctggtgtgggcagtgtgtgctcgctccttcctggttccggggctggtcctgctgtcaggggagcacaggagccgtgcctgcagctttgtgttgtgtcatctgctcttcctgggtagccacatccttgatcagaggctcccgtgaagcccccctcagggaggtggtactgttgattttgtggtgcctcccagcagggttcactgctgaacagagagagggtggctgacggtgtcactgtccttcttaagaggaagcacgggcctggcacggtggctcactcctgtaatcccagcactttgggaggccacagcaggtggatcacctgaggtcaggacttcgagaccagcctggccaacacggtgaaaccccgtctctactaaaaatacaaaaattaaccgggcgtggtgacgcacacctgtagtcccagctattcgggaggctgaggcaggagaatcgcttgaacccaggaggcggaggttgcagtgagcggagatcgtgccacggcactccagcctggcgacagagcgagacccgtctcaaaaaacaaaacaaaagaatgagcgagtgctctagggaatgagtcaggacgcgcgctcccccgctctaggggatgagtcaggacgcttgaagggccagatcacgcagccctcacactgggagctgcatcatccaggccaggaactgggcagagtgccctctggaagccccgcagcagcaccgcccagcgtgcctggctttagggagcaaggcaggggatggggtgccagtggacacatctgtgctgggcagagaagtttgggcgtccaggtcctccaggagcccagcctgggaacacctctaggagtgtggagaccccgccaggcttctcttgggcacctcaggtctccctgcacagggcctcctcccccacagccccatggtctgacaccccctctgccccacagtgttcagcctgcaggacctctgctgccgggccatcgtctcctgcacccccgtgcacctcatcgacaagcttccactgcccgtcaccatcaagagccacctcaagtccttctcgatggccaacggcatgaacgcggtcatgatgcacggccgttcctactccctggccagcggggccgggggcggcggcagcaagggcaacagcctcaagaggtccaagtccatccgtccaccccagagccccccccagaactgctcgcggagtaactgcaagatctcctagcggggatgggcggggccgcctgtgcagatgccaggagggctcgagctggacactcctggctggacgccaggccagtgccgcctacgtggagactgtccacacagctgcctcagaagcgccgggctttcctcacacctgagccgggtgcgaggaggagcatgcacggaccaagcgcggcaggcgggaggagggggcgcggctgggctgctggtgcttccgggaatcttggtcggaaacaagccgggcctccccagctgcctgggcttgaccggcggggagcctggttggcctttcttatttatatagagaacacttcacttttttgtacatttttaaggggccttcagggaagcctgggtgtggcccggtggtggtgcactggtgacttcatggccacgccagctgcggggacgcacttgggactcctcgagaggggactcgcggccgcgatggcaaggcatcctgtgaattcatgcgctgcgagtggcggggctgcccagaggccgggggagcagacagggccggtgctccctctggaagcttgggtgaccggggccctggctcccacgggatggagggtgtggtcctgtggtcagagcccaagcagcactcaggagaggggagaaaggaggtgcacctggcagcccacatttttgttgctccccaaatccctccccacgtggggatgagaaccttcctgctgtgatgtgacaccttcggggacattgaccactcaaaactcagatcatctcgcccaccctggagagtgcagagctatctgtagacttaggaatacttgatgggcagcggtgcagaccccgggcacctgcgtgcagcctcctgttctcggcagcttctgtcgctggccctggggtccccacagctgcagctctcctgtgaggttgcacggcatcagaaccatcctgaccttcttagggacgtgcctggaaccacctcgtccacgtccacgtccacctgggggcctcgggaggctaggcccctcctcaaaggcccaccagcccggcgctcatgctgagccccaggcacgcagggccggccacctctctcctgaagccattggccgctcctccacccagtgcttctgcccatgcctgccccagcagcccctctgcacggtcaccatcgcctgggcctgcccacagcactggtgctcacctctacctcctgtcctcaggccgtgcggcacgacatggccagcacgcagaaggagccctcccgggacccaggaccccccgtggtggactccgcggcacatgcttcccaaggtggtcccacggagggtgttactgggcaccagtggactcgccccatggcccgttcctgggagatgagggccgtggcctgcatgaactaccagatgagtaagggaaccccaggcaggcggccctgccacagcccccaaagacactggcctcctgctccagcttccctgtcctggccccacctgtcctgttgctgccagcagggcccttgtttgggattatgaacaaacctcacagactttgaggacctggatggtcctgcattcacggcatcaacactacccgcgctgctgttagacactccgccattcctggttctctccgaaccgttctttgtacagtaaatgtaattcagctgtggtccccacgttttgctgtgtctggtggggtgggtctggcagtggcggtgccccgtgccaggggccagtgctgcttcatacccggcaaactgacctctggcctttgttttgcctgctgttccctgcgctgaccgggctgacctgccgcggttggctgggttcgcctcaaagtgagggctggagctgggctggagcagctgggcctggtcacggccattctcctcttcccggtggatggaatcccagctgggctgtgctgagccctcgctcacagtccccggcagcagatggcctggggcggactgtccccaacagcagcaggactccagagggccaggtcctccagtcagtcggcccgctcagcagagccgcctgcacgctggccaatctggtgtctgctatgcccggcccaggggggtgtggacgccccggaggtcacagctgagctggaacggggcactccagttggtacagggaccagaccacagcctctggctcaggtgcctccctgtgctgtttcgtgggcatgtccgggccttaagcccctccttggcagctccagcccagccgcctgctgctgggtctggcctagctacccccacccccacgctatcagggcccacccccagtctccttgtagagcagggactggcgcctggagccgtctccgggtctcattctgaccagaccaggctcctgttaccctgcctcctgggtcagaggtcagacacagggtcagggggacactcccatccggtctcaagagaaccactccctgaggccccagacatctggagccacagagggtttggaagggtagattccaggcagccttttgtcctgctgcaccaggcaggccagccccctgccctccccaacgaagaggagccagcctggggatgtgtgccccgccgacggggggctggggcagggcaaggctctggtgccctgggacacttgctcttttcagctgcagacgcccttgcacttggccttccctcgggcggtgccatcccacgcggagccacgtccagggctacacggtgcgtgggccgaggctccggcatcagcgtttcgggctgttcttatgcttgtggtggccacaggcctcttcctgctgcacctgccccgccttggggacaggcctgagccccaagcccgctgcctggtttcagggatggggtctctgggaatgcagtcctgccgggttgggccccactccaacaggggcagcagagcagaggaggccgggctgtgctgggcgtcctgcagacccctgtgcccctgaaacagc

SEQ ID NO: 3268 - DNA, 6000 bp, Homo sapiens
gaggtttcaccatcttagccaggctggtcttgaactcctgacctcgtgatccacccatctcagcctcccaaaatgctgagattacaggcgtgagccaccacgcctgaccaagttgaggctaggtcattttttaattttttgtaaagacagggtctcactgtctccaactcctgagctcaagtgatcctcctgcctcagcctcctgaagtgctgggattacaggcttgagacactgcgcccagccaagagtgtcttttatcctccgagagacagcaaaacaggaagcattcagtgcagtgtgaccctgggtcaggccgttctttcggtgatgggctgacgagggcgcaggtacgggagagcgtcctgagagcccgggactcggcgtctcgcagttggtctcgtcctccccctcaacgtgtcttcgctgcctctgtacctcttctctagcagctctgggaccgggcatatcagcatggtggcccgatgcagtggcacagcctcggtggtcactggctcctggagacacaagcagatctctggcctcagggagccctacacactgttgggatttgaaaggcattcatatgtttccttgtccagaagttaattttaggccataaacctgcatgggacagacacactggcgtctctagattgtagagatgcttgttggatggttgagacccaatcatagtttgcagggttgaaggggggctcattgcaccctgagagactgtgcactgctgtaagggcagctggtcaggctgtgggcgatgggtttatcagcagcaagcgggcgggagagggacgcaggcggacgcctgacttcggtgcctggagtggctcttggttccctggctcccagcaccactcccactctcgtttggggtagggtcttccggctttttgtcggggggaccctgtgacccaagaggctcaagaaactgcccgcccaggttaacatgggcttggctgcaactgcctcctggaggccgggatgaattcacagcctaccatgtccctcaggtccagcactcctggggagaagacagagacgctggcgctgcagaggctgggggagctggggccacccagcccaggcctgaactgggaacagccccaggcagcgaggctgtccaggacaggtgtgcttgcgtagccccgggatgcccctagcccctccctgtgagctgcctctcacaggtctgtctctgcttccccaggactggtggagggtctgcggaagcgcctgctgccggcctggtgtgcctccctggcccacgggctcagcctgctcctggtggctgtggctgtggctgtctcagggtgggtgggtgcgagcttccccccgggcgtgagtgttgcgtggctcctgtccagcagcgccagcttcctggcctcattcctcggctgggagccactgaaggtgagggggctgccaggggtaggctacaggcctccatcacgggggacccctctgaagccaccccctccccaggtcttgctggaagccctgtacttctcactggtggccaagcggctgcacccggatgaagatgacaccctggtagagagcccggctgtgacgcctgtgagcgcacgtgtgccccgcgtacggccaccccacggctttgcactcttcctggccaaggaagaagcccgcaaggtcaagaggctacatggcatgctgcgggtgagcctgggtgcggcctgtgcccctgccacctccgtctcttgtctcccacctcccacccatgcacgcaggacactcctgtccccctttcctcacctcagaaggcccttaggggttcaatgctctgcagcctttgcccggtctccctcctaccccacgccccccacttgctgccccagtccctgccagggcccagctccaatgcccactcctgcctggccctgaaggcccctaagcaccactgcagtggcctgtgtgtctgcccccaggtggggttccgggcagggtgtgtgctgccattaccctggccaggtagagtcttggggcgccccctgccagctcaccttcctgcagccacacctgccgcagccatggctccagccgttgccaaagccctgctgtcactgtgggctggggccaggctgaccacagggcccccccgtccaccagagcctcctggtgtacatgctttttctgctggtgaccctgctggccagctatggggatgcctcatgccatgggcacgcctaccgtctgcaaagcgccatcaagcaggagctgcacagccgggccttcctggccatcacgcggtacgggcatccggtgcactggtctgtcttctgggctttagttttgcctttagtccagccagaccctaggggacatgtggacatgtgtagatacctttgtggctgctagaactggaggtaggtgctgctggcatcagtaggcagaggggagggacacaggtccgtgtcttgcagtgcacaggacgggcccatgacagacaactgtctgccccagaacatccccaggataaggctgagaagcccaggtctagccgtggccagcagggcagtgggagccatgttccctgggtctctggtggccgctcactcgaggcgggcatggggcagtaggggctggagcgtgtgactgatgctgtggcaggtctgaggagctctggccatggatggcccacgtgctgctgccctacgtccacgggaaccagtccagcccagagctggggcccccacggctgcggcaggtgcggctgcaggaaggtgagctggcagggcgtgccccaagacttaaatcgttcctcttgttgagagagcagcctttagcggagctctggcatcagccctgctccctagctgtgtgacctttgccctcttaacaccgccgtttccttctctgtatatgagagatggtaacgttgtctaattgatggctgctgggagggttccctggggtggcgccgaaccagagctcaggcgagctggccagcaggaaacactcctgttgggttttgatgaggccctggccccggcctggggctctgtgtgtttcagcactctacccagaccctcccggccccagggtccacacgtgctcggccgcaggaggcttcagcaccagcgattacgacgttggctgggagagtcctcacaatggctcggggacgtgggcctattcagcgccggatctgctggggtgagcagagcgagggccccgggcgtctacgccaaggacaagggagtagttctccaggagtgccgcggcctcctgaccagcctggctccggggtgccggaagggctggggtgcggcacccacgccacccctctccggcagggcatggtcctggggctcctgtgccgtgtatgacagcgggggctacgtgcaggagctgggcctgagcctggaggagagccgcgaccggctgcgcttcctgcagctgcacaactggctggacaacaggtgggagctccctcccctgccctctccggggtggccgcagtcaccagccaggagcccaccctcactcctccggcccccgctggcctaggcggcttccacagcccctcagccacgcctgcactgcgcggtccccgcagctcccgccctgccacccgctcctactgacccgcaccctctgcgcaggagccgcgctgtgttcctggagctcacgcgctacagcccggccgtggggctgcacgccgccgtcacgctgcgcctcgagttcccggcggccggccgcgccctggccgccctcagcgtccgcccctttgcgctgcgccgcctcagcgcgggcctctcgctgcctctgctcacctcggtacgcccgtccccggccagaccccgcgcctcccaccggcagcgtcccgccccctcgcggggccccgccccggcagcgtctcacccctcgcagcgccccgccccctcgcagcgtcccgccccctcgcagggccccgccccggcagcgtcccgccccctcgtagggccccgccccggcagcgtcccgccccctcgcagggccccgccccggcagcgtccctcccgccctcctgaccgcgccccccacaggtgtgcctgctgctgttcgccgtgcacttcgccgtggccgaggcccgtacttggcacagggaagggcgctggcgcgtgctgcggctcggagcctgggcgcggtggctgctggtggcgctgacggcggccacggcactggtacgcctcgcccagctgggtgccgctgaccgccagtggacccgtttcgtgcgcggccgcccgcgccgcttcactagcttcgaccaggtggcgcagctgagctccgcagcccgtggcctggcggcctcgctgctcttcctgcttttggtcaaggtgagggctgggccggtgggcgcggggctgggcgcacaccccagggctgcaagcagacagatttctcgtccgcaggctgcccagcagctacgcttcgtgcgccagtggtccgtctttggcaagacattatgccgagctctgccagagctcctgggggtcaccttgggcctggtggtgctcggggtagcctacgcccagctggccatcctggtaggtgactgcgcggccggggagggcgtcttagctcagctcagctcagctgtacgccctcactggtgtcgccttccccgcagctcgtgtcttcctgtgtggactccctctggagcgtggcccaggccctgttggtgctgtgccctgggactgggctctctaccctgtgtcctgccgagtcctggcacctgtcacccctgctgtgtgtggggctctgggcactgcggctgtggggcgccctacggctgggggctgttattctccgctggcgctaccacgccttgcgtggagagctgtaccggccggcctgggagccccaggactacgagatggtggagttgttcctgcgcaggctgcgcctctggatgggcctcagcaaggtcaaggaggtgggtacggcccagtgggggggagagggacacgccctgggctctgcccagggtgcagccggactgactgagcccctgtgccgcccccagttccgccacaaagtccgctttgaagggatggagccgctgccctctcgctcctccaggggctccaaggtatccccggatgtgcccccacccagcgctggctccgatgcctcgcacccctccacctcctccagccagctggatgggctgagcgtgagcctgggccggctggggacaaggtgtgagcctgagccctcccgcctccaagccgtgttcgaggccctgctcacccagtttgaccgactcaaccaggccacagaggacgtctaccagctggagcagcagctgcacagcctgcaaggccgcaggagcagccgggcgcccgccggatcttcccgtggcccatccccgggcctgcggccagcactgcccagccgccttgcccgggccagtcggggtgtggacctggccactggccccagcaggacaccccttcgggccaagaacaaggtccaccccagcagcacttagtcctccttcctggcgggggtgggccgtggagtcggagtggacaccgctcagtattactttctgccgctgtcaaggccgagggccaggcagaatggctgcacgtaggttccccagagagcaggcaggggcatctgtctgtctgtgggcttcagcactttaaagaggctgtgtggccaaccaggacccagggtcccctccccagctcccttgggaaggacacagcagtattggacggtttctagcctctgagatgctaatttatttccccgagtcctcaggtacagcgggctgtgcccggccccaccccctgggcagatgtcccccactgctaaggctgctggcttcagggagggttagcctgcaccgccgccaccctgcccctaagttattacctctccagttcctaccgtactccctgcaccgtctcactgtgtgtctcgtgtcagtaatttatatggtgttaaaatgtgtatatttttgtatgtcacta

SEQ ID NO: 3269 - DNA, 6000 bp, Homo sapiens
gcctaacagcgtgggcatggaggcagtgatggggctggtggctttgcgtcccaaagccctgcccctggggagagccgaggaccactggccaggcaccagaggacgtggtccccgcaggcccccagagcccctggagtaatcaggaggtgccccagtgcaaggcacagagggcctcagcactggccccacaaacccatccggccctgctcaccctcagccgtcttccacatcgccaccctgatgcccaccaaggacgtggacaagcaccgctgcgacaagaagcgccacctgggcaacgactttgtgtccattgtctacaatgactccggtgaggacttcaagcttggcaccatcaaggtgagtgaggggccgtcagtgaggctgggccccaggcaggtgcccactgctgtgtcccgggttggtggcaggtcctcctccctgagcttcggtcacgaggagcaggaggagaggccgcagtgctcagggccccgtgggcacgagcttcaccccgagcctgcgttgtgtcctctgtgccctgaagcctgtggcgcctgctgctgagtgtctgtcaggagtaactggcaagtgcagactgggtgtgctgggtgggcacagtgtagttggtgcttcctgtctgtccggcgcggcccttgggcccccaccatctccccagtggcagctgtcaggctgctcagttggttatcgccacgcaccactaggcagcaaccagcgtcaccctcttcctggaggtgggctgggtcggccagtgtcacagcacggtccgggtgagccccagcatggcggggagagctggcatggcccaggcagggcagataggctggaggcctcactccaagggccccaggatgctgaggcagccactgaaccaaaaccccggggctggtagtcagagtccaggaggggcaggagcatagggaggtgggctctgctagatgccaagacaaccagttgggggggggggggcacctgggcggctgaggagggtgtggtggtgccgagatggggtgcacggctcacttcatggctgggcagacggattcggacgtgtggctgcagacaccctgggggccccagtgagtggaggtgccccagcaattagaggtgtcttgcctgtggctgcagcatatgtgggtgctgcgcccagatgtggagggggcttggcctgggggaggccagacaaacacagccccgctgccagaggggaaagttcaggggcagatgctgcccatggagctgacaggtgtctagcagtgcaaccaggcagtagccgagatcagccttcagcacacgctgtgtgcggggatgaccctttctcttgtccgggcagggccagttcaactttgtccacgtgatcgtcaccccgctggactacgagtgcaacctggtgtccctgcagtgcaggaaaggtagggccgggtggggccctgcagtgcaggaaaggtagggccgggtggggccctgcagtgtggcgccaagagccctgggcctggcgtgaccaccaagtctccccagacatggagggccttgtggacaccagcgtggccaagatcgtgtctgaccgcaacctgcccttcgtggcccgccagatggccctgcacgcaaatgtgagtgggggtgggtccaggcgtgagctggtgggacaggcccaggtgccacctgatagtgagctcaccccctgcctacgtccccagatggcctcacaggtgcatcatagccgctccaaccccaccgatatctacccctccaagtggattgcccggctccgccacatcaagcggctccgccagcgggtagggaatatggggctccctcagcggggtgtgctggctgcccaagctgtggggcgggtgtgtgggcagagcggttgccacgcctcccagacttactgcccaagccgcctctgccttcagatctgcgaggaagccgcctactccaaccccagcctacctctggtgcaccctccgtcccatagcaaagcccctgcacagactccagccgagcccacacctggctatgaggtgggccagcggaagcgcctcatctcctcggtggaggacttcaccgagtttgtgtgaggccggggccctccctcctgcactggccttggacggtattgcctgtcagtgaaataaataaagtcctgaccccagtgcacagacatagaggcacagattgcagtcagacagctcttttattgactttgtctgcttggtgcgggggttgggggggtgtcgaggctctagaagcggccatgcccacagaagtggtacacagaagcaggcacagccagctccgagggccttgaggctgcctgggccatacagcacactcgcgcgtgcgcgcgcgcacacacacacacacacagtcaccttcctccaccctgggagccagcccccaggaggagtcttttcctctaaccaccctggggtcctctgacatgcctagtcctgctacttgcccagacctgatgccagcaggcctgggcgctgctctcttgctacctggcctggggcaagggaggatgacaaggcctctggggtgatgagagtgcctggcagacagctgtgcccccagcaccggcccaaggccaagctcgcatccaagcagcagccgggctgccataacgccaccacacctaccaagcgcagcaggtgttgggggaggccagctctgggcgcaggcccctcagccctagtgaaaatagtgacatacaaaaatatacacattttaacaccatataaattactgacacgagacacacagtgagacggtgcagggagtacggtaggaactggagaggtaataacttaggggcagggtggcggcggtgcaggctaaccctccctgaagccagcagccttagcagtgggggacatctgcccagggggtggggccgggcacagcccgctgtacctgaggactcggggaaataaattagcatctcagaggctagaaaccgtccaatactgctgtgtccttcccaagggagctggggaggggaccctgggtcctggttggccacacagcctctttaaagtgctgaagcccacagacagacagatgcccctgcctgctctctggggaacctacgtgcagccattctgcctggccctcggccttgacagcggcagaaagtaatactgagcggtgtccactccgactccacggcccacccccgccaggaaggaggactaagtgctgctggggtggaccttgttcttggcccgaaggggtgtcctgctggggccagtggccaggtccacaccccgactggcccgggcaaggcggctgggcagtgctggccgcaggcccggggatgggccacgggaagatccggcgggcgcccggctgctcctgcggccttgcaggctgtgcagctgctgctccagctggtagacgtcctctgtggcctggttgagtcggtcaaactgggtgagcagggcctcgaacacggcttggaggcgggagggctcaggctcacaccttgtccccagccggcccaggctcacgctcagcccatccagctggctggaggaggtggaggggtgcgaggcatcggagccagcgctgggtgggggcacatccggggataccttggagcccctggaggagcgagagggcagcggctccatcccttcaaagcggactttgtggcggaactgggggcggcacaggggctcagtcagtccggctgcaccctgggcagagcccagggcgtgtccctctcccccccactgggccgtacccacctccttgaccttgctgaggcccatccagaggcgcagcctgcgcaggaacaactccaccatctcgtagtcctggggctcccaggccggccggtacagctctccacgcaaggcgtggtagcgccagcggagaataacagcccccagccgtagggcgccccacagccgcagtgcccagagccccacacacagcaggggtgacaggtgccaggactcggcaggacacagggtagagagcccagtcccagggcacagcaccaacagggcctgggccacgctccagagggagtccacacaggaagacacgagctgcggggaaggcgacaccagtgagggcgtacagctgagctgagctgagctaagacgccctccccggccgcgcagtcacctaccaggatggccagctgggcgtaggctaccccgagcaccaccaggcccaaggtgacccccaggagctctggcagagctcggcataatgtcttgccaaagacggaccactggcgcacgaagcgtagctgctgggcagcctgcggacgagaaatctgtctgcttgcagccctggggtgtgcgcccagccccgcgcccaccggcccagccctcaccttgaccaaaagcaggaagagcagcgaggccgccaggccacgggctgcggagctcagctgcgccacctggtcgaagctagtgaagcggcgcgggcggccgcgcacgaaacgggtccactggcggtcagcggcacccagctgggcgaggcgtaccagtgccgtggccgccgtcagcgccaccagcagccaccgcgcccaggctccgagccgcagcacgcgccagcgcccttccctgtgccaagtacgggcctcggccacggcgaagtgcacggcgaacagcagcaggcacacctgtggggggcgcggtcaggagggcgggagggacgctgccggggcggggccctgcgagggggcgggacgctgccggggcggggccctacgagggggcgggacgctgccggggcggggccctgcgagggggcgggacgctgcgagggggcggggcgctgcgaggggtgagacgctgccggggcggggccccgcgagggggcgggacgctgccggtgggaggcgcggggtctggccggggacgggcgtaccgaggtgagcagaggcagcgagaggcccgcgctgaggcggcgcagcgcaaaggggcggacgctgagggcggccagggcgcggccggccgccgggaactcgaggcgcagcgtgacggcggcgtgcagccccacggccgggctgtagcgcgtgagctccaggaacacagcgcggctcctgcgcagagggtgcgggtcagtaggagcgggtggcagggcgggagctgcggggaccgcgcagtgcaggcgtggctgaggggctgtggaagccgcctaggccagcgggggccggaggagtgagggtgggctcctggctggtgactgcggccaccccggagagggcaggggagggagctcccacctgttgtccagccagttgtgcagctgcaggaagcgcagccggtcgcggctctcctccaggctcaggcccagctcctgcacgtagcccccgctgtcatacacggcacaggagccccaggaccatgccctgccggagaggggtggcgtgggtgccgcaccccagcccttccggcaccccggagccaggctggtcaggaggccgcggcactcctggagaactactcccttgtccttggcgtagacgcccggggccctcgctctgctcaccccagcagatccggcgctgaataggcccacgtccccgagccattgtgaggactctcccagccaacgtcgtaatcgctggtgctgaagcctcctgcggccgagcacgtgtggaccctggggccgggagggtctgggtagagtgctgaaacacacagagccccaggccggggccagggcctcatcaaaacccaacaggagtgtttcctgctggccagctcgcctgagctctggttcggcgccaccccagggaaccctcccagcagccatcaattagacaacgttaccatctctcatatacagagaaggaaacggcggtgttaagagggcaaaggtcacacagctagggagcagggctgatgccagagctccgctaaaggctgctctctcaacaagaggaacgatttaagtcttggggcacgccctgccagctcaccttcctgcagccgcacctgccgcagccgtgggggc

SEQ ID NO: 3270 - DNA, 6000 bp, Homo sapiens
gtagtcccagttactcgggagactgaggtaggagaatcgattgaacctggtaggtgaaggttgtagtgagccgagatcgcgccactgcactccagcctgggcaacaagagcgaaactccgtctcaaaaacaaaaaaattcctcaatttcttggttgttttgtaacttatcaacaaatggtcatatagaggttaccttgtatgtagtcacgcacatagtcacgcacatggcagccggcggcggagcgcacccacggcgtgttcccacgcgtgtgaccccgggctctgccatgccctcctatgctcaggtgtgctgaggtccacacggccctgccgttgcactgcagctgcctgcaggattcagtgcagtggcatgcagtgcaggtgcggtgccccggagccacaggccacaccacagggcctgcatgcacaggggctgcggtgtctgggtttgggtaactacgccctgtgacatttgcacagcaacagaattacctaatgacgcatttctcagaacacatccctggcactaagtggtgcgtgactgctgcttttgcatccacatctagtttgatttgtgtgttattcctttgagtgcttctcattgttaagcaaccaagaactaaagaggtatgaactgcccctggactcaaacaaaaaggaaaacttcctgatttacaaaaggcagataaccatcacatgagggcatctttatgaataaattgctggttggttttaaaaatacagagtatggggaaatccaggggtagtcactacatgctgaccagccccaggtatctccggcccaaagctctgtgaaatccagattcagtgcttccgcggggatttctgacggcagctcagactccgcatccacacagagcgcgtggccctcaccctcccggcttcctcaacccttggccgtcccttgctcggacagtgcttcgggctgaccaggtcggaggcttgggtttgtcctggacccctctgcgtccttcctcactgcagcctccagcgcgtcccgtggctcctttcccaacgcagagcacggccttccctgcgcctgagcctgcaccctccgtcctggcggcgcctctgccctggcattccctgccactccatgcctccctattggccattctccgtctctgccagcgagagcctgctccctgagtcagaccctgagtcatttgtgttgctataaaggaatagttgaggctgggttattttttatttttatttatttttttgagatggagtctctgttgcccagactggagtgcagtcgcatgatctcggctcactgcaaagtctgcctcccacgttcaagcagttatctgcctcagcctcccaagtagctaagattacaggcgcccgccgccacagccggctaattttttgtgtgtgtgttttagtagagaggaggtttcaccatcttagccaggctggtcttgaactcctgacctcgtgatccacccatctcagcctcccaaaatgctgagattacaggcgtgagccaccacgcctgaccaagttgaggctaggtcattttttaattttttgtaaagacagggtctcactgtctccaactcctgagctcaagtgatcctcctgcctcagcctcctgaagtgctgggattacaggcttgagacactgcgcccagccaagagtgtcttttatcctccgagagacagcaaaacaggaagcattcagtgcagtgtgaccctgggtcaggccgttctttcggtgatgggctgacgagggcgcaggtacgggagagcgtcctgagagcccgggactcggcgtctcgcagttggtctcgtcctccccctcaacgtgtcttcgctgcctctgtacctcttctctagcagctctgggaccgggcatatcagcatggtggcccgatgcagtggcacagcctcggtggtcactggctcctggagacacaagcagatctctggcctcagggagccctacacactgttgggatttgaaaggcattcatatgtttccttgtccagaagttaattttaggccataaacctgcatgggacagacacactggcgtctctagattgtagagatgcttgttggatggttgagacccaatcatagtttgcagggttgaaggggggctcattgcaccctgagagactgtgcactgctgtaagggcagctggtcaggctgtgggcgatgggtttatcagcagcaagcgggcgggagagggacgcaggcggacgcctgacttcggtgcctggagtggctcttggttccctggctcccagcaccactcccactctcgtttggggtagggtcttccggctttttgtcggggggaccctgtgacccaagaggctcaagaaactgcccgcccaggttaacatgggcttggctgcaactgcctcctggaggccgggatgaattcacagcctaccatgtccctcaggtccagcactcctggggagaagacagagacgctggcgctgcagaggctgggggagctggggccacccagcccaggcctgaactgggaacagccccaggcagcgaggctgtccaggacaggtgtgcttgcgtagccccgggatgcccctagcccctccctgtgagctgcctctcacaggtctgtctctgcttccccaggactggtggagggtctgcggaagcgcctgctgccggcctggtgtgcctccctggcccacgggctcagcctgctcctggtggctgtggctgtggctgtctcagggtgggtgggtgcgagcttccccccgggcgtgagtgttgcgtggctcctgtccagcagcgccagcttcctggcctcattcctcggctgggagccactgaaggtgagggggctgccaggggtaggctacaggcctccatcacgggggacccctctgaagccaccccctccccaggtcttgctggaagccctgtacttctcactggtggccaagcggctgcacccggatgaagatgacaccctggtagagagcccggctgtgacgcctgtgagcgcacgtgtgccccgcgtacggccaccccacggctttgcactcttcctggccaaggaagaagcccgcaaggtcaagaggctacatggcatgctgcgggtgagcctgggtgcggcctgtgcccctgccacctccgtctcttgtctcccacctcccacccatgcacgcaggacactcctgtccccctttcctcacctcagaaggcccttaggggttcaatgctctgcagcctttgcccggtctccctcctaccccacgccccccacttgctgccccagtccctgccagggcccagctccaatgcccactcctgcctggccctgaaggcccctaagcaccactgcagtggcctgtgtgtctgcccccaggtggggttccgggcagggtgtgtgctgccattaccctggccaggtagagtcttggggcgccccctgccagctcaccttcctgcagccacacctgccgcagccatggctccagccgttgccaaagccctgctgtcactgtgggctggggccaggctgaccacagggcccccccgtccaccagagcctcctggtgtacatgctttttctgctggtgaccctgctggccagctatggggatgcctcatgccatgggcacgcctaccgtctgcaaagcgccatcaagcaggagctgcacagccgggccttcctggccatcacgcggtacgggcatccggtgcactggtctgtcttctgggctttagttttgcctttagtccagccagaccctaggggacatgtggacatgtgtagatacctttgtggctgctagaactggaggtaggtgctgctggcatcagtaggcagaggggagggacacaggtccgtgtcttgcagtgcacaggacgggcccatgacagacaactgtctgccccagaacatccccaggataaggctgagaagcccaggtctagccgtggccagcagggcagtgggagccatgttccctgggtctctggtggccgctcactcgaggcgggcatggggcagtaggggctggagcgtgtgactgatgctgtggcaggtctgaggagctctggccatggatggcccacgtgctgctgccctacgtccacgggaaccagtccagcccagagctggggcccccacggctgcggcaggtgcggctgcaggaaggtgagctggcagggcgtgccccaagacttaaatcgttcctcttgttgagagagcagcctttagcggagctctggcatcagccctgctccctagctgtgtgacctttgccctcttaacaccgccgtttccttctctgtatatgagagatggtaacgttgtctaattgatggctgctgggagggttccctggggtggcgccgaaccagagctcaggcgagctggccagcaggaaacactcctgttgggttttgatgaggccctggccccggcctggggctctgtgtgtttcagcactctacccagaccctcccggccccagggtccacacgtgctcggccgcaggaggcttcagcaccagcgattacgacgttggctgggagagtcctcacaatggctcggggacgtgggcctattcagcgccggatctgctggggtgagcagagcgagggccccgggcgtctacgccaaggacaagggagtagttctccaggagtgccgcggcctcctgaccagcctggctccggggtgccggaagggctggggtgcggcacccacgccacccctctccggcagggcatggtcctggggctcctgtgccgtgtatgacagcgggggctacgtgcaggagctgggcctgagcctggaggagagccgcgaccggctgcgcttcctgcagctgcacaactggctggacaacaggtgggagctccctcccctgccctctccggggtggccgcagtcaccagccaggagcccaccctcactcctccggcccccgctggcctaggcggcttccacagcccctcagccacgcctgcactgcgcggtccccgcagctcccgccctgccacccgctcctactgacccgcaccctctgcgcaggagccgcgctgtgttcctggagctcacgcgctacagcccggccgtggggctgcacgccgccgtcacgctgcgcctcgagttcccggcggccggccgcgccctggccgccctcagcgtccgcccctttgcgctgcgccgcctcagcgcgggcctctcgctgcctctgctcacctcggtacgcccgtccccggccagaccccgcgcctcccaccggcagcgtcccgccccctcgcggggccccgccccggcagcgtctcacccctcgcagcgccccgccccctcgcagcgtcccgccccctcgcagggccccgccccggcagcgtcccgccccctcgtagggccccgccccggcagcgtcccgccccctcgcagggccccgccccggcagcgtccctcccgccctcctgaccgcgccccccacaggtgtgcctgctgctgttcgccgtgcacttcgccgtggccgaggcccgtacttggcacagggaagggcgctggcgcgtgctgcggctcggagcctgggcgcggtggctgctggtggcgctgacggcggccacggcactggtacgcctcgcccagctgggtgccgctgaccgccagtggacccgtttcgtgcgcggccgcccgcgccgcttcactagcttcgaccaggtggcgcagctgagctccgcagcccgtggcctggcggcctcgctgctcttcctgcttttggtcaaggtgagggctgggccggtgggcgcggggctgggcgcacaccccagggctgcaagcagacagatttctcgtccgcaggctgcccagcagctacgcttcgtgcgccagtggtccgtctttggcaagacattatgccgagctctgccagagctcctgggggtcaccttgggcctggtggtgctcggggtagcctacgcccagctggccatcctggtaggtgactgcgcggc

SEQ ID NO: 3271 - DNA, 6000 bp, Homo sapiens
gggagggagaggtgggaggggctggcagggagggagaggtgggaggggctggcagggagggagaggtgggaggggctggcagggagggagaggtgggaggggctggcagggagggagaggtgggaggggctggcagggagggagaggtgggaggggctggcagggagggagaggtgggaggggctggcagggagggagaggtgggaggggctggcagggagggagaggtgggaggggctggcagcacccaagcagctgcacctgggcgcagggcccctcagcccctcggggagtgcaagcacatcgcagcccgactcggaagcgccactgccacctctgtctgtctataaaccagggcactagtgtgggccccaggcaccctgtgcggctgcaggggtctgccccagagcatgctgatgaaatcatcaccacggcttctcaaagagcctcaatttcctggtgtgtaaaatgagaccaggagtggctgcaaccctgcggtgccgtgatgaggtatggagagacaagaacacagagggctcagcgcggagcccggcgtggccaccgcggggagagggtgcggactcttcctagaccttttctttttgagacagagtttcactctgtctcccaggctggagtgcaatggtgcaatcttgcctcactgcgacctctgcctcccaggttcaagcgattctcctgcctcagcccccaaagtagctgagactacaggcatgcgccaccacgctcagcattttttttttttgagacagagtctcgctctgttgaccaggctagagtgcagtggtgtgatattggctcactgcaacctccgcctcccgggttcaagtgattctcctgcctcagcctcctaattagctgggattacaggcgcccacgaccacacctcgctaatttttgtatttttagtagaacggggtttcaccatgttggtcaggctggtcacaaactcctgaccttgtgatccccccaccttggcctcccaaagtgctgagattacaggcgtgaaccaccgcgcccaccctgttttttttttttttttttaaagaccgtttcctagtcgcccaggctggagtgcagtggcaccatcacagctaactgcagtctcaacctcatagactcagggaatcctcccccctcagcctcccaactagctgggactacaggcgccaccactaatatctatttattggtctcgctatgttgcccaggctggcctcaaactcctggcctcaagccatctgctctcctaaagtgctgggattacaggcgtgaggcaccgcgcccggctggacagtggttttgatttacgtttccctcatgactaatgaggccgaccatcttctcacacgctgttggccatctgtgcgtcttctttggagaaatctctgttcagatcctgtgatttttttttttttttttttttttttttgagacagggtcttgctctgtgacccagcctggagtgcagtggtgtgatcacagctcactgcagccttgacctcctcggctcaagtgatgtcccacctcagtctcctgaatagctgggaccacagatgcataccaccacgcccggccaatgttcttttattttttagagaccggggtctcaccctgttgcccaggctggtgtcaaactcctgggctcaagcgatccacccaccctggcctcccaaactgctgggattccaggcgtgagtgaccccttgtccatgtttaaacggggtccctgtctgttgttgaatcatagtgttccctgtatgatctggatgcaagccgatactgcatggatgacctgcaggtgctctctgtctccacagtcgcctctgcagtgggagctcgggtgccccacattcccaactgctgcagacacaaccaaagcctccccatcccttcccccacccctgccggcaatcgcgtacaggagtgagcgtgtgacttcttgtccacatttttgtccacaagtttggcgagtttgcatccgcgtctaataaagaaactaccgtttctcacgcaggcacgttctgaacgcccgagtgcgggagccacgtaagacccggctcagggaccccgggtgaggccagctggacatgcaggatgcaggtcctcaccactgcctccgctcggctgccagggctcttcctagaagacacaggcctctcctaggctctcctgacagaggccctacccctgcccccgagtcaccttgccccttggggactctctctgggcagctccctgtgggagctttgaaacctggcttcaatgtcacctgcactgggggtccttccaggccagccccctccccatcatccatctctgtccttggagaatcatctgcgtgttggttgaacgcgggctccagtgataacggagccctcgagggtggccctccttctgctgagggctcatggaggccttggtgacaatccctagtcctcgctctcaggatccagggaccagaaatgggagccaggggcccctccgtggcctggccagccccccaaggaagctgtgtctctggcagttgcgctctaaggcatcaggcctaggggtcgctccagaatgcctgtcttccccgacgccaatcccaggcaggggccccggggtctgcgcctgctgtccctacactctcccacactctcctgtcattcagggatgcaggtgggaaagggcaaggccccgggtgctcctatattttacatcagtgaaccaagcacctaccaagtccctcgatgtgcccagtcctggaccccagcatttgcgagacagcagcagacccaggtgacccccagccagggtgagtggcaaccagcaccagaagtggcctttagagcagggggccctgagctgatgacatctacacctaggccagtgccagccaggacaacctctgggacaatgggatgtcggctccaacgaccaatttacaagaaacacaaagcacacactcacagcaccacggaggtgacaccatggaggtggcacccccaagacacagcgagaaatccaggctgcaggagccagtttcttcaacaaattgcacaaggaaaaagagaggaagggaagctcctagacatcatcggacatttaaaagacaggcggtggctcaagcctgtaatcccagcactttgggaggctgaggcgggaggatcacgaggtcaggagatccagaccatcctggctaacacggtgaaaccccgtctctactaaaaatacaaaaaattagctgggcatggtggcgggcaccagtccaggctactcaggaggctgaggcaggagaatggcgtgaacccaggaggcggagcttgcagtgagctgagatggcactgctgcactccagcctgggcaacagagtgagactccatctcaaataataaaaataaataaataaataaataaataaaatacatcactcacacctgtaatcccagcactttgggaggccgaggcaagcagatcacctaaggccaagagttcaagaccagcctgaccaacatggtgaaaccccatctctactaaaaatatttttaaaaattagccgggcgtggtggcgcgcgcctctaatcccagctactcaggaggctgaggcaggagaatcgcttgaacccgggagatggaggctgcagtgagccgagatcacaccattgtcctccagcctgggtgacagagccagactccgtctcaaacaaaacaaaacaaaagacatcagctagctggtccaagcacagtggtgttcacaacgaattgatcacagccaggtagaattcttcattctttctccagtcctactgctttgcttgaccagccttaaagacacacatatatttttgtctgggcgcgttggctcacacctgtaatcccaacactttgggaggccaaggcaggcggatcacctgaggtcaggagtttgagaccagcctgaccaacgtggagaaaccccgtctctcctaaaaatacaaaattagccaggcatggtggcacatgcctgtaatcccagctactggagaggctgaggcaggagaatcacttgaacccgggaggcggaggttgccgtgaggtgagatcgcgccactgcactccagcctgggcaacaagagcgaaactccgtctcaaaaaaaaaaaaaaagtatatatttttaaaagacattggccgggtgcggtggctcacgcctgtaatcccagcactttgggaggccgaggtgggcagatcacgaggtcaggagatcgagaccatcctggccaacacagtaaaaccccgtctctactaaaaatacaaaaattagctgggcacggtggtgcatgcctgtaaacccagctaccaggtactcgggaggctgaggcaggagaatcgcttgaaccagggagtcggaggttgcggtgagctgagatcatgccactgcactgcggcctggagacaagagcaagactccgtctcaaaaaaaaaaaaaaaaagaaaaaaaaaaagacatcaactaattgcagtgtgtggaccttatttggctcttaattcaaactattaaaccaaaaatgtgaacacaccaggccttcggtggcatgaaggaactgtctgttgtgttaggtgggtctgcagtattgcgatgccctccaaaatgcttgcagataaaagggtggctggaatttggttcaaaacatgggtcagggctgggcgtggtggctcatgcctgtaatcccagcactttgggaggccgaggcgggcggatcatctgaggtcaggagttcaagaccagcctgaccaatatggagaaaccctgtctctactaaaaatacaaaattagccaggcatggtggtgcacgcctgtaatcccagctactcgggaggctgaggcaggaaaaagcgcttgaacccaggaggcggaggttgccatgagccgagatcgtgccattgcactccagccttggcaacaagagtgaactctgtctcaaaaaaaaaaaaaaaaaaaaaaaacacatgggtcaggagggagaagggtcggggcagggagggcagggcaggctctggggtggggggtctgtgagtcagccacggctctgcccacgtctccccacgaagcttcgagccacgcagagcagcacgttttgcagtacgccatcttttccaaaagccaccacctctcggcagcatcattaacccaaggcaggctgtggcctcagaagccccggctgtcctccacctggaactggacacagctgtccctgctgagcttcagcagccagggagccacaagtggagaggcacctgcgtgagccccccaggaaggctactggtgacacccagacagcaacgctcttggacccttgaacacctgccagcagctgtgatctgtgtccttcacctctcccagcttgacccctcttccctggggaaaacccagccgtctccccgaggaggagtttgcagggtagacagcaaaatggctgggctgccccacagcacagagggtggcctggggggccagccagggccttcacatccttcctaaggccctagtttgccatgggtcccctcaccccaccttccagaactctcccagcggcggccccaggtgtgtacagaacagcacccacctgcccacatgaggtcaccctgtgccctgttgcacacttggggggcctggcattcggaatcttgccagctcaggctgggacaggccaccaactcccagggtccccctcctccaaaccccaggaccagagcctaagaggacaacacaaggcaggggcgggggctccactgctgtgccaagggcctggagaacacgggccttgctctccgctcagcagccaccagcgcccttctctcccggacagctcctgaggggctgctctcatggacaccatcaggtgctgggaagcaggaaccaccaggccctggacagagtccccagtgaccggcctggcagacagaggagccctcagctacagcatcacaaacaacgggtggggtaggtctgatgcaat

SEQ ID NO: 3272 - DNA, 6000 bp, Homo sapiens
ctcgggtggaagttgcgttcagtgctgccgcagttcctccaacgtctccatggcaacgttcacacggatttcatagaacataaggtgtttgagctggaagggacctcagagatcggctcctcctgccccctcatttcatggagaggggagcaggcccagacagggaatgccacgtgcccaggggcacatagcaagccggggaccccgcggagggcacagaccgctgagctccagaggagggtcttgggaggtgccctgggggcacaggccgtggcggctttgccactccctggcttgctaagagccccttgaagtccaacccagctctctgctgctcagccacagagctctcgctcgagtgcctggcgggaacaggagtaggcaggacagggccctgtcctcaggaggctcccaggctgctacagcggccatgcagccgctggggaagggctggagagcatccagggagccagaagtggggcaggaggagccagggcaggctcccttgagggtggggctccaggcagagtctggaagcctgaggaggcctcactcgtgcctgcgccccctctcctggcacacaagggccagcccgagggccccactctgggggcagagtgtagggaagaggctggaaaatgggggccagaaagagactgtcctgatccatggctcccaggggtcgttttggctgggggctcacagcacacatccttccagacacccaggacggtcagaaggaactggcaggagttagagggcacggtgtaaggatgccagggggccgggccgtcagaaggtaacaggagcgaaagtcccagagcaaggccccaaggagacccagggcgctctctccgctcgaggacaggaacccgtggagaccttcccctccctggaagagccagctctgcaccagaagggtggggggctgtagcacccctcccaggggaacacggacctcactctccgcccccagctcccagggcccatctcaaactcggaccctgtctcagggacctgccctggcccacaggactcctctcttctccaggtctgaagatgccaagaatccggacatcccaaggcctccctgctgaactttcccaccatgccggcccccgccttgccctcgccggcccccgccttgccctcgccggcccccgccttgccctcgctggctgcctgttctagtttttctagttttatttgttgttgttgttgttgttttttgagatggagtcttgttccgtcgcccaggctggagtgtggtggtgcgatctccgctcactgcaagttccacctcccgggttcacgccattctgctgccgcagcctcccgagtagctgggactacaggcgcccgccaccacacccggctaattttttgtatttttagtagagacagggtttcactgtgttagccaggatggtcttgatctcctgacctcgtggtctgcctgcctcggcctcccaaagtgctgctgggattacaggcgtgagccaccgcgcccggccttttttttttttttttttgtggagaccaagtttcgctcttgtcgcccaggctggagtacgatggcgcgatctcggctcaccacaacctccgcctcctgggttcaagcgattctcctgcctcagcctcctgagtagctgggactacaggcgcccgccaccacacctggctaattttgtatttttagtagagacggggtttctccatgttggccaggctggtctcgaactcccgatctcaggtgatccgcccgccccggcctcccaaagtgctggggtttaatccatctttaacccactgcagcatcccactggtctctgcccatgggcatggactctgaccctcccctccctgcctccaggcctacagcttctttcctgaaggtcctctctgttcctattatccctcccctgggtgactgcaacccccatcaatctcatctccaggcctacaggctccaccatccatcccctcctgccagtccccaatattcctgtagcacagcgtcctctgttgttctgctcaaaagccacgcacagctctctacttcccgctgtacaatttccaagctcctaggaataacactcaggtttcccttcccagctgaccccatcctaccttaccagcttgattacctcccgtttcctccaaggaactgggccacactttggccacctcggcacaaagtgcccatctcctagcactctcagcctatgcatattgactccctccacctggggactgtctttctctctcgtgtcggactctagctcaatcctcaaagcccagtgcaaaccctccctcccccagaagccttgccctcactactgatcacacttgccttaaatctttgttagcaaggacatgtcctcctgaagtgaggcctgtgtttctaagtcacatttctttctcttttcttttctttcttttttttttccccagagtctcgctctgtcacccaggctggaatgcaacagcacaatctcagctcactgcaacctcctcctcctggggtcaagcgattctcctgcctcagcctcccgagtagctgggattacaggcgtatgccaccaggcccagctaatttttgtatttttagtagagacggggtttcaccatgttggccaggctggtctcaaactcctggcctcaagtgatctgcctgctcagcctcccaaagtgctgggattacaggcgtgagccaccacacctctttcaccaatttaataactgcttatggaggcccagagctggctgctggggacagcagttgaccaagacaagctgcttcctgtgcccggagagcttacactccagagggtgaaacagatggcaaacacagcaaccaagagacataatgatcaaagattccgaggcctgctggaagccaagagaggggtctgtgatgcaggcacccagagctccccattttcaagagaaaccagagacttggatttttatgtaaactctcctaattttaaaggttgccagcgcaagcccgtttcctctgctctctcaaggctcccctccccgcctggcctcccactttctccagcgcgcctgcctccttctcttcctgggggccccatccgcactcctccccctgcaggatgccctacttgcacccaactcctcctgctgcccgcgccctgggggtacctgagcagcagctggcaggacggggtccactggactgggagtccactgcccaggaccctggggccagtgcacagcagctgctgaggcccccagctcagaccctgggccagccatcctgaaagaggccttgtagcgcgggtggacacctggagtccccagggctgcagctgcagaagctaaatgcctctacccaggcccagtgcacacacactgggggttggtctggaagagctggggggccagaggagtgagacaaggaagggttctgagagggcttccgggtttgacccccagctctgccaggttcctggggattaagtctacagggatttctgccatgggacggtttatgttctctggagctggagatcacaggaacaaatcctagctctgcccttcctagcctgctgaccttgcacaggctccttgcctttctgggcctcggtttccccatctggacactgagggcagtacccaccttgcaggataactttgaagaggtcgtgtgcctggcacacaacagtgcttgctgtagggcaggcttccacggcctctgccaggccctctcgaggaatcactctgctgggcagtgccccccatctgtgttttctcaggcctctgacccgagaggcagccaattgtttggactctgggcactgccagctgggagggctcaggtctctgaagggcccaaggtcctggtgacagctgtcaggtctccggggacagctgggtcatctctccagctcccaaagaaacaccaagaagcccctgcatgccaaggacaccacccctctggaccactgtgccccagctctgaccactgcagtcccatcttctctgtgagagggggtgacagagctccagtgcagcccaggttggggaggtgggtctgccagggaccagcttaggatttggagaatcggccctggccacctgaaggtccgaacctggaggagaaggacaaggggccagccacacagcctgggcaggggcctctgctttccacctttcagaccctgagggcagagtcccgtgggaggggaccctcagggggccgggggctggctgccacagcgacttcctccttcccgcagatccccaggcgtgcacagcaggcagaagctgtgggggagatcgcagcgcccgctgtgtcctcccggtgaccagctgtcacctgagcccagggcgcctgccccagcagcctggtgtgtttgccaagccagggctggagcttcctggacccgcctaccctggaggggatggagcagtgaagggcaccgggccaagcgctaggcatctggggctaaggagacagaagcccgcggtgcccgtccatgcgggccctctgccccagcacccacatctcaggacaccccttcctcccaggtctggcggtccagtttgggggtcaccgagctggggtggtgtgcagccagcagaggggattcaggatcccggggtgactcctggcccaggcctgtcaccccacagctggctcctggccccaaggcagccacgggcaggggtcgtgatcgggggcgggacggggcccggacctcctgaccgccccccaccccccgccgagcgggggtgtatttgcatgtccccgccccacgcacggcattggcggcggcggcgggaggccgggcctgagtggctgcgcgcccgtggagcggcgggggcggggcgcgagccgggcgcccgggatgatgccgccgccgccgccgccgccgccgccgccgccaggggaagggttcgggtccgggtcgggctcggcgggcgcggggtgcgggacggcccagggcacggcggctgcagcgggagcacactgagcgcccgcccgccatgtccaggaagaagacccccaagagcaaaggggccagcacccccgctgcctccacgctgcccaccgccaacggggcccgaccggcgcgctccgggactgcgctttccggccccgacgcgccgcccaacgggcccttgcagcccggccggccctcgcttggcggcggtgtcgacttctacgacgtcgccttcaaggtgagccaggcacccgccccccaggccagcgcagcaggtggcgcccggcctgagccaagggttgggggtcggacagggggtgcagggcccgcggccccagggcgcggagccgacgcgggaggaaccccgtggggcttgcacggtgcatcgtgcacacacagctgtccatcccaggtctggggtatccaacagctggcagggcctgtcccccaccccccaggcggcatggtggcacaaggggtcccgcgccccagtgccctggcccccgcccggggtctcaccatttcccgtatgctgccctccctcaacccagcggctgtgggccttttttttttttttttttttttgctggggggaagaggtttgccagatggatggggaaccctgggactccagaccaaggcagaggctgtgtggacttggcagggggctgggaggaccattttgggtttggtagcacaggtttcggggagaaggcctgactgctgcccacttgcacctccccccaacctcagacttggcccaggtccctcttcagatcgagatctgatcctaatggggcaaattcctcgagccttgctggggtcatgtccctactgggatgtggagaagcccccggcagaggcctccccaagtctcttaggaggtacccagctgccaccccacctgctcccctcccagatgctgtccaccgtgtgggggtatggacgttagggagggtccgggatgcaggtggctgccctcactccccgctgactgagacggccactgtgcagaaggacagag

SEQ ID NO: 3273 - DNA, 6000 bp, Homo sapiens
agtgtacataaataaaccataaaaatgtgcagataataatatatttagctgcccaaacatgggcatttaatttctagaaatgatatataacaatgtaacaattagatactcagccatgaatgtgtatggcacagtcttcatcattagcaaactttgtgtataaaatattatttattatttattataatactgctttcagaggcaatgatcataccttacagcttttaacacaaatatgatgcaaaaggattaaaagtatatcataaacaaacaataaattctttctaaatacacttaaattcatattttacatgaaaaatataaacttcctacatttgtgactactgacttttaaaaagacctagaaaactattgttacgggcaatgttaaatgacataatgcttatgtaatggaaagtgtggattttcctctaaataaactataatcccttaacttcattactagggaaaatattgttaaagagaaggaaagcaagggaattctgctaggttgcataaatattgacataatcttcactctttcttccccaaactggtaatagacatagtttattccacccaacaaaatgctcttataagaccaaaactacccttattaacaacttctctgcagtcacgatgaaaagaaacactacttgtctgaaaaataccgacagcgctgcccttttcagattagggtgtgcctacgaatcttttgggaagtcttccattaaggattcctgggtttgctgaaactgaagtctactaggatcagagaaattaacacaggtctaatatggtgcaaggaacgagtgagagacacctgaggttataaatagcaaagcatgctgcggggtggggaagaccattctgaagtgcaatgttcaagacgctggcttaatatatgactaagtgtcagaagtcaggttttctgagaattactttccagataaacaactttatagcactgcacttaatcttacttactagagacatctcatttatcactgaattacaagtaactttaatcctattgatattgccataaagcccgttgaaaatccatcctggcacttttaaagggtttggggccctgttacatggggatcctcttgcaaaggtctcagccagaaattacaccccgagggtgtctgtatcccctggcctctttgtcaacaatcaaggagaagaggaggggcaaaaatgatctctgcatctgccagcactttcttcggcccctttcctatagggtcgggttctcccacttcagtcaaactaactttgtgtgtctctttcctcctcccacactgggtaaccagctgcttttcacttcatcgacaaaactggacacggatcaatttcaactgacctttgccgaaaggtggcgctgttgaggtaaaaaccaactcgctccaacaatagtttccactcttcgatccttttgcaggcttttcagaatttttttttttttttaatgcaccctcctagcgtctcccccttctcataaagtaaaataaatacgattaaaaacaccaaatgcatttcattaattgaaggaatcaacagtcccaacttctaagcagacgggctggtcttccaaaggctgggtcggtttcaggagctttctctccaaataaatctctgcttcttcgacttgcctatcgctttaaaatcttagaaacagagttagttgttggtttccttcttttttctttttcttttttatttcttttttgcataaacttttagagaatcaatctagaaatttgaactacttattagcatttgcaactgggggtggggggagcagcctcccccaccccaccccccactctgcgtttccggactagttccagaaaccgcggtttaaaatttaacccttcgagggtagctggtgagggctggggtattgtttttcccccttgctccctgccacgatcaagtccgaaataattaaaggaaacgtaaaagtgcaaagggcgcgcctgaccctgataaacagaggtcagatttcgtaaggggacgggtgagtgtgagtgtgtgtgtgtttgtgtgtgtgtgtgtaagagagagagagagcgagcgcgcaatatgagtctcaaaggccaaactccggccagtcaggagccggaaggctgagcccggctgacctgactttgagcttccccggagttatctcgcataggcgctcgctctgtccaagggcacgcgacgccagcgggcagccggtctccgtgaagaatggcctctaaacaacttattttacctcgttgtaaagagagggataaaatgggctttccctctccacggatgcccagccttctgggcaggcgcatggccgggcggcgcccagcccgcagccccgatccggacaccccactgcatccctcccttcccggtcccttccccgcacgggcgcccgagagacggacaaagagttggggccaagtttgagcgccgggcacggccaggctcagggaaggaaggtccccggcagacacctgggtaccagagttggtgcgaggaggaaaagctgggaggcgaattcacaatcctgggggtggagggcaggcaggggaggggaatcaggccaatcccagccgagtgagcccccagcgagctggggctccggatgggaggcctgtctcgcgctccaaagaaaagcaaaccgccctcccaggtccgcccggattgccgaagcccctctggaaaaactccttcccctcttacaccaaactttgcgccgggcctcgttccctcccgggtaggcagcggcgcaggaagggttaagccagcccgtcccagctgacagtcagctgattgggccctgattgacagctccgaaaagtttccttgtttctatactattatgctaatcgcggccgctctcgccgcctcccattggcccggagtgccagtcaatttctcatttggacctgacgtcacgagtgctataaaactcagcaattgctttaaactcttcttgctggatcagaggctttaaaatcttttttcatcttctagctgtagctcgggctgcttgtcggcttggcctccccctcccccctttgctctctgcctcgtctttccccaggacttcgctattttgcttttttaaaaaaaggcaagaaagaactaaactcccccctccctctcctccagtcgggctgcacctctgccttgcactttgcacagaggtagagagcgcgcgagggagagagaggaaagaaaaaaaataataaagagagccaagcagaagaggaggcgagaagcatgaagtgttaactcccccgtgccaaggcccgcgccgcccggacagacgcccgccgcgcctccagccccgagcggacgccgcgcgcgccctgcctgcagcccgggccggcgaggcgagcccttccttatgcaaagcgcgcagcggagcggcgagcgggggacgccgcgcaccgggccgggctcctccagcttcgccgccgcagccaccaccgccgccaccgcagctcgcggaggatcttcccgagcctgaagccgccggctcggcgcgcaaggaggcgagcgagcaaggaggggccggggcgagcgagggagcacattggcgtgagcaggggggagggagggcgggcgcggggggcgcgggcagggcgggggggtgtgtgtgtgagcgcgctcggaggtttcgggccagccaccgccgcgcaagctagaagcgccccagcccggcaagctggctcacccgctggccacccagcacagcccgctggcccctctcctgcagcccatctggcggagcggcggcggcggcggcggcggcggcaggagaatggcatcagaactggcaatgagcaactccgacctgcccaccagtcccctggccatggaatatgttaatgacttcgatctgatgaagtttgaagtgaaaaaggaaccggtggagaccgaccgcatcatcagccagtgcggccgtctcatcgccgggggctcgctgtcctccacccccatgagcacgccgtgcagctcggtgcccccttcccccagcttctcggcgcccagcccgggctcgggcagcgagcagaaggcgcacctggaagactactactggatgaccggctacccgcagcagctgaaccccgaggcgctgggcttcagccccgaggacgcggtcgaggcgctcatcagcaacagccaccagctccagggcggcttcgatggctacgcgcgcggggcgcagcagctggccgcggcggccggggccggtgccggcgcctccttgggcggcagcggcgaggagatgggccccgccgccgccgtggtgtccgccgtgatcgccgcggccgccgcgcagagcggcgcgggcccgcactaccaccaccaccaccaccacgccgccggccaccaccaccacccgacggccggcgcgcccggcgccgcgggcagcgcggccgcctcggccggtggcgctgggggcgcgggcggcggtggcccggccagcgctgggggcggcggcggcggcggcggcggcggaggcggcgggggcgcggcgggggcggggggcgccctgcacccgcaccacgccgccggcggcctgcacttcgacgaccgcttctccgacgagcagctggtgaccatgtctgtgcgcgagctgaaccggcagctgcgcggggtcagcaaggaggaggtgatccggctgaagcagaagaggcggaccctgaaaaaccgcggctatgcccagtcctgccgcttcaagagggtgcagcagagacacgtcctggagtcggagaagaaccagctgctgcagcaagtcgaccacctcaagcaggagatctccaggctggtgcgcgagagggacgcgtacaaggagaaatacgagaagttggtgagcagcggcttccgagaaaacggctcgagcagcgacaacccgtcctctcccgagtttttcatgtgagtctgacacgcgattccagctagccaccctgataagtgctccgcgggggtccggctcgggtgtgggcttgctagttctagagccatgctcgccaccacctcaccacccccacccccaccgagtttggcccccttggccccctacacacacacaaacccgcacgcacacaccacacacacacacacacacacacacacaccccacaccctgctcgagtttgtggtggtggtggctgttttaaactggggagggaatgggtgtctggctcatggattgccaatctgaaattctccataacttgctagcttgttttttttttttttttacacccccccgccccacccccggacttgcacaatgttcaatgatctcagcagagttcttcatgtgaaacgttgatcacctttgaagcctgcatcattcacatattttttcttcttcttccccttcagttcatgaactggtgttcattttctgtgtgtgtgtgtgttttattttgtttggatttttttttttaattttacttttagagcttgctgtgttgcccaccttttttccaacctccaccctcactccttctcaacccatctcttccgagatgaaagaaaaaaaaaagcaaagtttttttttcttctcctgagttcttcatgtgagattgagcttgcaaaggaaaaaaaaatgtgaaatgttatagacttgcagcgtgccgagttccatcgggttttttttttagcattgttatgctaaaatagagaaaaaaatcctcatgaaccttccacaatcaagcctgcatcaaccttctgggtgtgacttgtgagttttggccttgtgatgccaaatctgagagtttagtctgccattaaaaaaactcattctcatctcatgcattattatgcttgctactttgtcttagcaacaatgaactataactgtttcaaagactttatggaaaagagacattatattaataaaaaaaaaaagcctgcatgctggacatgtatggtataattattttttcctttttttttccttttggcttggaaatggacgttcgaagactt

SEQ ID NO: 3274 - DNA, 6000 bp, Homo sapiens
accatacctgatgcatcccattctattcagattatggatgtctgattccaacatgatatatttgagttgctataactcacaatcggggaaaatatattcctttaagcttttaatctttgtaatttggacatgaacaggggttttgtttttcatttttgcatgaagtcattatgtatgtactgacgtgaaactataattgtgtttctgatgttactgtgtcacaatattctatgcgatgtaacccatgtcctcctccccctcacaaatctcctataaatattcattgctttcaaaaactttaatactactggtccgaattggtcaataatgacaaatgcatggtttctaaattactgtatattgttctacagagattactagagtatatatagcaaggggatgttaagcagtaagaaaacacagttcacattgtatttggattagattggcttggatagaagtgaaacaaacaatgttagcaaagaagtctaaagacatgtggcccactgtaattgtacagaatcaaaaacctgaatagtactcattaaaatgagagagctcaattgttataaaagaaatgctgctaacagagaactgtaaatgtttagacacccctgtgaatcactaaataataatgtaaaaaggataaaaatgagaattaagttataagcctgagagcattactgctacacatctaaaaaaataattctgatcctctcttttttttttccaagagaaaatgggcgactataaaagaccttgcaataagagaaataaaaataccatgtcttcacagcagtgtacataaataaaccataaaaatgtgcagataataatatatttagctgcccaaacatgggcatttaatttctagaaatgatatataacaatgtaacaattagatactcagccatgaatgtgtatggcacagtcttcatcattagcaaactttgtgtataaaatattatttattatttattataatactgctttcagaggcaatgatcataccttacagcttttaacacaaatatgatgcaaaaggattaaaagtatatcataaacaaacaataaattctttctaaatacacttaaattcatattttacatgaaaaatataaacttcctacatttgtgactactgacttttaaaaagacctagaaaactattgttacgggcaatgttaaatgacataatgcttatgtaatggaaagtgtggattttcctctaaataaactataatcccttaacttcattactagggaaaatattgttaaagagaaggaaagcaagggaattctgctaggttgcataaatattgacataatcttcactctttcttccccaaactggtaatagacatagtttattccacccaacaaaatgctcttataagaccaaaactacccttattaacaacttctctgcagtcacgatgaaaagaaacactacttgtctgaaaaataccgacagcgctgcccttttcagattagggtgtgcctacgaatcttttgggaagtcttccattaaggattcctgggtttgctgaaactgaagtctactaggatcagagaaattaacacaggtctaatatggtgcaaggaacgagtgagagacacctgaggttataaatagcaaagcatgctgcggggtggggaagaccattctgaagtgcaatgttcaagacgctggcttaatatatgactaagtgtcagaagtcaggttttctgagaattactttccagataaacaactttatagcactgcacttaatcttacttactagagacatctcatttatcactgaattacaagtaactttaatcctattgatattgccataaagcccgttgaaaatccatcctggcacttttaaagggtttggggccctgttacatggggatcctcttgcaaaggtctcagccagaaattacaccccgagggtgtctgtatcccctggcctctttgtcaacaatcaaggagaagaggaggggcaaaaatgatctctgcatctgccagcactttcttcggcccctttcctatagggtcgggttctcccacttcagtcaaactaactttgtgtgtctctttcctcctcccacactgggtaaccagctgcttttcacttcatcgacaaaactggacacggatcaatttcaactgacctttgccgaaaggtggcgctgttgaggtaaaaaccaactcgctccaacaatagtttccactcttcgatccttttgcaggcttttcagaatttttttttttttttaatgcaccctcctagcgtctcccccttctcataaagtaaaataaatacgattaaaaacaccaaatgcatttcattaattgaaggaatcaacagtcccaacttctaagcagacgggctggtcttccaaaggctgggtcggtttcaggagctttctctccaaataaatctctgcttcttcgacttgcctatcgctttaaaatcttagaaacagagttagttgttggtttccttcttttttctttttcttttttatttcttttttgcataaacttttagagaatcaatctagaaatttgaactacttattagcatttgcaactgggggtggggggagcagcctcccccaccccaccccccactctgcgtttccggactagttccagaaaccgcggtttaaaatttaacccttcgagggtagctggtgagggctggggtattgtttttcccccttgctccctgccacgatcaagtccgaaataattaaaggaaacgtaaaagtgcaaagggcgcgcctgaccctgataaacagaggtcagatttcgtaaggggacgggtgagtgtgagtgtgtgtgtgtttgtgtgtgtgtgtgtaagagagagagagagcgagcgcgcaatatgagtctcaaaggccaaactccggccagtcaggagccggaaggctgagcccggctgacctgactttgagcttccccggagttatctcgcataggcgctcgctctgtccaagggcacgcgacgccagcgggcagccggtctccgtgaagaatggcctctaaacaacttattttacctcgttgtaaagagagggataaaatgggctttccctctccacggatgcccagccttctgggcaggcgcatggccgggcggcgcccagcccgcagccccgatccggacaccccactgcatccctcccttcccggtcccttccccgcacgggcgcccgagagacggacaaagagttggggccaagtttgagcgccgggcacggccaggctcagggaaggaaggtccccggcagacacctgggtaccagagttggtgcgaggaggaaaagctgggaggcgaattcacaatcctgggggtggagggcaggcaggggaggggaatcaggccaatcccagccgagtgagcccccagcgagctggggctccggatgggaggcctgtctcgcgctccaaagaaaagcaaaccgccctcccaggtccgcccggattgccgaagcccctctggaaaaactccttcccctcttacaccaaactttgcgccgggcctcgttccctcccgggtaggcagcggcgcaggaagggttaagccagcccgtcccagctgacagtcagctgattgggccctgattgacagctccgaaaagtttccttgtttctatactattatgctaatcgcggccgctctcgccgcctcccattggcccggagtgccagtcaatttctcatttggacctgacgtcacgagtgctataaaactcagcaattgctttaaactcttcttgctggatcagaggctttaaaatcttttttcatcttctagctgtagctcgggctgcttgtcggcttggcctccccctcccccctttgctctctgcctcgtctttccccaggacttcgctattttgcttttttaaaaaaaggcaagaaagaactaaactcccccctccctctcctccagtcgggctgcacctctgccttgcactttgcacagaggtagagagcgcgcgagggagagagaggaaagaaaaaaaataataaagagagccaagcagaagaggaggcgagaagcatgaagtgttaactcccccgtgccaaggcccgcgccgcccggacagacgcccgccgcgcctccagccccgagcggacgccgcgcgcgccctgcctgcagcccgggccggcgaggcgagcccttccttatgcaaagcgcgcagcggagcggcgagcgggggacgccgcgcaccgggccgggctcctccagcttcgccgccgcagccaccaccgccgccaccgcagctcgcggaggatcttcccgagcctgaagccgccggctcggcgcgcaaggaggcgagcgagcaaggaggggccggggcgagcgagggagcacattggcgtgagcaggggggagggagggcgggcgcggggggcgcgggcagggcgggggggtgtgtgtgtgagcgcgctcggaggtttcgggccagccaccgccgcgcaagctagaagcgccccagcccggcaagctggctcacccgctggccacccagcacagcccgctggcccctctcctgcagcccatctggcggagcggcggcggcggcggcggcggcggcaggagaatggcatcagaactggcaatgagcaactccgacctgcccaccagtcccctggccatggaatatgttaatgacttcgatctgatgaagtttgaagtgaaaaaggaaccggtggagaccgaccgcatcatcagccagtgcggccgtctcatcgccgggggctcgctgtcctccacccccatgagcacgccgtgcagctcggtgcccccttcccccagcttctcggcgcccagcccgggctcgggcagcgagcagaaggcgcacctggaagactactactggatgaccggctacccgcagcagctgaaccccgaggcgctgggcttcagccccgaggacgcggtcgaggcgctcatcagcaacagccaccagctccagggcggcttcgatggctacgcgcgcggggcgcagcagctggccgcggcggccggggccggtgccggcgcctccttgggcggcagcggcgaggagatgggccccgccgccgccgtggtgtccgccgtgatcgccgcggccgccgcgcagagcggcgcgggcccgcactaccaccaccaccaccaccacgccgccggccaccaccaccacccgacggccggcgcgcccggcgccgcgggcagcgcggccgcctcggccggtggcgctgggggcgcgggcggcggtggcccggccagcgctgggggcggcggcggcggcggcggcggcggaggcggcgggggcgcggcgggggcggggggcgccctgcacccgcaccacgccgccggcggcctgcacttcgacgaccgcttctccgacgagcagctggtgaccatgtctgtgcgcgagctgaaccggcagctgcgcggggtcagcaaggaggaggtgatccggctgaagcagaagaggcggaccctgaaaaaccgcggctatgcccagtcctgccgcttcaagagggtgcagcagagacacgtcctggagtcggagaagaaccagctgctgcagcaagtcgaccacctcaagcaggagatctccaggctggtgcgcgagagggacgcgtacaaggagaaatacgagaagttggtgagcagcggcttccgagaaaacggctcgagcagcgacaacccgtcctctcccgagtttttcatgtgagtctgacacgcgattccagctagccaccctgataagtgctccgcgggggtccggctcgggtgtgggcttgctagttctagagccatgctcgccaccacctcaccacccccacccccaccgagtttggcccccttggccccctacacacacacaaacccgcacgcacacaccacacacacacacacacacacacacacaccccacaccctgctcgagtttgtggtggtggtggctgttttaaactggggagggaatgggtgtctg

SEQ ID NO: 3275 - DNA, 6000 bp, Homo sapiens
tcgctccgtctctacccaagactctccttggagttcccctcacatggtgccccagagttctcttttatttctttatttagagatggagtttcactcttctcacccaggctggagtgcagtggctcgatctcggctcactgcaacctctgcctcccgggttccagcaattctcctgcctcagcctcttaagtagctgggattgcacgcgcccgccaccacgcctggctaattttttgtgtttttagtagagacggggtttcaccatgttagccaggatggtctattcttctttaaaaaattcttttttggccgggtgcggtggctcacacctgtaatcccagcaccttgagaggccgagggaggcggatcacctgaggtcgggagtttgagatcagcctgaccaacatggagaaaccctgtctctactaaaaatacaaaaaattatccaggcatggtgatacatgcctgtaattccagctactcgggaggctggggcaggagaatcacttgaacccgggagatggaggttgcggtgagctgagatcgtgccattgcacggcagcctgggcaacaggaatgaaactccgtctcaaaaaaaaaaaattatttttcttgtaatttccgtatgccctagggagggatctcagagggactgctttggaacaggcagtctctgggtaaggtccagagctcacagaccagccagaattcacactgggacggctgcttctgctggctcacggtgccaggctgtcactaagccagggtcacgatgagtcacctgcagcaggaaaggtgcccttgtgcctcccagtcccccaccccccacttccccagagcaggcccaagggtgtgtaaggtgagtccagcaggactgtgttattccttagaccataatccacagcttactgcttttttaaaaatgtagatttctgccaacccttcctcccaattcctatctcagaaaattgagggtagagcagagtgaccatagctgtctctccttccaggatttgaaccctagctcctcactctgcgaccatgtctctctggacacattacttaaactctctgagcttcagttttctcttttgtaagatggggatacttgtcaaataaggttgttgagaggattaaatgagatgatccatacaaaggcagtcagcactgtgcctggcagatggtcatctctgaatcaatgttagcggtcctgaatgcttctggagcacctcatagactagctgcttggcctttgaggacatacacagaactgcaaatgaaaaattacagtaaaatgggtaagagctgtcatgggaataatttggacatactgctgttgatgaagagagggagtgatgggatggttaagaaagggaagacatttgggccgggtgcggtggctcacgcctgtcatcccagcactttgggaggccaaggcaggcagatcacaaagtcaggagatcaagaccatcctggctaacacggtgaaaccctgtctctactaaaaaaaaaaaaaaaaaaattatccaggcgcggtggcgggcgcctgtagtcccagctactcgggaggctgaggcaggagaatggcgtgaacccgggaggcggagcttgcagtgagccaggatcgcgccactgcactccagcctgggcgacagagcgagactccgactcaaaaacaaaaaaaaaaaaaaaaaaaaaaagaaaaagaaaaaaagaaagggaagacatttgaatttgagactccaaagtgggtagaagaacattccaggaaaaagaaacccagcattcacataggagcagttaaacgagactgtggaccagcacagtggtacctctataatcccagctactgaggaggctgaggaaggaggacccctggagcccaggaattagagtccaacctgggcaccataagaagacctcatctctttttttttttttctgagacggagtctcactctatcgcccaggctggagtgcagtggctcgatctcagctcactgcaagctccgcctcctgggttcacccattctcctgcctcagcctcctgagtagctgggactacaggcgcccgccaccacgcccagctaattttttttgtatttttagtagagaccgcgtttcaccgtgttagccaggatggtgtcgatctcctgacctcgtgatccacctgcctcagcctcccaaaatgctgggattactggcgtgagccacagcgaccagctgacctcatctcttaaaaaaatgatgattattattttagagaggtggtctcactctgtcacctgggctgaagtgctgtggcatgatcatagctcaatacagcctcgaactcctgggctcaagtgatccacccgcctcaggttcctgagtagctgggactatagctggatgtgccaccacgctcggctataaagaaaaacaatgttttttgagatggagtctcgctctgtcgcccaggctggagtgcaatggcgcgatctcacctcactgcaacctctgcctcccgggttcaagtgattctcctgtctcagcctcccgagtagctgggacttcaggcacctgccagcacatccggctaattttttgtattttcagtagagatgaggttttgccatgttggccaggctggtctcgaactcctgacctcctggcctcccaaagtgctgggattacaagcatgagccactatgcctggccagaaaaaatttttaattaaaaaaaaatgagcctggccaatatggtgaaaccccgtctctactgaaaatacaaacattagccgggcgtggtggcgggtgcctgtagtcccagctactcgggaggctgaggcagggataatcgcttgaatccgggaggcggagattgcagtgagccgagatcacgccactgcactccagcctgggcaacagagcaggaatccatctaaaaaaaaaaaaaagagagagagagactgtggcccaattttatgctctgagctaaactgggagtttgaacacctgaagactgttaaaagttttacacaaggtagcaacacattcagatttgtatacatatatatatatttttgagacaggatctccctctgtcacccaggctggagtgcagtggcatgatttcggctcactgcaacctccgcctcctgggttcaagcgattctcctgcctcatcctcctgagtagctgggattacaggcgcccgctaacacacctggctaatttttgtatttttagtagagaccgggcttcaccatattggtcagcccggtctcgaacttctgacctcaggtgatctgccagccacagcctcccaaagtgttgggattacaggcatgagccacggcgcccggccagatctgtattttagaaaactcagtgggagttgtttgcagtgcgattaggggcagccagacgaaagagcaccagcgagcacgacactcgtaggaacacagtccagaggcaatcatgagggcagtgagagtaggagatgcccctggctacaatttagtgtttagaattatctgggcaggtgaccccaaagcctcaaaagagaagagaactctgtacttcacgtggcttggtacactctgctccctttgctttgaatgtccttccccgccgagtgcggtggctcacgcctgtaatcccagcactttgggaggccgaggtgggcggatctcaaggtcaggagatcgagaccagcctggctaacacggtgaaaccccatctctactaaaaatacaaaaagttagccgggcgtggtggcgggtgcctgcagtcccagcaactcgggaggctgaggcaggagaatggcgtgaacccgggaggcggagcttgcagtgagccgagatcacgcccaggcactccagcctgggcgacagagcgagactccatctcaaaaaaaaaaaaaaaaaaaaaagaaagaatgtccttccccatttgtcattcagcagtcaacacatgctgcctcctctgggaagccctcctggattactccatagactggctgtgggggctctgctctgtgttcatgtccgtttcccatgatagcgtttgtcagcatttgtcatccttttgtcatccagtttcctggttcctctcactggtctgtgagttcgaggagtgcagggcccagccatgataacctttgcacccgcagtgcaagtggagtgtcaacaacaatgtcctaggtgaatcaatgaaaatgagaacgtcagctggtctgtggagaagctagaggaacgagcagaaacggaccgacgtggccgggcgcgatgtttctcgcctgtaatcccagcactttgggaggccgaggcgggcggatcacctgaggtcaggagattgagaccatcctggccgacatggtgaaacccccgtctctactaaaaatacaaaaaacagccgggcgcggtggctcacgcctgtagtctcagctactcgggaggctgacgcaggagaatcgcttgaacccgggagcagtgagccgagatcgcgccattgcactccagcgtgggcgacagaacaagactccgtctcaaaaagaaaaagaaaaaagaaacagactgatatcgcaggaagcctggccgagaactcaggccccagggccacacgcatcttttctcctccaattctgtctgggagtcgctgcctagaagtcccaggtcgtccaggaaccggggcccagacgagaagcaccgctctgtccgcagcgcaggcgcgcgtctctgcgggaggctgcgaggccccgcccctcgggccctagaccccgcctcccatcccccgcagcccgggcccgggaagggcggcaccgcccatgaatccgcatgcgcagtgcgcgcgcgagggcgccttgcccttctcccaatggcgggccgcgggccccttcccggcagcctccctcgggcagggagcgcgtcatttccggagggggaggcccgcggctgccgccgccatttcgggcgctgctgtgaagctgaaaccggagccggtccgctgggcggcgggcgccgggggccggaggggcgcgcgcggcggcggcaccccagcgtttaggcgcggaggcagccatggcgggcaacttcgactcggaggagcggagtagctggtactgggggaggttgagtcggcaggaggcggtggcgctgctgcagggccagcggcacggggtgttcctggtgcgggactcgagcaccagccccggggactatgtgctcagcgtctcagagaactcgcgcgtctcccactacatcatcaacagcagcggcccgcgcccgccggtgccaccgtcgcccgcccagcctccgcccggtgagggactgacgggacggcgggccctgggcggggtgagggccgcggaactcccagcctggctggctggtcctcgagagcggaccctcgggggtcgtgggcagagggctgggtgaccgtggcaggggcccgccggctgctcgggctcgctctcacccggggagcaggagtgtgggggaggaggagccgcggaccgaggccccggggtgtgcctggggagggcagccgcggggaaggggaactgcttcggccccagggtggggctggctcccgggccaggcgcaagggtagggcagggcaaggcaacgtggggacaaagagctgagggagatgttggcactgcgggggcatcacttggcagcggcgcccagaatgaatccgataatcctacaagtggcttttaggctggaaacgtttcctgccgtgttggagagccgggtttggccgtgctcccctggtggcctttggtaggaagtcaccacatactggccgggagggatggagacaccctcaggaaaccggtcaattttttcctttcttgggcatttttccaaaatctttgtaccgttctcttcccccgtggaggacgaaggtggtgaactaagtgctagaagaaatagtggtagcagaaagccttcagtgaccagcccaacccagtttaaggcgatgcctggctatgtgcaagagatctaagcgt

SEQ ID NO: 3276 - DNA, 6000 bp, Homo sapiens
ttctttctcttgaagggctcttacaacctcaagtgattaaagaatcatctctgggccaggtgtgctggctcatggctgtattcccagcactttgggaggctgaggcaggctgatcacgaggtcaagagatcgtgaccatcctggccaacatggtgaaactccctctcaactaaaaatacaaaaattagctggtcatggtggtgcacgcctgtagtccgagctactcaagaggctgaggcaggagaatcgggccaggggcaaattccttttttttttttttttttgagacagagtctcgcttcgcccaggctggagtgcagtgacaggatctcggctcgctgcaagctccgcctcctgggttcacaccattctcctgcttcagcctgggactcagtagtgggactagcggcgcctgccaccacgcccggctaattttttttgtatttttagtagagacggggtttcaccgtgttagccacgatggtctcaatctcctgacctcgtgatccgcccgcctcagcctcccaaagtgctgggattacaggctcgagccaccgcgcccggccagccacgagcaaattcttatgcataggtgaggttaagccacagcagtggcttaagcacaactgtaacacagctttccccatttaaagtcacacttgattctaggtccagcttggtggcgggaggggcaggaagacagtctgtgaactgctttcctatatgaacacaatccactttttctgttaagaaagagtagaagcagcaaaaacccattggtactaactactaccatggctctactcaaatctgtgctccctaaaaagtcagttattaccgatagctcaaatactcaagtgcccaaccttctgcccattcccccccaactgttccttgagcagtatgaaaattcgggaaaatgaatggaaagaagcttctatacaccgcagcaggccataactgccaaatacagataatggaatccccactatcaatcaagaatcaatccacgttctcaccctcaaggattgttcccgatagcagtaggagctatgagcaaggaatctctgtattctactttatactccccccaaaataagttttcaaaccgtgaccacatgtgaagcaataattaacctaacaaattttgagagactcagggtttttttttttttgagacagagtttcactcttattgcccaggctggaatgcaatggtacgatctccgctcaccgcaacctccacctcccgggttcaagcgattctcctgcctcagcctcccgcgagtagctgggattacagacatgcgccaccatgcccggcgaattttctatttttaatagacgcggggtttctccatgtcactcaggctggtctcgaacccctgacctcaagtgatccgccccccctcggcctcccaaagtgctgggattacagacgtgagccaccgcgcccggcctctgggctgatcctgccagttttgtaaatgcagcagaaacaatctcctcatacttccaattagagaagcacactggacacaatttgcgtttgagaaaccatcacgcagagtgagtgaatttccaaattaccaatggagaatacccaaatcttttcatgggtacagggggcagtactgacttgtttctcctgggagcgctcttccgaggatatttgggctgtctccggagtcgcagtgtcttcggccgccggaaggtgggtgacgtgcggatcttcttctttttgtggctgtggacacctttcaacactgccttcttggcctttaaagccttcgctttggcttcagctttaggaggggcaggagctgggagaaaaggaaagaaaacgtgggtgcgggatttagaaatcggtcacttccggccccaagaactgcagtgggccaccctggccacaggtgcatcagtggttcctttgaagacatcacaagtgtcaggagattaaaacttttccatcatatgcacgataccagaggcgaaagcgaccaactctaagtaactccagggatacgactatgaaacaaagtagcactgaatgaacgcttgatactttccagaaaatgtcctacgaattttacacataccccatcgcaaaaccacgctgcggagagaggggcgggtaatgtagcccggttgaacatgaaccagaaggaaaatggttaaagctgagggcactaattccttacaggcccggggacatggagctccaaccagtggatgcatgtagcttcccagaaccgaatgtctggccctccctggcggatgatgcctgccgcgttgcccccccccaactccctctaccggaactcagcccacgaggctgggcccacgcggcccacgtatactgcagcgtgtccgaaacgcagggagcagccccggagcagagccctcagggcttagcccagcagccgtgttcccaattcgttcgctctgcggcgcggcaatccccggtaaaccagctgcggccccatcaccaacacacaccttccttcttcgctttcggcgccatcttgtgaaaagggtctccaatgctcgttcccacgggcttatagcgccaaagagcactaaagactcgcgatgctttgtacttagagctgattgggtaatttgcagagcggcgccctctgggaacggtagttaggtttaatttctttttcgtgcgtgaacaaacatgcgccactcctcccctcaaaggcactaaagcttcatgggggttgtagttttttgttttttgttttttgttttttttttgagcgctctgtcgcccaggctggagtgcagtggcgcgatctcggctcactgtaagctccgcctcccgggtttacgccattctcctgcctcagccaccagagtagctgggactacaggcgcgtgccaccatggggattgtagttttttgaagacacgcgtttatttgctcaggccagcggacggcgtagccggctggcgctcgggtctggtcccgggagcttcctatcttgagcaactgccagtctcagggaagaggattgccatgccaggaggcaggaacgctgccaagaggaaagaacacatttggattgactcgggagttagatacagctaagttctagagtgctggagcaggatttgctcggtcgaactgaggtccagagaggaatgtggtttatcaataacacagtgatttggtggcagaaaaaaatcaagtcagggccgggcgcggtgactcacgcctgtaatcccagcactttgtgaggccgaggtggacgaattgcttcgagcccaggagttcgagaccaccctgggcaacacggcgaaaccctgtctctacaaaagaatacaaaaattagccgggcgtggtggtgcgtgcctgtagtcccagttccttgggaggctgaggtgggaggatcgcttcagccctggaggtcgaggctgcaatgagccattccagcctgggtggcagagtgagaccctgtctcaaaataaataaataaataaataaataaataatcgagtcacgagggggaagtgtcagaggaagtacaaggcggccacacctgcccctctttacctgcgacactgatactgtcaagttttactgcgtttcctgataatgcatttgaagttctatgaaaattccacacatttctccaagattcgctagtttttccggttagtaacttcactcacaatcccctgccctaaactagtcttcccttccgtgtcctggtcatctttacatcctcaaattcagctccagacacagagaaaggtttcttaacactcaggttcgcttctcctaaggtgtgtgcctaacccatccccacttgatcctttcttcttccctctcccttcataaaaccagacatgtcccctttgacggtgaaattgattgtgcactgccccctcttctatcctgcaggactttgcacaaaggagttgtccctgggggatagattccaatggggccagaacaatgaacacccataccagaggggagtccccgcctcccagagcggagaccaccccgaagagcagagtttccgggtccacttagcccttctttaacctccctcgagggaacttgatcttcagccctcccacctcacaatctacacagcagccttgaaggaaaagacgccagacttcagacgtctctctcctcggtgggcacctcattctaaccctggcacccccttcgcacgcttcccctccaccatcctcacccccgacctcccagggcagaagggcgagagggggcagactctatgagtcacctcccaggcctggagttgaggagggaagcgccgcctctccttgggccccttctctccccctttcccctccctgctggttcctggcatcgccagatgctgcgcagcagtctccgattccccatcaccaattcggctgggtaagggtccccatgaaggcgcagccgggtatagaggtgcaggggagagcagcctggggagtccctatctggataggctccagcctgggtcggggcggtcctggtgcccggtgaagcgtcaaaagagggagcctgagcggggcaacgcagaagggtggagaggagggggtggcgagggcgggcagcgaggcctggagccgccaggagaggggcggggggcggcccttctccaggaatttccggggatcgtgttacagcgttggcggagcccgagcggagtgggactcgaggccctgtagccggactgggcccctcgccccctcctccagcggcctgcgggccttggcagcgccgcccctgcccacactgaccccgtgtggcggggccgctccgcgcccccgggccgctctgtaatggtagggcagcctcagccccgagatgacgtcgggtctccgcggccccgggttattgtaggaaccatccggccccgcgtaatcgtaggaactatccggccccgcgtaatcgtagggtctgcgcgggcccggcccccaccagacgggactccccgcccccaattggcggccgaagagtctcctcgccccagagtcatcttcgggacgcccagggcccgggtgattttgggctcgccgcggccccgggtgattgtttcatctccgtggcccgcggtggtcgtagcgtctccgagaccgcggactcccgtagggtccccgtggccccgagttgtagtcgggacaccccggccgcgggtgatcgtcgggtctccacgcgcccgggtcgctgacgcggatccggcctcggcgccttctcagggcgccctgcaaggccgcaggcaggatgaacattctggcacccgtgcggagggatcgcgtcctggcggagctgccccaggtaggcgccggggccacgtcgggcttcagtctacagcccggggtgtgggcgaggaggaggcggcaccagaccagttagaggactgggcccagccctgccacccagctaggcctggtgcttctgggtggtccctgcactccacccctacccgggccgcttggctgcgggacaagggccaggagtaggaagctccattctcttccatccttcccactaagtgcctgaggaaggaggccgctttgcacgggcacaaagacttccacccccgcgtcacctgcgcctgccaggagcaccggacaggcaccgtggggtgagttagggacacccacaacaaagagaggaggtcccaggaaactctgtagtcatagcgagggtaaacaaccacccccttggggcttcatttcagcccctaccagctatatggttatttccccctctttaagcccctgtatcccctccttttctcccaacaaggttgttgtgagttctatgagatggggttgggtagaagggtggcagctggatttctgagtagagactaaggtgtctgaaatgggaaggtggtcacctgctcagatccccacatagcatccatggagccccagggcaggggtctggctgtgcttacagggatgagtcttattgtgggttttaaaggtaatactgataacagttggcaccat

SEQ ID NO: 3277 - DNA, 6000 bp, Homo sapiens
gctggagtgcagtggtacagtcttggctcactgcaatctctgcctcctaggttcaagcaagtctcccacctcagcctcccaaccagctgggattacaggcacttgccatcatgcctggctaatttttatgtttttgtagagatgagttttcaccgttttggtcaggccggtcttgaactcctgacctcaggtgatctgccgccggcctcggcctccttaagggctgggattacaggcatgagccaccacactcagcttttctttgtttttaactgattatatacacagacggtacacacttttaaaggtacaaaaataaaaagcgttcctggccaggcacggtggctcacgcctgtaatcctagcactttgggaggctgaggcggacggatcacctgaggtggggagttcaagaccagcctgaccaacatggagaaaccccatctttactaaaaatacaaaattagccaggcgtggaggcgcatgcctataatcccagctactcaggaggctgaggcagcagaatcgcttgaacctgggaggcagaggttgcagtgagctaagatcgcgccattgcactccaacctgggtaacaagagcaaaaactccgtttaaaaaaaaaaaaaaaaagtgttccttacttccctattgatcaggcacatagtcccacttcccaccagaggcaagaactatttccactttcttttttatctttctagatatattctcaaaaataacaaccataatactacgcgcataacacgtacccttatttttcttcacatggggtactgtatataagtgtataggtgtacatacacatgcatacacacacacatattttgttctgcactgtgcacttgatacttatcaaaaatatttggccaggtgtgatggctcatgcctataatcccagcactttgggaggctgagacaggtggatcacctgaggtcgggagttcaagacagccttaccaacatggtgaagccctgtctctactaaaaaatacaaaaattagccggatgtggtggcacacacctgtaatcccagctactcgggaggctgagacacaagagatatatatatatatatatatatatgtatatgtatatgtatatgtatatgtatatatatctatatctatatctatatctatatctatatctatcatgaaggttttaccatgctagtacattacaaatctgccccattcctattaatttctgttcagccttccattgtatggctctccctccattaatataattcattccctattgatggacatttagttgtttcctttttcttcttgctattgaaaacaatgactaatgctaccacaaataactgtacttaaacaaatttgcacttgtttaggtatactggagcttatgtaggtatacctaggagtgaaattcctgggttagagggtatgtgtgtgtgtgtgtgtgtgtgtgtgtatatatatatatatatatttttttttttaatgtagatggagtctcgctctgtcaccaggctggagtgcagtggcataatccaggctcactgcaacctccaactccctggttcaagcaattctcctgcctcagcttccggagtagctgggattacaggcacgtgccaccatgcccagctaatttttttgtatttttagtagagatggggtttcaccatgttggctaggatggtctcgatctcctgatctcatgatccgcctgccttggcctcccacagtgctgggattacagatgtgagccaccgcacctggcttcagtcttttgtttgacacttgtttatggcctgtttccctcctctgaccatgaaaagtacagtgccttgttcatcactctgttcccagagacttgcacatggtaaacttaataaacatttgatgaataaggaacccacattgtagactctctaccaattttgatctaagaacatggtcagcttgccgttgagcctttagcacactatacttttttttttttttttgaaacggagttttgctcttgttgcccaggctggagtgcaatggcacgatctcaggagtttctccatgttaggtcaggctggtctcgaactcctgacctcagatgatccacctgcctcgccctcccaaagtgctgggattacaggcatgagccactgtgcctgtccagcacactctactattaacatatgctttgtcttttttttcccccatgagtacaatggctgatacacaggaggactcaataagcctgagttgaaggaatgaattagtgacttttcagactgtggatcacatctgaagccaaatacaagttaggaagaaggacaagctaaggaggctcaggggagaactaggggctccaggctagaaagttgggaagagaggccaggtaatcgccatctagagattgttatctggggctgtgctggcagggaaattctcaagagctgtcccagagagacagtaccccatcttccaagaagtcaacagaacagaagtctctactcccacttccaccattaacctaggattgctttttccatcaggtatgtaggcatgggttttcaaggacctctgaaatactttagacccgaacaaatttccattgttagttctaaaatataagaaagctgcgaaaattaatattttatggccgtgtggcatggctcacgcccgtaatcccagcactttgggaggttgaggcgggaggatcactcgagcccaggaattggagaccagtctaggcaacatagcaagaccgtgtctctacaaaaaattaaaaaaattagcagggcatagtggcgcatgctgcagtcccagctactcaggaggctgagatggaaggatcacttgagtctgggaggttgaggttgcagtgagtcgtgatcatgccactgcacttcagtctaggtgaaagagtgagaggctgtctgggaaaaaaaattttttttaactaaatgtatataaatgtagcaatatgtcaactattaacagcaattagattgaattatatatatgtatagttatttataaatcttatttaatgtggggcgttactgcatttcagtatgtttgacataatataggatgaggccttcaaaattggaattttctttttctttttttttttttttttgagtttcgctcttgttgcccaggctggagtgcgatggcgcaatcttggctcaccacaacctctgcctccctgggttcaagcgattctcctgcctcagcctcctgagtagctgggattacaggcatgcaccaccacacccaactaattttgtatttttagtagagatggggtttctccatgttggtcaggctggtctcaaactcctaacctcaggtgatccgtccgcctcggcctcccaaagtgctgggattacaggcgtgagccaccacccccagccttacttaggaattttctaaaggggagactccctattttgtcaggatttcatcctctttaatcctaaatgtccatctttatatgaggatcctcataaaaagactcatcccagagtcacagaaaggacaaaatgaaatgaaaaaagaaaaaaaaacagtattgtaaaagaactaatctgtaagatgcaaagtagtattagcactggatttccggtcagctcctggagggctaaggggttgttttgttcatttcagcttctcagtcagtatcagttgggtggtcaactccaggggacactattcatgttatatttaactggaagaatttgccattcacagaaaaggcaatgtgaatgctgctccccagagcaccattcacagaaaatgcaatgtgaatggtgcctcctggagattttgccttgcttagcaaggtgctagagctaaggactcagaaatgtttgttaagtgagtgaatggaatcccaggctacttcttactcattccaacccccaggacgaaaaagaaaagttgacaaggggtgaggagagtgggggaggagaaagggtgatccttagctacaaggcttctatgagattgggtgtgggtcggtgctgatgggagtgcaggggaggtgagcagggagaggatactaaagcaagcgtcctgttcccagggttcctaattttcctagaaatattacttctctccgatctcagtgcagaaccatactgatgattttacagccctggatttgtcaagttcttatgttgatgtatgctgttcattcattaaacagaagaacaaacaaacgcagttagcgcctaccataagccaaattctgtgctggaggtagagtggtgaacaggacagcaaaggttctaccccgcatggggaagcaatcaccctcgggaggtggtacttcaattgcgactagaagaaaaaagaagagtgagtgattcagaccaggccaggcagtcaggaagcttgagggacatagccctctgaagcgggtctggagcaagggagtgagggagaccagtggacaggggccaaatcaggcagggtttgtggagactgtattttacccaaggtaattgggagccagtaaataattttaagaaaaaaaaagtgatatgggcaaattttaatttttcaaaatggagcgcaggttggaagaggcaaaagtagaggcagggagagccattaagaagctactgcggctgtcttggcgacacatgatggtgtctttaaccagggtggtgccagaagagatggagagaagtggatagttacaggtacgtttaggaagtaaaatccgacaggggtggtgacagtaaacagccctacctcaaaaaagatcatggaaaacacttcagtttgctcattaacccatcaggcgtccgccttcccttaaccctatcgcctcgatatatggacacagcagggggacgaggggcggggcaggcgcccacaaaaatccgggaactttaatttaaactgtgtggacttcagcggagagtagaataaagaacacaggaacttccggttactccggaagtggaagcttcatactcctaagctcctcccccggcggcgagccagggagaaaggatggccggcctggcggcgcggttggtcctgctagctggggcagcggcgctggcgagcggctcccagggcgaccgtgagccggtgtaccgcgactgcgtactgcagtgcgaagagcagaactgctctgggggcgctctgaatcacttccgctcccgccagccaatctacatgagtctagcaggtaagccccacccccacggtaagccccgcccatttgtcttgctcccgccccctgcgcccccaatacgcctctgcaatccctgaaccttagtttccccacgaggtctcttatgaatgtgagtgaagcccctaaggtgatgagagccttaccagcctctcttactttcccagaagctttcatttacttatttgttcagtcaaaagggtatttattaaatacattcgggccacaatgtctaggaatggcacagaaatcagaccagggtcccgcccattgggactcacagtccccacggggacatgagccttttcaagtgcaaggcagagaatgatttgagcccctgaaagactctttgattaggaagcatttgggataggaaggtgtcagttccggctttgaagacgtgggggcagggatcatcttggaacgttttgtttgaaggagggactttggactggtacattcgatttggaccatagtgggcaaagaaccaacgtattgagcactcactgtgtgacaggtgtcacaatatgtcaagtaatttttatcacaccctttgagatagtttctctaatcccagttttacagatggggattagagagattaaatgccctgcccaaggtcacacagccagtatgtagtaaagtggagtttccagttctggcctgtttgaccacaagcttgtcctctttactattataccactttgcattccagacagagggaacagagagaatggatgccctgggcagatgtgggcacatccaggagctttatttactcagggagcagggtaca

SEQ ID NO: 3278 - DNA, 6000 bp, Homo sapiens
gcctggaatgaccctccctctctcccacctgggcactttctgagacttctctttagaagccttcccttactcttctcaaatttacctagttaacattcatgcatccttcccaccttacctttaatgccccttccccagggaagccttccctgatggccccatgctggtcttggtctgcctttacacacacccctgaagcacctctccccgactgcactttttcatagttgtactcttacattcaattgtatgattagcaccagagggcagacttctggatctccagcaaagtgcctggcatatagtaggtgctcaacacctgagtgaatggcttctgtgagagcaggaaggtgagtgaatggaaattttttccttaaggcttacaggggcagctccgacctagagacatccgttgcaacctttcattctcacacccttcccaaggccgtcacggtccatatctgcaccccagtctgtgcttatcacacaataccaggccctgaatacagctctttagaccagccgtactgtgaagctgacagccctttctgcacctgcagatgtaaccatacctgggcttctccagggatggtctaagcctaggctgagctcgccaggtgcagtgactcacaactgtaatccctgcactttgggaggccgaggtgggtggatcacctgaggttgggagttcgagaccagcctgaccaacatggagaaaccccgtctctactaaaaatacaaaattagccaggtgtggtggcacgcgcctatcatcccagctacttgggaggctgaggcaggagaattgcttgaacccaggaggtggaggttgcagtgagccaagattgcgccatttgcactccagcctgggtgacacagtgagactctgtctcaaaaaaaaaaaaaaaaaaaaaaaaaaaaagactaggctgagctctacacagagactatggctgtgactccccaccaggcctgggctggaattgagattgctccaagtcctccagaagggcccttggaaagacctgtggtcccagcatcctctttagccccccatctcccctctgtgtttgtaaactgtcctactgggtcttttagtggcttccttcttcaggacaagaaaaatgcccttctttcctctctccttcccaaacagcctgacctagggctctgctggaaaggtaaggcccgattcagcaccctccctgttttctccccaggctttaccaccctgcagctgcaactttagccctgggaaacagaggggaagctggtaagtagaagccctgttgggtgttaatagggatgtagagctccaccttcctagataagaggagacagcaggagtcctgctaggttacctacccaggcgaaggccacacaggtgtggtacatgggggaggaggctggcacgaaggtgcggtagcggcagagcatcaccaggctggccaggccattgagaaacgaggccacggccgatgccggctcttgaaagaacaggaaccgggagaagggccactgaaaaaggagcagatgaaggaggtttgaagggcaggcaaccctcaactggcccagtccacctattcttgacatgctgaagcaacaggtcctcagctgagtcctcagctctggagtttggccaaagcctcaggttcagtacctcttcagactaatgagccaccctccagtgcctagttaagagttatacccccatcctggccagcaggcacagcactgtaagccctgatctctgggaagaccagatgggtcagggtagatgactcagtatggcctggtggaaacagcacagagttgccatccagaagacacaggtcccaacccctcctctaccactgaccacggtcctttgagcctcagcttactctgtgaaaaactggggtgaatacttcctgccaacctcaacaggccagaatgagataatactggattgaaacgtaccagcaggccaggcgcggtggctcacgcctgtaatcccagcactttgggaagctgaggcgagagggtcacaaggtcaggagattgagaccatcctggctaacatggtgaaaccccatctctacttaaaaaaaaaaaaaaaaaaatacaaaaaattagctgggtgtggtggcacacacctgtagtcccagctacttgggaggctcaggcatgagaattgcttgaacctgggaggtagaggttgcagtgagccaagatcatgccactgcactccagcctgggcgacagagggagactccatctcaaaaaaaaaaacaaaaaacaaaaaacaaaagaaagaaaggtaccagcaaactgtgcctcgctagacaagctgaagcatattactgtgaatccagacccctactggagaagcaacaggaaacaagccacagtaggtaagggaatttgtccctgcagtaaggtgggcatctcaaccactctaagaggcccagcaccactctctggggagactccaaagccttccagatattgctactccaaatccagaggcaggacacatgggtcctatccaattctatggaaaccagcagattttggggagaacaggtagctgccccaaacacacacgcattaccccatgcctcagactgcttggacagtgtggtccaaccagggggtatattactcctaccacgctactaccatatgcctaccctgaccctccaactcaccttgccatggaactgaggcactttgtgaccttcctggaggtagagcccaacggtgacccacatacactcatacttacagtcgtcccgacaggtccagcctgaaacagacaaatgtggcctggtgaactccccagcacagagaggaaagagagagcatgaatggggtccaagcgcaaatgtaggccaagagggcctgtaagttggagagaaccaggagaaatctcaaaattctagcttcccctttgaatgaatgagagatgatgagatgtacacataggggaaggtgtatgtacgtatgtatgcatattttagtgagcaattagagatattcgtcttttttttgtttgtttttttgagacagttttgtttttgttgcccaggctggagtgcaatggtgcgatctcggttcactgcaacctccgcctcctgggttcaagcgattctcctgcctcaggctcccgagtagctgggattacaggcatgcaccaccacacccaactaattttgtatttttagtagagatggggtttctccatgttggtcagggtggtcttgaactcccaacctcaggttatctgcctgcctctgccacctaaagtgcggggattgcaggcacgagccaccgcacccggcattttttttttttttttttttttgagacagggtctcgctctttcatccaggctggagtgcagtggggagagcatggctcaccacagccttgacctcctgggctcaaacgatcctcccacctcagcctcccaagtagcgagaccacaatgtctggctaattcttttattttttgtagagaaggcatcttgtcatgttgcctaggctagtcttgaactccagggctcagatgatctttctaccttggcagacatttcctctccttttgctcaagtccatcaagatgttggcatctgatgaactcatctatggaaacctgggtttatatttgtccttcctgaatataggatttgctcttactctcctggaaggagttcttgctatcttactcccttcctatgaaaatgaagcccaaattcttcaacctgacttttgaggctccaaattgcctttccaaccgtattggtcactactcctgttcatgtaccctgctccctgagtaaataaagctcctggatgtgcccacatctgcccagggcatccattctctctgttccctctgtctggaatgcaaagtggtataatagtaaagaggacaagcttgtggtcaaacaggccagaactggaaactccactttactacatactggctgtgtgaccttgggcagggcatttaatctctctaatccccatctgtaaaactgggattagagaaactatctcaaagggtgtgataaaaattacttgacatattgtgacacctgtcacacagtgagtgctcaatacgttggttctttgcccactatggtccaaatcgaatgtaccagtccaaagtccctccttcaaacaaaacgttccaagatgatccctgcccccacgtcttcaaagccggaactgacaccttcctatcccaaatgcttcctaatcaaagagtctttcaggggctcaaatcattctctgccttgcacttgaaaaggctcatgtccccgtggggactgtgagtcccaatgggcgggaccctggtctgatttctgtgccattcctagacattgtggcccgaatgtatttaataaatacccttttgactgaacaaataagtaaatgaaagcttctgggaaagtaagagaggctggtaaggctctcatcaccttaggggcttcactcacattcataagagacctcgtggggaaactaaggttcagggattgcagaggcgtattgggggcgcagggggcgggagcaagacaaatgggcggggcttaccgtgggggtggggcttacctgctagactcatgtagattggctggcgggagcggaagtgattcagagcgcccccagagcagttctgctcttcgcactgcagtacgcagtcgcggtacaccggctcacggtcgccctgggagccgctcgccagcgccgctgccccagctagcaggaccaaccgcgccgccaggccggccatcctttctccctggctcgccgccgggggaggagcttaggagtatgaagcttccacttccggagtaaccggaagttcctgtgttctttattctactctccgctgaagtccacacagtttaaattaaagttcccggatttttgtgggcgcctgccccgcccctcgtccccctgctgtgtccatatatcgaggcgatagggttaagggaaggcggacgcctgatgggttaatgagcaaactgaagtgttttccatgatcttttttgaggtagggctgtttactgtcaccacccctgtcggattttacttcctaaacgtacctgtaactatccacttctctccatctcttctggcaccaccctggttaaagacaccatcatgtgtcgccaagacagccgcagtagcttcttaatggctctccctgcctctacttttgcctcttccaacctgcgctccattttgaaaaattaaaatttgcccatatcactttttttttcttaaaattatttactggctcccaattaccttgggtaaaatacagtctccacaaaccctgcctgatttggcccctgtccactggtctccctcactcccttgctccagacccgcttcagagggctatgtccctcaagcttcctgactgcctggcctggtctgaatcactcactcttcttttttcttctagtcgcaattgaagtaccacctcccgagggtgattgcttccccatgcggggtagaacctttgctgtcctgttcaccactctacctccagcacagaatttggcttatggtaggcgctaactgcgtttgtttgttcttctgtttaatgaatgaacagcatacatcaacataagaacttgacaaatccagggctgtaaaatcatcagtatggttctgcactgagatcggagagaagtaatatttctaggaaaattaggaaccctgggaacaggacgcttgctttagtatcctctccctgctcacctcccctgcactcccatcagcaccgacccacacccaatctcatagaagccttgtagctaaggatcaccctttctcctcccccactctcctcaccccttgtcaacttttctttttcgtcctgggggttggaatgagtaagaagtagcctgggattccattcactcacttaacaaacatttctgagtccttagctctagcaccttgctaagcaaggcaaaatctccaggaggcaccatt

SEQ ID NO: 3279 - DNA, 6000 bp, Homo sapiens
tcagaccctggcagccatgcctgcgcaggcagtgatgagagtgacatgtactgttgtggacatgcacaaaagtgaggtgagtcgcaggacagaagagtgctttttgtttcagcagagcagcctggggagagataaaagctactcctggggcctgggcctgcattcctgagatgtgggtaagaggggcccagggtcagagtgtctggcaagcttggctctgcccctttgctgtcctggagactagggctaatcctgggctcagggagtggcctccccatggttaggatacaagtgctcatcaagggccacccctaggaaggaccaattttcctatcagaagcttctaagttatcctcctttggcccaaagggacacctcaagcctactctgaggaactctttccaatgaactaattcctacagtcacttccccagcaacctgtgcctcagcctcaaggcactgtggggtaggcctcagtttgtggcctggacatcggactgtggaccagacgactcctcccgatttctgtttgttttcagtcctctgaccccaagctggctggtgaagtaggtagagggaggagactttggtgcatgcatacacacacacacacacacacacacacacacacacacacacacacacacacacacgtctcctgtgccccccagtctccatggctggtcaatgattgactggcatttcacaggccgctggttgcagccccagcctgttgacttagaggtcaccctcggaagctagagccctgtcctgcctcttcagtgtcagtggtcactccactgcccacaggctggggtcttgggcaaaacacacgcatctgccctgatctgagtttgctgccctctgtcccgcagtcagccccactctgttcccactccctctccccagccccctagctagacccctctcaccagcacccctttcccttccctgagggtccccctcgctgtctttgtccctcagacatcctctttcctgggctctcctgccaggccctgctggagggacagttaaggaggaaatcgaatcagcagcgcccacccctgccccccttcctctcctcttgtcagacaccagacgaggttttttcctctggcttcccagctctgaatgggctcattctttttcagaggctcggcccctctcgagcctcctccccagggcgtgagttctgaccccagctcctccccccatccccactccagccccctctccagcttgctccaccctctctaccgcccaccgggactgggcattgtctgccagtccgggtttcttcctgggatttgggatgcagagaggatgggtttgcttgggcgggggggtggagagtgaaggggggaagcaggatctttgtagagggagggacctacagttacctggacttctttcctctgtctcccctcttggtacccttgactggggctcttgagggtaatgggtgaagccaaatctgccatggctcagttcccagctcagctctgtgaccttgggaaagttcctttagctcgtggaatctcaaggctcaaggttcctcttctgcaaaatggggaatgataacacctgcctcctctggagtcttggggactcagtgttctgaggaacgtggctgtaggtcagagtggcacagagtagggtccaatgaagcatggcgtccacagtagctttcctgactggactaacctttccggacacaacagcagggcaggggtggggcctggggagaaaggacacctctaaccctgatcctaacatcccgatggcctctaaggctgcctgcacactcatccaggtgcaagccctccaaggtgtggtgtgatgaaccagtgactcctggagccaggtcagcgcatcctcttcccgcagggctgtaagctgcaggactgagaggcaggttgaccaggtcctgggctggatgatggggtgagagtaaggggtcagttttgatacatgcccaacttttctctctagccctaagacatcctgggcaaattgcttacctcagttcccctgatcctcaccctaaccctaacaccagctcaagagaaaatagggatattgatggccatccagaagggctgctgtgttccatacacagcaatatttctcgaatgtttgtgacagcggtccaaggaataagttaattttacattatcactctggatacctgtacaaaactccaccttatccttactatatgaatgtgctagggttgtttttttgttttgttttttttttttttttttgagacagagtttcgctcttgttgcccaggctggagtacaatggcgcgatcttggctcaccgcaacctccgcttcccaggttcaagcgattcacctgcctcagccttcccgagtagctgggattacaggcatgcgccaccatgcccggctaattttgtgtttttagtagagacagggtttctccatgttggtcaggctggtaccaaactcccgacctcaggtgatccacctgccttggcctcccaaagtgctgcaattacaggcatgagccaccgcacccagccgtgctagggtctttttctgttcaattcctttctctctcttgctctctttctttctttcaatggagtcttactctgtcacccaggctggagtgcagtggcaagatctcagctcactgcaacctctgccctctgagttcaagcaattctcctgcctcagcctcccgagtagctgggattacaggtgcctgccaccacacctagttaatttttgtacttttagtagagatggggttttgtcatgttggccaggctggtctcgaactcctgacctcgtgatctgcctgtcttggcctcccaaagtgctgggattacaggcatgagccgccatactcggccaactttgtattactttcttaaagagagtttcccaaattatataagcttcaggccccacaaaacctagatctgccccagtataactaaatctgggaccatttattgagcaattattatgtgccaagtattgcgctgagtgcttccagagcattatctcctttaaccccagcatagtatgtcagatgctgttttacagatgagccaactgagaccagagatgctcagtcacttgcccaaggtgacatgactgatatggaatagagtcaagatttttttttttttttttgacacggagtctcactctgtctcccaggctggagtgcagaggcgcaatctcagctcactgcaagctctgcctcccaggttcacgccattctcctgcctcagcctcctgagtagctgggactacaggcacccgccaccacacctggctaattttttgtatttttagcagagacagggtttcaccgtgttagccaggatggtctcgatctcctgacctcgtgatctgcctgcctcggcctcccaaagtgctggaattacaggtgtgagccaccgcgactggccagattcaagatttgaacccaggtcctcttggtcccagaggcccctgtttctcaactccctaggatggcatagcaacctgtcccacaagaggtgcctgctttaagtgtgctcagcacatggaagcaagtttagaaatgcaagtgtatacctgtaaagaggtgtgggagatgggggggagggaagagagaaagagatgctggtgtccttcattctccagtccctgataggtgcctttgatcccttcttgaccagtatagctgcattcttggctggggcattccaactagaactgccaaatttagcacataaaaataaggaggcccagttaaatttgaatttcagataaacaatgaataatttgttagtataaatatgtcccatgcaatatcttgttgaaattaaaaaaaaaaaaaaaagtcttccttccatccccacccctaccactaggcctaaggaatagggtcaggggctccaaatagaatgtggttgagaagtggaattaagcaggctaatagaaggcaaggggcaaagaagaaaccttgaatgcattgggtgctgggtgcctccttaaataagcaagaagggtgcattttgaagaattgagatagaagtctttttgggctgggtgcagttgctcgtggttgtaattccagcactttgggaggctgaggcgggaggatcacctgaggttgggagttcaagaccagcctcaccaacgtggagaaaccctgtctttactaaaaatacaaaaaattagctggtcatggtggcacatgcctgtaatcccagctgctcgggaggctgaggcaggagaatcacttgaaccagggaggcagaggttgtggtgagcagagatcgcgccattgctctccagcctgggcaacaagagcaaaagttcgtttaaaaaaaaaaaaaagtcctttcgatgtgactgtctcctcccaaatttgtagaccctcttaagatcatgcttttcagatacttcaaagattccagaagatatgccccgggggtcctggaagccacaaggtaaacacaacacatccccctccttgactatcaattttactagaggatgtggtgggaaaaccattatttgatattaaaacaaataggcttgggatggagtaggatgcaagctccccaggaaagtttaagataaaacctgagacttaaaagggtgttaagagtggcagcctagggaatttatcccggactccgggggagggggcagagtcaccagcctctgcatttagggattctccgaggaaaagtgtgagaacggctgcaggcaacccaggcgtcccggcgctaggagggacgcacccaggcctgcgcgaagagagggagaaagtgaagctgggagttgccactcccagacttgttggaatgcagttggagggggcgagctgggagcgcgcttgctcccaatcacaggagaaggaggaggtggaggaggagggctgcttgaggaagtataagaatgaagttgtgaagctgagattcccctccattgggaccggagaaaccaggggagccccccgggcagccgcgcgccccttcccacggggccctttactgcgccgcgcgcccggcccccacccctcgcagcaccccgcgccccgcgccctcccagccgggtccagccggagccatggggccggagccgcagtgagcaccatggagctggcggccttgtgccgctgggggctcctcctcgccctcttgccccccggagccgcgagcacccaaggtgggtctggtgtggggaggggacggagcagcggcgggaccctgccctgtggatgccccgccgaggtcccgcggccggcggggccagaggggcccggacgagctctcctatcccgaagttgtggacagtcgagacgctcagggcagccgggccctggggccctcgggcgggagggggcagttacacggcagcggctcgagatggcccatccaagagactggcgctttccaggctccgaggggctccgggaacttgtcaaagaagttctctgaaattgttcagaaagttttcccgcaaagggtgtattgcgtagagcgcgcgcgcgcgtttccccccttcttgagccccctcaagctttctcaaagcctttccagttggcagcctccgcctccggactggcctgggctggattccttgggggggtcctctgccctgcccctcctccagcccctccccgctccccttcagacgattttggtttggttgctcctgcttctggcggggtcgggtgtgtgtgtgtgtggtggagtggagggtggcatagcaacctgtcccaaccagagccggggaggaaagggtggcccggagggtggcctcttgctggggtctgggttgggggcgggggagacgtttgctttgaacagattcttggggccagcttagggactgtgctctgtgacttttggagcgcgtggaccatggaggggtgggggtgggtttcttggggtgtaaagtgggagagttcccagagaaggaagctaagaaataaggccagatgggagcctagggagggc

SEQ ID NO: 3280 - DNA, 6000 bp, Homo sapiens
gaaggttgcggtaagctgagattgcaccattgcactccagcctgggcaacaagagcgaaacttcgtctcaaaaaaaaaaaaaaaagccctccagcccatctcaaagccccgtcctacttaccccactttcttttgctgttcatttcctctcaacagggacaggggccgaactcccatctctgccctcctagtcctgagccccaacctctttcttcatcttgttgcctaccttggctagagagagaagaggggaaggtggaagtcaaccagtcagagtgatatggcaaccctggagaagtgtcagaaaagcagctaggccagagtggggtaagaggtggcaaggaacagggttctgggtacccaaagggaagggaacattccttatctatctaggctagaaaacagtataaagaaaagtggcaagagtccagacccaaaaacccagaaacactgaaatcgttggtaaagcatacaaggcacagagggtgtcagcttcccttctctccatagggaaactgagtcattccttttccctaagtggaacattttcctctggaagcttgcctgggtccccccactatgggcagcaggtggatgggaaaagaaagacagtcactcccaaacacttatacacagctggctccaaaccagtctcctcctcataccagtcaccaaatcaaaatccctgctttctgtctatctgggggagggaatgatgggaaagaggtctgcaaggtggctgcacctcagggactcagggactacccctggatcccccacagttgcctgtctctgtcttcccactgccccaggagagtgaaaggcagaatttgaatcaactcttggaatagcttcccctctaacaccctggaggatgccttccctctccatactcccagcacaaagagaagtgctgtgatcctgaggccgacagtggctgggaagggagggcagcctgccatttcctttgtatggcccctccctccaggccctgagagctgctctgctttatacttttggcttccatatcatactaccctatcccctcctttaactggagtgggagaactgcggaaaggtaagccccaaactctgatggtaaaggagacttccctgctccccctcctctcctctctcctgctggcaaagataggatgagaagactctaagggaaagtgaaaccagaagctgggagcatttggggaatctaatacttggcacatattaaatgcttaaaaaaaaaaagtgtcaggctgggtgcggtggctcacgcctgtaattccagcactttgggaggccgaggcaggcggatcatgaggtcaggagatcgagaccatcctggttaacacagtgaaagcccgtctctactaaaaatacaaaaattagccaggcattgtggtgggtgcctgtagtccccgctactcgggaggcttaggcaggagaatggtgttaacccgggaggcaagctttcagtgagccaagatcacaccactgcactccagcctgggtgacagagcaagactccatcaggaaaaaacaaacaaacaaaaaaaaaaaacagtgtcagattaatgaataaaattaggagaaaccctgaaagacagcctggaaaaggtgtcagcttccttttccatttctcacctcagctaccaaaagcaagactcagccaggcctggtcccttccctggctccctcttttgtgacccatagcaatagcgcctgatgggacaaaggggagaattaagtggccactttctcttaccaggtaattgctaatttgccagtctctcatctcctgcatcagcctcccaagtagccagaactgaaggtctgcaccacaacacccagataatttgtgggtttttgtttttggttttttttttttttgagatggaggtctcactatgttgcccaggatggtcttgaactcatgacctgaagagatcctcccacctcagcctcccaaaatactggtgatgtcagtcagccaccttgcccagcctgctctccaactttctttcctccatttgcaccactctttctgattgggaaacccctaggagggagaaacatctgagctttgagttctcttggctggtagtacctcagtttcctctgctgtctttccagagcacccccaataagttcagctctgtctgcagagtctagaggtatatgctggacatgtcatcacttgctgacctagggtccaagaggtcaagatgagatagaggaagggatttactgaggcccaggccacagagcttgttccatggtggctggtagaggggcctatctcctgtttccccaaactgctagagatgtgtaaggcttttgagcaggggtagaggatgctgtgtggagttttagctgccagactttgaaaaaaacctcttcagaaagatatctggataccttggttcctaggggtcgtatcctcaagaaatcttagggtgcttcctagcaacagtctggaaggaagggagggagagatggagggagagagggaggggcctaggcatggctgttctgatgggagcccagagaacaggctgttcctgctacctccttagcaacggaaatctcagctggaggggccatcagacatatcctcttggagggtctatccagccttattcatgccacccctaccctcctcatagattcggggaatgctctgaagcagaggtggggaatgggaggggacagccctggtggtggtggggggtttcatgacaaggacggaaaaggagctgaggatgaactcaatctgagaagagctagcagcttcaagaaatgggtgggcagggtgagtggggtgggaggacagatgaggcaacacagggacagtggctatacgcccagacacgggctggatcctggcacctggggagaggcctgctttgaaagcagtgtgcccttcactttgccctgcccagacctgtcaccagtccatactgggagcccaagaaaaagagagaggtaaaaagaagatgggggtggccggggacggtggttcatgcctgtaatcccagcactttgggaggccaaggcaggaggagcacttgaggccaggagttcaagactagcctggccaacatggtgaaaccccttctctaccaaaaaaacaaaacaaaacaaagcaaaaaaacaaaaattagctgggcatgctagcacatgcctacaatccccgctacttgggaggctaggacatgaaaatcccttgaacccaggagacggaggttgcagtgagccaagattgtgccactgcactccagcctgggcaaaagagcaagaccctgtctcaaataataataataataataaattttaagaaggagaagatgggactggtaaacccttgtctttgagtgctccactctgcccctcaggaaaaaaaaaaagtggaacaggaggcacttcattttctatggctctgggtttaggatttcagaaagtcgtcaccacccaacattatagggccttgcatcaaagagagatatggtggggaaagccagaatggaagagagacaaaaccgtagcaccttcctcctccccctctggacaccatcactcctgccctgatccagattaccgctggccctccccactgcctcctagttctgcctttgtgatgcagagtataaatgtatctcatgcattgggattccctcccagctccttgagcagcccaatcccaagggactagttccatacagggtagagtacagaccctgagcactacatactgcagccttgctccccagggttccggccaaacctgatcaccgaggaggtggcatcgactggcagacagccaccctcagtgcacctcattccactcactgcactgactctgcacactgcagcctcctgccccacactgcagctgttgcttgtctcctgtgagcccagactgaacacaggttcgcttactgcatggaggctccgtacgctgcagcctcaattccccattacagctgccactgcacaccacaggctcccttcacccatggcatgccctcaacaccaccactgcactctgcacgccataggtttcatcccagctgctcttctcatctccatggttccagggaccccaagagaggtaccctcccctccgccaagcattacgaactccagtaccccctgtgaaagaagtggttccaacagcactgaggatgcaggtggctgagactaagacatgagcaagggcagcccaacttgggtaagctgtggctcagaatcccacactcgccaagtgactctgcccagtataaactgggcgattagccgagcagctccccctaacacacacacacttacacacacacacactcacacacacacccctccccaagagcagactatgtagccagggccccaccctgagagccgtgggaaggctgtggcccccgctggtaaaactgggctaatgacagcaggggaaccggcggggccaggggggtgctggggtaattagggctcggcctggcgctaggagatcctgagatgaaaggtgctctggcgtcactgggttggttttatgtccatgaatgcaggtgtgtggtgtgtgtatgtgtgtgctgggggtggggctggcatggtggagacctctcctttgggttgggttagggggtccatttgtatgcagcccaccgtcttccttagattgactctggtaccatttggatttttgtgggagcaaacatggggggaaataccaccacccgggagctaggaattgagggggtatggcagatcttgtcccctccccgagctcaggagagggagcagattgttgggggaaatggctggtgacagagaatagaaagagcctatatggagaagggtgacgttggaaaagggaggcagtggatcggtattgatgttagaaatgagaggggagggaggtaacagggaatgaacccccacaaggatgaaaaacgtaagatgattgaagttaaaaggacatcaggggtcacctgcccagccctcgcagctgaagcttgaggaagctctgcccccgacagcagtggcgatttgtcaaggtcacacagtgagttaccggcggagaagggacccgaactcccaaacaaactacacctgcaagcgtttggtgtttagactttctccccgatgtataaggtgcaggctgctcgtcgatacttcctcctccaccctcacggtgcacacccgaaaaccccccaattctcccggcaagcaaaggctattttttaatgacatcttttccaaaatatgtcaccaagtacccactcctgcgggagccgcccgggctggggagggcgagtccgagcggggcggggcagaggcggccgaggggcggccggacctctggcgggggtcccggggcgcggcagggggcggggggcgggggcgggcggcggcgaggcggcctgcagggagcagccgcgagccggccgggcgcgccgagcccgagccccagccggagcggggcgggggagggaggagccagagcggccgccgcctctgccggaggagccgcggggccgccacactcgccccccgccccccccgcgctcactcgcactcacacccgggcgcaggaggcgggcggcccgggccccaccggccccccatggacgcccccagcacggggcgctgagacccccgcgtcgctgcccagcccggtccggcgcgccacgccgaggtaaggaggagggagcgagggggcattaatatgcaaatgccttgcgattgattatgcaaagccgcggggctccgtggccagctcccaggcgggctaggggcgcccagggggtgcctgctgccagcctcagcctttcctggcgccccagtgaccctgtcacgagcccgggagcttgcaactgacgccctggggaagggaggtgttgctaggaggtcgctgggccccggggttcgcaggcggagatggcgtccgagcctccccctggagggcccgcccggcctctgtccggccagtctgctgcgcattcc

SEQ ID NO: 3281 - DNA, 6000 bp, Homo sapiens
gtctcctcctcataccagtcaccaaatcaaaatccctgctttctgtctatctgggggagggaatgatgggaaagaggtctgcaaggtggctgcacctcagggactcagggactacccctggatcccccacagttgcctgtctctgtcttcccactgccccaggagagtgaaaggcagaatttgaatcaactcttggaatagcttcccctctaacaccctggaggatgccttccctctccatactcccagcacaaagagaagtgctgtgatcctgaggccgacagtggctgggaagggagggcagcctgccatttcctttgtatggcccctccctccaggccctgagagctgctctgctttatacttttggcttccatatcatactaccctatcccctcctttaactggagtgggagaactgcggaaaggtaagccccaaactctgatggtaaaggagacttccctgctccccctcctctcctctctcctgctggcaaagataggatgagaagactctaagggaaagtgaaaccagaagctgggagcatttggggaatctaatacttggcacatattaaatgcttaaaaaaaaaaagtgtcaggctgggtgcggtggctcacgcctgtaattccagcactttgggaggccgaggcaggcggatcatgaggtcaggagatcgagaccatcctggttaacacagtgaaagcccgtctctactaaaaatacaaaaattagccaggcattgtggtgggtgcctgtagtccccgctactcgggaggcttaggcaggagaatggtgttaacccgggaggcaagctttcagtgagccaagatcacaccactgcactccagcctgggtgacagagcaagactccatcaggaaaaaacaaacaaacaaaaaaaaaaaacagtgtcagattaatgaataaaattaggagaaaccctgaaagacagcctggaaaaggtgtcagcttccttttccatttctcacctcagctaccaaaagcaagactcagccaggcctggtcccttccctggctccctcttttgtgacccatagcaatagcgcctgatgggacaaaggggagaattaagtggccactttctcttaccaggtaattgctaatttgccagtctctcatctcctgcatcagcctcccaagtagccagaactgaaggtctgcaccacaacacccagataatttgtgggtttttgtttttggttttttttttttttgagatggaggtctcactatgttgcccaggatggtcttgaactcatgacctgaagagatcctcccacctcagcctcccaaaatactggtgatgtcagtcagccaccttgcccagcctgctctccaactttctttcctccatttgcaccactctttctgattgggaaacccctaggagggagaaacatctgagctttgagttctcttggctggtagtacctcagtttcctctgctgtctttccagagcacccccaataagttcagctctgtctgcagagtctagaggtatatgctggacatgtcatcacttgctgacctagggtccaagaggtcaagatgagatagaggaagggatttactgaggcccaggccacagagcttgttccatggtggctggtagaggggcctatctcctgtttccccaaactgctagagatgtgtaaggcttttgagcaggggtagaggatgctgtgtggagttttagctgccagactttgaaaaaaacctcttcagaaagatatctggataccttggttcctaggggtcgtatcctcaagaaatcttagggtgcttcctagcaacagtctggaaggaagggagggagagatggagggagagagggaggggcctaggcatggctgttctgatgggagcccagagaacaggctgttcctgctacctccttagcaacggaaatctcagctggaggggccatcagacatatcctcttggagggtctatccagccttattcatgccacccctaccctcctcatagattcggggaatgctctgaagcagaggtggggaatgggaggggacagccctggtggtggtggggggtttcatgacaaggacggaaaaggagctgaggatgaactcaatctgagaagagctagcagcttcaagaaatgggtgggcagggtgagtggggtgggaggacagatgaggcaacacagggacagtggctatacgcccagacacgggctggatcctggcacctggggagaggcctgctttgaaagcagtgtgcccttcactttgccctgcccagacctgtcaccagtccatactgggagcccaagaaaaagagagaggtaaaaagaagatgggggtggccggggacggtggttcatgcctgtaatcccagcactttgggaggccaaggcaggaggagcacttgaggccaggagttcaagactagcctggccaacatggtgaaaccccttctctaccaaaaaaacaaaacaaaacaaagcaaaaaaacaaaaattagctgggcatgctagcacatgcctacaatccccgctacttgggaggctaggacatgaaaatcccttgaacccaggagacggaggttgcagtgagccaagattgtgccactgcactccagcctgggcaaaagagcaagaccctgtctcaaataataataataataataaattttaagaaggagaagatgggactggtaaacccttgtctttgagtgctccactctgcccctcaggaaaaaaaaaaagtggaacaggaggcacttcattttctatggctctgggtttaggatttcagaaagtcgtcaccacccaacattatagggccttgcatcaaagagagatatggtggggaaagccagaatggaagagagacaaaaccgtagcaccttcctcctccccctctggacaccatcactcctgccctgatccagattaccgctggccctccccactgcctcctagttctgcctttgtgatgcagagtataaatgtatctcatgcattgggattccctcccagctccttgagcagcccaatcccaagggactagttccatacagggtagagtacagaccctgagcactacatactgcagccttgctccccagggttccggccaaacctgatcaccgaggaggtggcatcgactggcagacagccaccctcagtgcacctcattccactcactgcactgactctgcacactgcagcctcctgccccacactgcagctgttgcttgtctcctgtgagcccagactgaacacaggttcgcttactgcatggaggctccgtacgctgcagcctcaattccccattacagctgccactgcacaccacaggctcccttcacccatggcatgccctcaacaccaccactgcactctgcacgccataggtttcatcccagctgctcttctcatctccatggttccagggaccccaagagaggtaccctcccctccgccaagcattacgaactccagtaccccctgtgaaagaagtggttccaacagcactgaggatgcaggtggctgagactaagacatgagcaagggcagcccaacttgggtaagctgtggctcagaatcccacactcgccaagtgactctgcccagtataaactgggcgattagccgagcagctccccctaacacacacacacttacacacacacacactcacacacacacccctccccaagagcagactatgtagccagggccccaccctgagagccgtgggaaggctgtggcccccgctggtaaaactgggctaatgacagcaggggaaccggcggggccaggggggtgctggggtaattagggctcggcctggcgctaggagatcctgagatgaaaggtgctctggcgtcactgggttggttttatgtccatgaatgcaggtgtgtggtgtgtgtatgtgtgtgctgggggtggggctggcatggtggagacctctcctttgggttgggttagggggtccatttgtatgcagcccaccgtcttccttagattgactctggtaccatttggatttttgtgggagcaaacatggggggaaataccaccacccgggagctaggaattgagggggtatggcagatcttgtcccctccccgagctcaggagagggagcagattgttgggggaaatggctggtgacagagaatagaaagagcctatatggagaagggtgacgttggaaaagggaggcagtggatcggtattgatgttagaaatgagaggggagggaggtaacagggaatgaacccccacaaggatgaaaaacgtaagatgattgaagttaaaaggacatcaggggtcacctgcccagccctcgcagctgaagcttgaggaagctctgcccccgacagcagtggcgatttgtcaaggtcacacagtgagttaccggcggagaagggacccgaactcccaaacaaactacacctgcaagcgtttggtgtttagactttctccccgatgtataaggtgcaggctgctcgtcgatacttcctcctccaccctcacggtgcacacccgaaaaccccccaattctcccggcaagcaaaggctattttttaatgacatcttttccaaaatatgtcaccaagtacccactcctgcgggagccgcccgggctggggagggcgagtccgagcggggcggggcagaggcggccgaggggcggccggacctctggcgggggtcccggggcgcggcagggggcggggggcgggggcgggcggcggcgaggcggcctgcagggagcagccgcgagccggccgggcgcgccgagcccgagccccagccggagcggggcgggggagggaggagccagagcggccgccgcctctgccggaggagccgcggggccgccacactcgccccccgccccccccgcgctcactcgcactcacacccgggcgcaggaggcgggcggcccgggccccaccggccccccatggacgcccccagcacggggcgctgagacccccgcgtcgctgcccagcccggtccggcgcgccacgccgaggtaaggaggagggagcgagggggcattaatatgcaaatgccttgcgattgattatgcaaagccgcggggctccgtggccagctcccaggcgggctaggggcgcccagggggtgcctgctgccagcctcagcctttcctggcgccccagtgaccctgtcacgagcccgggagcttgcaactgacgccctggggaagggaggtgttgctaggaggtcgctgggccccggggttcgcaggcggagatggcgtccgagcctccccctggagggcccgcccggcctctgtccggccagtctgctgcgcattcccgggccgggccccgttgccggccgccggagctcccccgcccgccgcgccgcggtttgtttacggtgcgccggaggcctgcccccccagcccccacccctagcctctgaggcccgagtggcctttgcaaagctgcctccagctgcggagggcagtatgagtgcggtggcgcgggtgggcttgcacgggtccggggagagggaagttcccccgcctcacccgcctcccggttgagcatggctgtctggttgcaacactgctaattgcaaaaacgcggttgttgggggggaatgtgtgtgtggaaggggtgtacttggtggtgcctagatgattaggagagttgctggctggggaggagagggagaaatggacctgtgtgtgtgtaccccaccttgtttccctccccttgcaacgtgtctctggtgccccttctccatctggggccctcccttgtccagcgtgaaagaaaggcctggggggatgacaggggcaattgaaagaaccaccgttccaggggtgggggtgggggacacagaaggaaagccagtgaggtgggagcctgcccctcagtgctggctttggctccaggagggggaggggatgaagggggctgttgtccaaaatgaggggggaagcaaaagtgacacgcaga

SEQ ID NO: 3282 - DNA, 6000 bp, Homo sapiens
ccttgtgcccatggtgccatctgcagcaagtgccttggccccgtgacattcatgcctccagcattcagctgccccagctcccagctccaattacccgctggctgctgggggagggtggggagaatgtgccgtgcccagcttgggggtgctcctgcttctgctttcttggctacttggatctcctgcctccattcctgaggggaattgggcagggggggcgtgaagttctgtgggctgataaggaggggctgagttctccagcatgggtgtgggcatgaccacccaccagtggtcatgggggatggatgtgacctgggaggagacctccagacctgggcacccaccttgatgcctggctggagctggcccgggcaggaggagggagaggagagcagcaggtgggtgaggctatgggggagccgagtgggaagcagtctttgatgttaatactgggcatctggcccaagtcaaggctgctgtttatgtctttctgtctctgacctgcagggggggtttcctgttatattcttttggggcggggtggggaggatcctttgtttaagtaaccaatctcccccttatgaggatccccaccccatctcccattctctagcctctaaggtcccacagtggctaggtgatgagtcactgccccccagctccagaacctgtctcctgggggcccagtgagagctcaccaaggggtgccgcctcccctcctcccgtctcccccatgcctgccaggctggggccctgagtctgtgtgtactcctctgccacatcacacctgccaaatagtaccttccttcccgccttcactcctcctctccttcctggcactaggataacagagagttgggtggggcagccctgctcaatccatacctgagaatagaacagggggtatgggaaaggacagggagtcccggtcctagagaggcctctgcccctcagcatgggggcacatgtcgctgctgcagcactgccaccaccacagactcccaggggcccttggtgtgggtggctgcctgtggtgcccgtgttggcatggggggcagtgctgcccatagacgcctgtgcccatgcatgcccatttatgtgtctgggccacggtggccgccccggcccctcagcatcgcccttcctggctcccatggtgggaggctgggtgatcaggagtgggtggtgggggagggatctccccccaccctagcagcaggcagaggggaaggggagagggaggtgtgaacctacccacagaactattaatagcccacatgccaggccaccaagaaccagctgtcaccgtggaaaccattcctacgcccccctccccccagcctgcatggggtgggacttagacagggtacgaagccccccacccatctttctttgttacctttctctctttgtctcccctccttcatgtgtctctcctccctttatctgtcctcctttctacctcaccccttctccccatcccccatctctggctcccctttcttcctctccctctactgccttgtcacccctagctctaccccagccctgtcccatttctttgttcttccccctcctcccttcttccctctttcccccaccagcctttttacccctcctcccatctttccacccttttctcagccgccccgcatgtacgtgtccctgtggctggcaaggagggctgggctttcttcagagcactaaggacaaagttcaggggccccagaaaggtggggccaaagcccagagcagatacgcaggagggttaatgcgggtagtattgggggttagatcctggggacagaaactcccctctggcagccccaggagtcctttgggggtgtcctcagatatacaggactgcagagtgggacggctcggcagtgggaacctggcggggcgcccgtggatgccgcattggccccgtgtccctgtccccccatggcagaagtacttaagcttaatgaaatgcttccccctccacgggcactttgcctacactgcctcccagcagctcttatctcacaaggagggagtgggtggccaggccagccgacaggtgggtcttgctgtcctgctgtccagcctgggcacagaaccccatagctccgccccctcggcctccttggggcagggcctccctcgcctctgcagaggaggtaccaggaaggagtttggggagttaagctggactctggaggaggggtgagaggctgcccttcagggtgggtacccctgccccatgccccttacccgctgacctttttctgtccgtggctaacacaggctcatgtggtatgtgtctccccacatgctgggccctctgcctcgcctctgtatcaccccaaaggcccaagtgtgtccctggagagatgccaaggagtccccaggggttccagcctctttctgggtacccagtgagggtgccctaggcagcaagggcagcaccttgctcctctgcccactaccaggggctgactgtagctgggctgcactgcccagcaccagggcaccattcagttcaaaagaggggtggggcagagagcgagtctgcccctccccccagtgggcacgtgcaggcccttggcagtacccagacacatttggagttaaggctgggcaggagagagggatggggaaataaacatggtggcttaggttggcactgctccaggtctgcaatgtagcaactggtaagtggcaggggcctgggggaggggaccctcaggagccctggcctggggcaggagctgcccatgccatgtggctgccactggtgttccccgcctggcccggcccacagcagccagtgctcattcctgcacacactggtcctcctcggctgcccccaggacctgctccccggggctgcccctctctcagcatgcccactcctgtgcttgcctcctcccctccctgggggcgcttgggcctccggctggcgagtggatttttccagcttctgtaaacaagtggtggcagtgtgccaggcgggcaggagacaggcgggggcagcaccacagccagggtgtgccaagcaccgaggcacagcctggggggcagacggagacacccagacccggagagagagacattcagacacagacagacagacagacatgcaggcagcctcgctggacgtggagtcagaagatcgtcctctattgtccagcccaacccccgtagcggccctcgccccctgcccctcactgtctggctgagagcattaggccccagtgcccagcccctgggcttccccacccactccttctcctccccaacctccaccccttagggctggctacgccattataaatttataacaggaatttctccacaagccaagaaaaacttgacctactttcttgatggctccctgggctaaggctccctgctcatgcccccccaccccagtctcctgtccagcccccagtgcccagtcctggtctggggtgggtatcagaggtagaacgggccacttttctgtgcaatgcccatgctctccacactaccagcttgcctgggtgcagaggccccgttctgctgctggccctgcccaatcccctgacttatctccctctctcttcccaccctggctgcttatcagctcctgggggtggggccagggggcctaggggtgaggtctcctatgcagcagccacgtgacagaggttgaggtcgtatgttggggagctgtaccctttgtccccctcctacccgccacacctgcctgtgtgcacacagacagtaagccacaggtctgcagcccagggtcagaggtgcaatgccgtaggaatggtgggcccggcttggcactgccctggactccaggtagcagaacaaggctagcattagggccaggctgtgaggcttatcccacagccacctgcttactagttgtgtgaacttgagtgaatgaccaagctttctgagactcagtttcctcatctgtgaagttctcgtgccctctttggagggtacagattctctctccagttaatatgtgttagtttcctttcctttcccccttgccatcctggtcgatagcagctcagctaaaccaactgagaagtctggtcctctgcctgggaagtgggattcgagaccttgcgtgggaagctctggagtccctgaggggccagagttggggatcataacttggctggcagcatgggaggtcagttccctacagctttcaacatctctctctattaaggcacaaagatgggcattcatgctcactgcgtgccgctctatgtcccatccttccttcacagataccctccctgcctatgctgaaaactgcttgtctctggtcccctcttgcccctataatacagatgagtttcaggaaagcttttctagaggggtggtaacaatagctagtgtttaatagttgctcattaagggccaggcatttgtctgaatatgaagactgagacatattacttagtacatgaatgatctcattctctccctccattccttcccatgtctggggcttaggaggtggatctccaatctcgcctgctgtacctgttatctaagggatcatcctggtcccctctctatgcctgcccttcctgccccctgctgtcttgttatgggatcccaaagccccaaatgttgccaccaaagggatcctacccaccttcctaccgtgacaccttcttacccctgcctctctcttctctccacagggatctctggacaggacaagactccgaagctactcccccagcacacagcccgggacccacaaacccagcttgcccccagccctcccacctgccactccctggcccctcccaccgcccgccccccttggggcgcagggcatggtgtgaaaggccaagtgctgaggcgggtatcatgggtgctgtgccctagggcctgggtggcagggggtgggtggcctgtgggtgtgccgggggggccagtgtgcccaccccagtctcttggcgtgctggagggcatcctggatggaattgaagtgaatggaacagaagccaagcaaggtggagtgtgggtcagacccagaggagaacaggtaatgggttcagcaactaggtcatgccaactcctaagcagcaggcatgggcacctggctgagctctcctttaggcaccgcctttaagcacctctgtgggatggacgtgaggccagcaagccttctgcctacctttgtctggcagatgaagtcatgttcagatgtgacaggcacttggattgagagatgctcattttgaagcggggagcgatacagagcaattacagggagcacataaggggctcttccctagacattgctgggcagtctcagatgcccccaacgtcccttccaccattgctgcccttaccttgagcatgtgggatccaaacagccttgccattttcttcctctccctaccagcccatttactatctgaccacaagtgtgttgtccacaagctgcggttcacgtaatacatttcagggcacatgcaccagtaactattggtcatagcccaagcttatattcggaatctattgggagccccacaagctcttccttgttcatggtcaagggcgggcactgcgatggggctcctcccagaaagtgcacgccaaccatgatggttttgcttccacatgggtgaggtgtcagccctgcacatacaccaagggatggttacctgtgatctgcattgcccttgaggagcccagagggtctctgtcttttctatcagctccaagtggcacagagctttgtcccagttggcacggtgccctgggagctgggtacagcctgtgcctatggccagggagagggtgggggtgggggtgctccggggagcagtgtggctgactgttgcctaggagatcagatcccgagccaggaagccagaggcctggccaggcaaagccctaaggcccacaactgggtccctggagggtagaggaagtagatggaactcacagctgggcagggcatggggtagctcccctcccccaaag

SEQ ID NO: 3283 - DNA, 6000 bp, Homo sapiens
aatcactgggaacttatttttaaaatactgatttctggactccacctctagagattctaattcagttggtcagggtattttctaaaggccctgggtgattctggtgaagaagagtttgactggaggctgaaatagaaggatcacttgagcctgggaggtcaaggctgcagtgaatcgtgattgcatcactgctctagcctgggcaacagtgagactctatctccaaaaaaaaaaaaaaaaaattacaggtggctcacacctgtaatcccagcacttttggaggttgaggcaggagtttgataccagcctggccagcgtggtaaaaccccgccgctacaaaaaatacacaaaaatttagccgggtgtaatgacgtatacctatagttccagctactcctagaagctgaggcattagaatcgcttgagcctgggtggcagaggttgcagtaagcagagatcgtgccactgcactccagcctgggtgagagagcgagattctgtctcaaaaaaaaaaaaaaaaaacttaagaaaaaaaaagaatttgagacccactgacctgtagtgtccagagcagagggaaccccggagcagggaagaacagtgtcccatttttctttctctttctcttccatccttggcccagaagtgcctgtgcacagggccagggtgtttaggagcttagatcccttctgcgctttcatgtgcattgtattaataggaaaatagtgtgactccaagtccttatacattctctcccctttcctgtggaagacatgaggttgggactggtgcttgttcttagtggcctctgaacaagccagggttctgatttggatggtgggtccatggcaaggagaatctttctccctagatctgaagctccagcacggccattgtacttgtgaaaaaaagtcaacttttttttgagacagagtcttactcttttgccccaagctggagtgcaatggcgcgatctcagctcactgcaatctctgcttcctgggttcaggcaattcttgtgcctcagcctcccaagtagctgggattacaggcgtgtaccaccacgttggctaatttaaaaaaatcaactttgactgtaactttagctcttatggagaatttgatttttgtctcaaagaagactttgaaaactatgtcagttttggctataattccatcacctgactgcacaagtggataatttttgccaggggttcaaaaagaaagattgccagtaagacacacatccctgggaggcaggacagctcagtgaatgcattcacctttactacctgccatgtcttcagtttcccaggcttgggaggagagggtataatgcttcctggggctctcggtctggccttcccctggcttagacaccctcatatctccgtgcgcccttcctagcaaaattggcttccttgggctttattgactgcaaaggttggacaccactgctcatttgatcaccaagcagggccaggcaaaccactaggcaacagaccgtaaaaagtgctgggtgtgcctgctcaggtatctctggaaggcaggatcagtgaccaggcagaacatgtcaccagctagttcatgccagggagagcctgtctcagttcattgggatggccagagtctgttcaccaacagtcttggagaaagtgttacaaataaccctgtcagtactcttagctactgtttactcaacatgatgtgtgtgagacagctggcaaacactgccattaaccctggtgtgccccatattagtgatgagaacactgaggctcagctcaggtggcttctacaaagtgattcagaagtggcaggagacagtcacatctgtggtgccgaaagccagtgcctgtgctcactctctctctgccagatgctctagccctggctgtgcttcagtgggtgtgcttcacctgcagatgctgggctctgtgccaaaccttcatgagaatctcgaggggctggctgcacagatgacttcaatgtacagacaccgttgagaaccactgcaggagagttatttgtctccccttctggcttgtttttaaaaatcacattctgttcctctaaccctgtggtttggtagtgacaagacttagatctgttacctgtatttttctcgacctgtaggtgctggttacttcccagctcggtaccctaagcaccagctgctttggtttttttggaatcagagacttggttttctattaccatctcccagtccattcatacctcctcctccagtgccccagccacagaccattgctcagccaagactctgtgtcacgtggattcatggtaataaccaacttgtaattccactgtggttttccctctgttgctgtcgccctgcctggctctgggcggctcctcccactgttgagggcactcagaaactgcaagattactgtgactgttgctagagccagctagagctagaccttcctggaccagcaaagttgctgccacaaaaaaagagagtttcattcacctagcagccctaaaccaaacatagggcaggcactgcctccattgttcttccacagcagggaggatggcatcatgtctatggtgggtctggggggttctgtcacctgtaggctgggtgaccatgagcaggacatttaatatatgaatgttaaattatctatctgaaaaatggaggttgtcgtaaagcttgaaggagataatagttgtgcaattgggaagctgaggcgggagggttgcttgaggccaggagttggagaccagcctgggcaacacagtgagactccatctctgcaaaaaaaaaagaaagaaagaaagaaagaaaattttaattagctgggtgtggtggtgtatacctgctggaggctgaggcagtaggatcttggaagctgcagtgagctgtgatcacaccgctgcactctagcctgggcaacacagtgagaccttgtttctttaaaaaaaaaaattatttccttccatcagcactctttgagttcctagtatgcacataggcactgtgaggaaggcatctctaagaagcagaaagcacagaccttgtctcttcattgactgaggtgaaatgagaaagcgtcttaaactatgaaaaattgaaatgacataactttgaaatatttacatggtatttctggttgctaattgagacccaccaccccgtacttccttccttgtacttttggggaagaggtgggccccatttcaaacctcttttcctttggttctctccagaaaggaaactgttgtttctggctagtgaatcattcttcctgaagctcactttttaaatgagttgctgggagaacttggatgtggaaaacgatttgaggttgaacaaaacaagccctttgctgtcagcttcttgcatgaatgtggaccatttgcttcccacagatacctcctgttcatccacattgctgtcccttaaccatgagggaatgtacttcccttgctcaggggcagatcggggctctccctgggatcttagactccattatgcaaagggcagcctaataaaaaccttttctttccaacccaggttcaaatgctgaacagtgttcagtacttaatacctactcacaggacctgtttgtaaaacattctgtatatattctgatgtctgttgacatcagatgtatatgtctgatgagacatccacttatgtcttctagaggcttctagagataggctcctcatgtgtctgcaattccaaaacttaacaaaaacaaaaagttgagcctctgaagctgtcactaaccaagtgattcagatgtcgggactggaacaccagctgttggggatgcaggacttggtctctgccctcccacacctcctgcctcttctttctctccatcgccccatctctgccagtagagaatggaactgaggtctctattgaaaaagggaaagttggtagctgtgctgactgtggcagagctatgactttggtgtgtgtttctgtgtgtgtttgtttcggtgtgtgttttgttttggtgtctgttttggtgtgtatttctgtgtgtgtgttggcatgtgtttttgtgtgtgtgtgtgtgtgtttcagtgtgtatttgttccggtgtgtgtgtttctgtgtgtgtttgtgtgtgtgtatcggtgtgtgttttactatgtgtttgtttctgtgtgtgttttgttttttaatgggtgcgagactttggcccatcaaaaatgagagaactagggaagaaggatcaggatgagagagtgaaacattgctttgattctggtgcacagaggcacacagtccagccctagactgaaagtcggtcagtccttctgaaggtggcaggagaaaaatggctatgttaataacaacttgtgctggccaggccctggtccctgaatggccatgaggttggccaagcaccttctctgaggagctttctaccaggacctcttgggcccctgtctgcctcaccactgtggtcctggctaccagactggaacttcattattgatctaaatcctagtgtcttcctgagcttttgttttgttttgttttgttttaattttgccccaaaagcctgttgacttaactgtcaccaggctgtcacacattcattcatcgcctgtgtgtgtttatttgtaggtgaatgtacatatttgggatccagaagtcaatgtgtttgctcagaaccatgagcctgaagttgggagaccattctcctctttacagctcagatggtggtagagccggtagacatctagtatagcccagtggggcctcctgacctctagtggggagggcagggaggtgaggtgaggggaagcagtcagctaggtcttcagtgaggccagagggaaagatctgtaatttaagaaggacacagcgggtgacggcctctgaactaactcagtacttctcatttctcccttacagttggaggtccccctccccactaagtgcctctttgcatagcaccagtccccacccgcacgctctctggaccactacagctggacgggcaatggcgggtcggggaggcgcagcacgacccaatggaccagctgctgggaacaagatctgtcaatttaagctggttctgctgggggagtctgcggtaggcaaatccagcctcgtcctccgctttgtcaagggacagtttcacgagtaccaggagagcacaattggaggtgagtgggcatgagggagtcggggaggggcctgaaggttgccaaagaaatgctttgaccttgaggagatgggaagctgcctgcctgcattagggactaaatgcgtctgtggtggcagccccacttcctcacctgggccctggaattgagcccagcaactggtctccatgccagagtcccctcaagcatcgctagtaagcatttgctgggagtggaaagctagcttcccatcctgtttctgccccttcttgatctgtgtggccttggctgaggccctttcactgccctggcctcatggagggagagctgactctggatctttgaggccccttcttactataatgggtggtccatgtgccctggcctttcccacttccagaagaaggaacagcctggtgagtcggagctgggtgataggtgggtgtttctgaagctgactttaccctttctggagctcacagcctgttgttgattttccagtggtcagcatttaggatgtgagtgagggtctggcctcggcctcttgcctccgtggctaacacacacatcaagaggcaggggccaacgctggccttggccttgagtcatcctttctctactctcttggtaggaggtttctaggcagctggaaacaaaatgggccatgtcagcagtctccctgctgcctcctcagcatttgggtcaggagctggagaggggaagtgaggcagtgccccatgtccctcagtgagctgggggagggcagaccaggaaagcagccttctacacatggctgtcctgggttctctgctgggtccaggggcaaaggggccttttgctgtctgtcccagctct

SEQ ID NO: 3284 - DNA, 6000 bp, Homo sapiens
cccttggcttcctgccttggggtcagcagccaccagctggcctggttggctctggatttctggactttttaatgaagcgtggttacctctgacgctattcccttttccaagccttccccaacctccccctctgtgaggggagccacctgagggctgtggaacccagcaggcatgagatgaaccgcagtgcccattgggctgggcagatgagatcctactttctccccaggacctggaggcaggtagagatgggggagcagaggggatgggcaagggacccagctccagcctaggacatgaagggaagaccagacaggatcttagcgtctatagcaagagagacaggttgtaggattttgcctgaagatagcttagtgatattgtgaggtcttctgtctcagcccctgggtctctgctgaagaccttaagagcaatgttacctagagaggggtaggtttgagatgttgcttggaatttgagcaacccatgatttcttaggccgcccaccatgagcccaggctggagaggctcacctcatcccacagcccacacaggaaacaaacggatggctccagatatgtactcttcggctcgcgcagcattattttcaaaatatgagttagttccaatattaaaaatgagacagggccaggtgcggtggctcacgcctgtaatcctagcactttgggaggccaaggcaggcggatcacctgaggtcaggagttcgagaccagcctgaccaacatgcagaaacctcatctctactaaaaatacaaaattagccgggcatggtggcacatgcctgtaatcgcagctactcgggaggctgaggcaggagaatcgcttgaatccgggaggcggaggttgcagtgagccaagatcgcaccactgcactccagcctgggcgacagtgagactctgtctcaaaataaaaaaaagagacaggttatataggaatacagatattccaatttctctacaaaatgtagcactgggcacagtggttcatgcctataatcccagccctttgggaggccgaggtgggaggatcgcttgagtccatgagtttgagatccacctgagcaacatagcgagaccctatctctataaaaaaaatatatatatatatatttttttatagacggagtctcactctgtcacccaggctggaatgcagtggtgcaatctcagctcactacaagctccgcctcctgggttcatgccattctcctgcctcaggctcccaagtagctgggactacaggcgcccgccaccacacccggctaattttttgtatttttagtggagacagggtttcaccatgttagccaggatggtctcaatctcctgacctcctgatccgcctgcctcgtcctcccaaagtgctgggattacaagtgtcagccaccgcacccagcctataaaaatatttttttttttttgagacggagtctcactctgtcgcccaggctggagtgcagtggtgcaatctcggctcactgcaaactccgcctcccgggttcacgccattctcctgcctcagcctcccgagtagctgggactaccggcgcctgccaccacgcccagctaatttttttgtatctttagtagagacggggtttcaccatgttagccaggatggtctcgatctcctgacctcatgatccacctgcctcggcctcccaaagtgctgggattattttgaaaaatatttttcaaaatatttttcaaattagccaggtgtaggctgggcatggtggctcacgcctgtaatcccagcactttgggaggccgaggcaggtggattacctgaggtctggagttcgagaccagcctgaccaacatggagaaaccccatctctactaaaaatacaaacattagctgggatggtggtgcatgcctgtaatcccagcttcgcgggaggctgaggcaggagaatcgcttgaacctgggaggtggagggtgcagtgagccgagatcgtgccattgctctcaagtctgggcaataagagtgaaactccacctcaaaaataaataaataaataaataaaaattagccaggtgtagtggtgagtgcctgtggttccagctactccagaagctgaggtggaaggatgacttgaatccaggagttcaagaccagcctgggcaacatagcaagacaccccccccacccatctctatacaaattaaaaaattagccaggtgtagtggtgtgtgcctgtggtcccagctactctggaagctgaggtgggaggatctcttgagcccaggaggttgaggctgcagtgagcagtgatcacaccactgcactccagcctgggtgacagagtgagaccctgctcaaacaaaacaaaacaaaaaaaacctcaggacatcaggctaccgtgggccaacattccatctggcaataactggcaatcagctgggctgggtggccactgtcctctttagatgggatctgctctgcactctacttcgcagtcaccacgtttcttgatcatctcccgacacccagctagcttcccttgtttgaaatttttgtttggtctctgtgggtatttgagttctcaaaacttgagtgtccatcagaactacctgagatcctattaaaacgcagattctgccaggcgcggaggctcaaaaaaataaaaaaataaaaagcagattcctgggcctcatccaatttggaatgtccggggtggagcccaggggttgagtttgcaacctctgccttacctaacagtgtgttcccaggtccctgtgcccaacaggtgctttttgggcccagtaatgtctgcttctactcctaggcgtgggtctgtcaacatctctgtttctgtctctctgcaggctgtctctcaaggtggtctcttctgctgctagcaactcaaaaatcccaacagcactccctatcctttccctgaccccagaccgctgccaagcctgttctcccccattacaacatggtctcactcagggcctggactgctccaaaactcgcccaggtctccagctctcctctaccacccaacaccctgggctcacttttggataggaaataaactctttatttttgtagttattggctctgggtgtttctgggggttactctgagagccccagggctttggaggagccaacacagcaatcactccccaccctcaccttcgttgtaccccagggcccagttgctatctctaggaagggcagaggcaccagccaatctacttggcaccacattcacaccaccaggggccccagggttgaggaagaaacttaattagtcactatgggcctattatacccccttctctcccctgcaccccagtcacagccatgtatgcacacagtatgtgggaaggacagagtcctggctttggcccacctccagccttggaaaggtgggcctaggggactacccatccctcctgtataaggaactgttccagaactgggtatggcaagggggctgggggaagagcttgtcaccagccagaacctgctaggaatcccactctgccccatcccctctgtcctcccaacaagccctctcttccctcttccttttcacttctcatgaacactggcgcggaagtggggattgtgtgttatgggtgtaagaaagagagacgccctgatgaccagatggaactagatgtgggcacagttttgtggcaggttgtccaagacaggtaaattctccagctgaggctccaggatatgcctggtgttggcgttataggcacaatggccacagctgtctccggtgagctttgattccacacaggttttcagtagtgtcccttgaggatgagatgcaaaagaagaggaggtactggtttgtgttgagaggtaagggtgggaggaatcaggagcgggcccagtccatattgagaggagcagaaaaaacaaatattcctgatccatagagggggagagtgcagagtgggggtggttctagtctttatttacggatggagagggccgaggcagaggttgtccagctctgtattccgcgtcagagagaagagctgaccctggctaggagcaggggaaggcagaggcagagatggtctttgtgccggcccccgcacacaccaagtaggaggtggtggcagaagctctccctttgatctcacccagcatcctgcagagaactcttcctgcagcgctttcctcaccttcccaatcacagacgcccctggcaatcgggcggacagtgcagacaagggcttctccagatcagcgagttcacaggactgaggcctcgcgtgcatattcattcgcaccacgttttttctttcccaattctgcacacacaatcctctgccttcttccaacgctccaccacccgccttccctcggggcgtccggaaccggcggtgacgcggatggcagggttagccttaaaaagttcccggccgtaggctgggcgcggtggctcaggcctgtaatctcagcactttgagaggccgaagagggcggatcacctgaggtcaggagttcgagaccagcctggccaacatggcgaaacccccgtctctactaaaaaatacaaaaattagtcgggcgtggtggtgcgtgcctataatccagctcctcgggaggctgaggcaggagaatcgcttgaacccgggaggcagaggttgcagtgagatcgcaccactgcactccagcctgggcgacagagtaagactccgtctcaaaaaaaaaaaaaaagttccggccgggctccgcctcgcagtcagccggctccaccctaagcccaagtcccaggcagccactgactcctcccagcgctgcgaactacaagtcccgcgatccctcgcgcgctccctaccgccactcccgcgttcctaccggcgccgctgggtaggtcggccaagagtgcctcccattggtctccgcactgtcaatcacctgggagtattgaggggcggggcggaggtggagatccggatccggagcggctgaaaggcggaagtggaggccggagcctgggacaccgccggcggggagagaagcggatcccgtccgagccccggccccaagtaacgccgccgccccggagccgccgtgagtatgcttgtcccaggacctggtgtctcgcctgcgttgaagcatctccagggcagcccttcctcccgcccagccccagtttagggggatactgacccctcccccgacccgtagccccctcttgaggggctccccaggcgtcgggccataggaggtggggagcttctttccttagcttacctgcctttggtgagccttaaggaaaccgctatgactgtcctctggcctgtccattctagttgtgggagagaggtaccctaagttccgctccccctgcttccagaatcggaggatctttgctaggtgtgaaggaacctgtccctcttctcttttagaagtgacagggagtgctgtctgtcgccgttttccttcctcctgtcccacaaaaccagttgtcccctctagccctagaggaatatctcgatttcctttgggggaggggggtcgtctgggtgagaccgttccacacgcacagaagtgtgtgtgcgctcccgcaactccttacttcctctctttcctcaagccagagaaccaaccaggacctcagctgagtttaaagtcacttactagaaatgagctgttttcctgttttgccccttctgtctcccagccctgtcctctagttatgttgttctttgagtgtctctctctttctgcctctgaagaatttagctgaggtttgctcaatcctagctacagatcacagatcagggtggatgtgcccattcattatcttctttcccctccccccttgctccaggctcagctctgtcctcccagagcacgtgagtggtttcccagccgcctcaaagggactgcttttcttgggactgctgtccgtgtgtctatagggaggagaataagacccaaaatgaggagtctggaattgaagggccatctctttcccactcccaaac

SEQ ID NO: 3285 - DNA, 6000 bp, Homo sapiens
gtaaattgccaggcatggtggctcacacctgtaatcccaggactttgagaggccgaggtgggcagatcacctgaggtcgggagtttgagaccagcctgaccaacatggagaaaccccgtctctactaaaaatacaaaattagccgggcatggtggcacatgcctgtaatctcagctactcaggaggctgaggaggagaatcgcttgaacctgggaggcagaggttccagtgagccaagattgtgccttgcactccagcctgggcaacaagaatgaaactctgtctcaaattaaaaaatatatatatagtaaacttctcctcagaaagtatgcaagcattggtaggaaaacaggatgactatagttaacaataattgaatgtatatttcaagataactacagaagtgaatttggaatgttcctaacacaaagaaatcataaatgtttacggtgatggatatcccaactaccctgatttgctcattcacattgtacacttacataaaaatataacatgtaccccatgaatacgtacaactagtatgtattcacaaaaattaaaaattagaaaaaaataatttaaaaaagaaagtatgcaagcaaaaagacagtagtataaaatatttaaagtgttagaggggaaaatcaccaacctaggattctatatccagggaaattatccttcaaaaatgaagaagcaccgggcatggtggtgtgtgcctgtagtgttagccctttgggaagctgaggtaggaggatcctttgaggccagaagctcgagaccagtctaggcaacatagcaagacctcatctctacaaaaaaattaaaagattatctgggcatggtactatgcactggtagttccagctacttgggaagctgaggcagaaggattgcttgagcccagaaatttggggctgcagtgtactataatcctacttgtgaatagccacttcactccagcctggacaacatagcaagatcccatttctttaaaaaatgaggaagaaatagatactatcagacaaacaactgaggaatttgtcaccagctgacttcccttacaagaaacgttaaaaaaattttttttcaagcaggacagtgacacatatcagaaacttggatctatatgaagcaaagaagggtgtcagagaaggtgtaaatgaagttcacataaaaatcttatttttcctattcttaattgatctaaaagataactgtttaaagtaacaatagtaatcagtatttaatgattatagcatgtggataaatgacataaatgatagcaatgtcagaaggctggaagggaggactcaggaatactgtttttaaggcacctgcactacacatgaagaagaaatagtgctgtttgaaggtagatttagtttagttttaagaatatactgtaaactctaaagagaactgcttaaatttttttttcagatggagtttcactcttgttgcccaggctggagtgcaatgaagtgatattggctcacagcaaactctgcctcccaggttcaagtgattctcctgcctcagcctcctgagtagctgggattacaggcacacaccaccacacctggctaattttttttttttttttttttttagtagagacagggtttcactatgttggccaggctggtctcaaactcctgacctcaggtgatctacccacctcggcctcccaaagtgctgggattacaggtgtgagctgctgcacctagcctaaaattttttaagaagaattttttactgatattctgagagaagataaaatttttaaaaatcatataaattgctcagagagtgcagaagcagtagcatctgtagatgaataaaaagccgttacaaacatggtcaatattaatccaaatatagtaacaatcactttaaatatgaatggcttaatacactaattaaaggacagagactgtcagagggttatcataaaagaggaagatccaattttatgctgcctaccagaaatatactttaaatataaagactccaaagtttaaaaataaagggatggaaaaagttagacaacacactgatcaaaagaaaactgaagtagcgatgttaataccagacaaagaagacttagaacagggaaaattgttaggagtaaacgggaaacctacctaatgacaaagggaattagttctccaagaaatgtgcatgcacctgattacagagtgtcaaaatacacgaggcaaaaacgaatagaaatgcaaagagaaaaagacaaacccactgtagagatggagaattcaaaaccctctgtcagtaagtgatagatctagcaggaatacaatacataaaggatatagttgacttgaagaacactatcaatcaattcgatctgattggcatttatagaatactctatccaacaataacaaaacacacattcttctcaacctcacctagaatgctcaccaagataagacctcaaaacacatcttaacaaatttaaaagaataggaagacacaacgtatgtaattctaaattaatagtattgttatataacgggcacattctctaaagaatacctactttcctttacttttattatttgctcatgtgaaaggaaaaatgaatcttgggaccccaaaatcactaagctaaagggaaaagtcaggctaggaactgcttagggcaaacttgcctcccattctattcaaagtcatccctctgctcactgagatagatacatatctgattgcttcctttggaaagactaatcagaaactcaaaagaatgcaaacatttttctcttatctacctttgaccaagaagctccgccgcccccccccccacacccccccccccgccctgccacttggagttgtcctgcttttctggaccaaaccagtgtacatcttacatatattgattgatgtctcatatctccctaaaatacataaaccaagctgccccccgaccactttgagcatgctatcaggacctcctgaggctgtgtcatggtgtgtgtccctaactttggcaaaataaacttcctaaattgactgagagctgtctcagatatttggggttcacactaaacaatacgccttctgatgatctcttctgcctagctaatgcctgctcatgctcagcccaaacttaaagattaaaaactttaatacagtataataaaagcataaacaaagttaatcattgaaaagtaatccacagccaggtgcagtggctcacgcctgtaatcccagcattttgggaggctgaggcaggcagattgtttaagcccaggagttcaagcctgggcaatatggaaaacccgtctctaaaaaagatacaaaaattagccaggcatggtggcacacacatgttgtcccggctagtcagagggttcaggcaggaggattgcttgagcctgggaggtcaagactgcagtgagctttaattgagccactgcactctagctcgggtgacagagtgagaccatgtctcaaaaaaacaagaaagaaaagaaaagaaatctatggaaaataatgcaatatttatgacataaaggattaatgcccataatataaaaattgattttataaatcaataaaagagcacattcattcttgacttaactcattctctatacagtagccaaagtagtatctttaaaacccagatctagccatgccatttccctgcttgaagtccttcaatggcttcacattgcccttagaatgaagttcaaaactcttaacatgatccacatgatctggtccttatctatctctagattggtctcccgttacccttctcccatctttctcaggactctagccacactggtcttttctcagctcttcacaccttaaagcctctgcatgtatcgatcgctttgcctggaatcactccaccaccaccaccctcttcgactaatgcccacttttccttcagatctcagcttaaacatcatttctcatgaaagtcttccatcatcaattctggattggttcagatcctctgctatttgctctataaacctgaacaaacagaatcatgtttctgaagcttcagaactccaaacaagactctgaggagtgacccttccaaggaatgtgaggttccaggcaaagcctctagaatcttcttatctataatagtcagggttggtgaggaagctcaggagaaagttaagatgagcgagtctaagctatccgttctgtactttttttgagtatagacaactttgagaacttaataaaatctatgggattcatttcttcttctggagattgcctctcccccagaaaaagtcacagaagcaaaattttgtgtaatgttatcaatgttgcaaagttcccctaacatccatttatccacctcacattaagaaccccaaccattggatgttatgtatttgtcacaggctgaaaacaaacaaacaaacaaacaaaaacaaaaacaaaaaaaatcagcccagtgagaatctcataaaacaaacacattggttccctagctttgttcatttaatcaatgttcattgagtatctacagtatagtgattccagcaataataacaccttataaatgaaatttactttacaatttaaaagaaaataaagacttttcatgtacattgtctcactcttcccccaaacccaataaagtgggcatagattactctacctattttgcagatgagaaaacataagtaatcccagggaacacgagtgatctggttcacacaactcagccaaaaaggagtgaaacccagcagtaaaacgcactcttttaaccctaagcctggctctttccttccatgttgatattgactccaagggcccgtggctggtactaggacttgtccttagtaatctgataataatcccaggggccacagtctcagcctccagttcccatggtggtcagcctcacgctctcatattccatgtgatgatgcaattttgccaatcaaaggtcgcagcagcaggactcccctgacgtataggagaagtagccagagctcttcatcccctgccaggagagcatagtagctcacatttattgagttcttagtacacgctgggcactgttctaggctttttacatgaattaactcattaaatactcagaacaaaaccatgaggcaggtactattataatattatctccattttgtggacacttaggaaagattaatttgcccgagtttgcacgactaataattttcagaatcgagatttgaatcctggagcctgtgctcctaaccaaaccaccatctgcctctcctgagcccattgtccttaacttcttgcggtcatgtgtgctggagagaatgtgatcaaagccctggaccttctccctaggaaaacgcaggtaaacagaattttgcatatttcagggactttggggacacctaagacccatctactgtcgacctcagacttagaagctctatttatctcatacatcctggagagaattgtccagggacaaaaacagaagcgccgccagcgccgcaggacttcgcctctgcaaacgtgtgaggagagctgcgctgcgctgagctgcgtggtgacggagatgcccgttcgctcgggatcaggaacggtgagctcctgggaccgcaatgccctgagaacgcagccgggtgctgagcctccggagtccggtagctgaatgaaatacgcagggatcaccagccggacccaaatcttgcgtccctgccagcatcctggagtcctaagaggcagggattggagcggacaggatctcagaactctggtcccgggcgcacaacggcggagtcgctgttcctggtgctgaaacgctcagtcctggaagaacgtggccgcctgcccgcctggtaccgcgccgcggccgctgcggggaactgtccagtgctgaaaacggatgcggcccggcccgcagagctcagacccaagcctgccgcacccagcggagctcgaaccgagctcctggaagcgctgacgcagagcgcagggagagccggagcggcgagctcc

SEQ ID NO: 3286 - DNA, 6000 bp, Homo sapiens
attatccttcaaaaatgaagaagcaccgggcatggtggtgtgtgcctgtagtgttagccctttgggaagctgaggtaggaggatcctttgaggccagaagctcgagaccagtctaggcaacatagcaagacctcatctctacaaaaaaattaaaagattatctgggcatggtactatgcactggtagttccagctacttgggaagctgaggcagaaggattgcttgagcccagaaatttggggctgcagtgtactataatcctacttgtgaatagccacttcactccagcctggacaacatagcaagatcccatttctttaaaaaatgaggaagaaatagatactatcagacaaacaactgaggaatttgtcaccagctgacttcccttacaagaaacgttaaaaaaattttttttcaagcaggacagtgacacatatcagaaacttggatctatatgaagcaaagaagggtgtcagagaaggtgtaaatgaagttcacataaaaatcttatttttcctattcttaattgatctaaaagataactgtttaaagtaacaatagtaatcagtatttaatgattatagcatgtggataaatgacataaatgatagcaatgtcagaaggctggaagggaggactcaggaatactgtttttaaggcacctgcactacacatgaagaagaaatagtgctgtttgaaggtagatttagtttagttttaagaatatactgtaaactctaaagagaactgcttaaatttttttttcagatggagtttcactcttgttgcccaggctggagtgcaatgaagtgatattggctcacagcaaactctgcctcccaggttcaagtgattctcctgcctcagcctcctgagtagctgggattacaggcacacaccaccacacctggctaattttttttttttttttttttttagtagagacagggtttcactatgttggccaggctggtctcaaactcctgacctcaggtgatctacccacctcggcctcccaaagtgctgggattacaggtgtgagctgctgcacctagcctaaaattttttaagaagaattttttactgatattctgagagaagataaaatttttaaaaatcatataaattgctcagagagtgcagaagcagtagcatctgtagatgaataaaaagccgttacaaacatggtcaatattaatccaaatatagtaacaatcactttaaatatgaatggcttaatacactaattaaaggacagagactgtcagagggttatcataaaagaggaagatccaattttatgctgcctaccagaaatatactttaaatataaagactccaaagtttaaaaataaagggatggaaaaagttagacaacacactgatcaaaagaaaactgaagtagcgatgttaataccagacaaagaagacttagaacagggaaaattgttaggagtaaacgggaaacctacctaatgacaaagggaattagttctccaagaaatgtgcatgcacctgattacagagtgtcaaaatacacgaggcaaaaacgaatagaaatgcaaagagaaaaagacaaacccactgtagagatggagaattcaaaaccctctgtcagtaagtgatagatctagcaggaatacaatacataaaggatatagttgacttgaagaacactatcaatcaattcgatctgattggcatttatagaatactctatccaacaataacaaaacacacattcttctcaacctcacctagaatgctcaccaagataagacctcaaaacacatcttaacaaatttaaaagaataggaagacacaacgtatgtaattctaaattaatagtattgttatataacgggcacattctctaaagaatacctactttcctttacttttattatttgctcatgtgaaaggaaaaatgaatcttgggaccccaaaatcactaagctaaagggaaaagtcaggctaggaactgcttagggcaaacttgcctcccattctattcaaagtcatccctctgctcactgagatagatacatatctgattgcttcctttggaaagactaatcagaaactcaaaagaatgcaaacatttttctcttatctacctttgaccaagaagctccgccgcccccccccccacacccccccccccgccctgccacttggagttgtcctgcttttctggaccaaaccagtgtacatcttacatatattgattgatgtctcatatctccctaaaatacataaaccaagctgccccccgaccactttgagcatgctatcaggacctcctgaggctgtgtcatggtgtgtgtccctaactttggcaaaataaacttcctaaattgactgagagctgtctcagatatttggggttcacactaaacaatacgccttctgatgatctcttctgcctagctaatgcctgctcatgctcagcccaaacttaaagattaaaaactttaatacagtataataaaagcataaacaaagttaatcattgaaaagtaatccacagccaggtgcagtggctcacgcctgtaatcccagcattttgggaggctgaggcaggcagattgtttaagcccaggagttcaagcctgggcaatatggaaaacccgtctctaaaaaagatacaaaaattagccaggcatggtggcacacacatgttgtcccggctagtcagagggttcaggcaggaggattgcttgagcctgggaggtcaagactgcagtgagctttaattgagccactgcactctagctcgggtgacagagtgagaccatgtctcaaaaaaacaagaaagaaaagaaaagaaatctatggaaaataatgcaatatttatgacataaaggattaatgcccataatataaaaattgattttataaatcaataaaagagcacattcattcttgacttaactcattctctatacagtagccaaagtagtatctttaaaacccagatctagccatgccatttccctgcttgaagtccttcaatggcttcacattgcccttagaatgaagttcaaaactcttaacatgatccacatgatctggtccttatctatctctagattggtctcccgttacccttctcccatctttctcaggactctagccacactggtcttttctcagctcttcacaccttaaagcctctgcatgtatcgatcgctttgcctggaatcactccaccaccaccaccctcttcgactaatgcccacttttccttcagatctcagcttaaacatcatttctcatgaaagtcttccatcatcaattctggattggttcagatcctctgctatttgctctataaacctgaacaaacagaatcatgtttctgaagcttcagaactccaaacaagactctgaggagtgacccttccaaggaatgtgaggttccaggcaaagcctctagaatcttcttatctataatagtcagggttggtgaggaagctcaggagaaagttaagatgagcgagtctaagctatccgttctgtactttttttgagtatagacaactttgagaacttaataaaatctatgggattcatttcttcttctggagattgcctctcccccagaaaaagtcacagaagcaaaattttgtgtaatgttatcaatgttgcaaagttcccctaacatccatttatccacctcacattaagaaccccaaccattggatgttatgtatttgtcacaggctgaaaacaaacaaacaaacaaacaaaaacaaaaacaaaaaaaatcagcccagtgagaatctcataaaacaaacacattggttccctagctttgttcatttaatcaatgttcattgagtatctacagtatagtgattccagcaataataacaccttataaatgaaatttactttacaatttaaaagaaaataaagacttttcatgtacattgtctcactcttcccccaaacccaataaagtgggcatagattactctacctattttgcagatgagaaaacataagtaatcccagggaacacgagtgatctggttcacacaactcagccaaaaaggagtgaaacccagcagtaaaacgcactcttttaaccctaagcctggctctttccttccatgttgatattgactccaagggcccgtggctggtactaggacttgtccttagtaatctgataataatcccaggggccacagtctcagcctccagttcccatggtggtcagcctcacgctctcatattccatgtgatgatgcaattttgccaatcaaaggtcgcagcagcaggactcccctgacgtataggagaagtagccagagctcttcatcccctgccaggagagcatagtagctcacatttattgagttcttagtacacgctgggcactgttctaggctttttacatgaattaactcattaaatactcagaacaaaaccatgaggcaggtactattataatattatctccattttgtggacacttaggaaagattaatttgcccgagtttgcacgactaataattttcagaatcgagatttgaatcctggagcctgtgctcctaaccaaaccaccatctgcctctcctgagcccattgtccttaacttcttgcggtcatgtgtgctggagagaatgtgatcaaagccctggaccttctccctaggaaaacgcaggtaaacagaattttgcatatttcagggactttggggacacctaagacccatctactgtcgacctcagacttagaagctctatttatctcatacatcctggagagaattgtccagggacaaaaacagaagcgccgccagcgccgcaggacttcgcctctgcaaacgtgtgaggagagctgcgctgcgctgagctgcgtggtgacggagatgcccgttcgctcgggatcaggaacggtgagctcctgggaccgcaatgccctgagaacgcagccgggtgctgagcctccggagtccggtagctgaatgaaatacgcagggatcaccagccggacccaaatcttgcgtccctgccagcatcctggagtcctaagaggcagggattggagcggacaggatctcagaactctggtcccgggcgcacaacggcggagtcgctgttcctggtgctgaaacgctcagtcctggaagaacgtggccgcctgcccgcctggtaccgcgccgcggccgctgcggggaactgtccagtgctgaaaacggatgcggcccggcccgcagagctcagacccaagcctgccgcacccagcggagctcgaaccgagctcctggaagcgctgacgcagagcgcagggagagccggagcggcgagctccaagcctggcatggacctgcagagacccgattcctaccagggaggagctggccctgacttcaacgaccacgtcctgcataaggtaaacatctcctgtattcctcaacctaacgttggaagaggcgccagcaccaggagttttctccactcccctgactttgctttgggacttaatgagaaactagcttgtatctgtgagtctggggagccctttctgtctgatcctgtttcctgctcaaaacagagatgcgtgagctcttggggaagggctgccgccagaggctcagatggtcagaagcttcattcattcacttacatcatctgtgttcctttttcaccccctccttctccttgcctatttatgcccctgggtgacccctggcaccttgctctcctaacccttgtaggagactgcatttctccctgttacatctgctagcagtggccaaatacctgaatttctggccaatttgtctgaaattagataaatggtctgcagcagagatgaactgctgttttcaaatcagactccctcatggctccagaaagcttccctccagccatgattccctcacagcccctgtaagcatttgcttatttcaaagcactaacatatccattgcttccttcactcaagtttcttatgcaactcagttttcagtaatgcaggtctcc

SEQ ID NO: 3287 - DNA, 6000 bp, Homo sapiens
tagcttaatgtcagaagtttcatggcaataatcttcactgggatctatgattttatattaccagaaaagatgaatccgtttctatccaacataagcatatacttatacattctgggtagtgctggctgcttgaaataaactctgaaataaatccactttatgcacaatagttgaaatggcacagttacgctctgatctaaggccttatgttatgccatttttttttttttttttgagacggagtcttgctctgtcacccaggctggagtgcagtggcgcgatctcagctcactgcaagctccgccttctgggttcatgccattctcctacctcggcctcccaagtagctaggactacaggcacccgccaccacacccagttaatttttttgtatttttagtagagacggggtttcaccatgttagccaggatggtctcgatctcctgaccttgtgatccgcccacctcggcctcccaaagtgctgggattacaggcatgagccaccgcacccggccatgttatgacttttattcttataccttgactcattctaatttggctctgctttgaacttttccattttaagatctctctgtgggcgcttcttgctctgtaaatttaaaacagtctgtgtcaaaaacagtctcactctgacctgaccagcttagatgactagctcaagaatagtcaagcttgcttgggctccatgaagtcccccagagcggaaaagcccttgaaattctagggaatgatctttgaggtcatgggagcaggatctctccaccaaggtcaccaatgccagatgcccttggggtgtccatagctgtgagaagtcaggcaaaccccaggacacattgatatggactgctaaacatgcctacagcctcctacctgctgggtcaccggcctgtggtgctcagggatagctcgtcatctcttcccaagccatgatgcctttccctgacactttatccccagcccctccctacaatccccccatccaacaaaaatcaacctagatgaagtgatagacctttgtcctccagccagaggacatcgtagcccctcatctctcctcaattttcaggagaggaaaaaggagtctgtccacgtcatgcttctgggcagtcaatcctgaaattccttaggttgtttggcccaggactgccctgccagaatagtgaacaccgctgcctgtgctctgagagatgccttctactccaaatacactgcttattcattgagtcaaccaataaacatttgagaacccatcatgtgccagacagtaactaggcacgggggatatgggagtgaatgagacaaagtccccacttaaggcaccacacagcctagtggagatggggaaaatgacaaacacagaccccactacataagtcatttcaccaaaggaaataaagcggagcaacaagacagagagaaattggaggtgggctgcaggggccactgccccctaagtggccaaggaaggcctcttctaagaggtaacatttaagctgaaatgtgatgataaaaaggagctaactattcaccagtctgcgggaagagcattctggaaaggaggaatagcaaatgccaaggccctaagaagggagcaagccttatcttgttagaaggacagaagaaaagctggtgtgcatggagcagagcctttgagagggagggtggatggagttgggggtgaaggggcagccagcagcccatggatcccctgagaacttgcaggctgggagagaaaccatcagaaggctataagcagggagtaatcaggtctgtgcttggaaaagatcactctggttgctgggacgagaatggactccatggcagagaatgaaagaggaagaccaggcagggaatggttgcttggactagcaatcattgtgggcttggtaaccacagagatgatgagacgtggtggggttcagggtactttctggaaggaaggctgtcagattgctaaaataaagataataactctgtctgggtgtggtggctcacacctataatcccagcactttgggaggtcgagataggcagatcacttgaggccaggagttcgagaccagcctggccaacaaggtaaaatcccatctctactaaaaacatgaaaattagccaggcatggtggcaggcacctgtagtttcagctacttgggagactgaggcaagagaattgcttgaacccgggaatcagaggttgcagtgagccgagatctcaccactgcactccagcctggggaacagagtgagactctttctcaaaaaaaaaaaagatagtccagcatctgtaaatgagcatgatccctgtgtgagcagcagtgtatgtgtatacacacacacacacatgcagacacatgcacatacacactatcctccttatacaaacagtgcagactccaggctctggagtcaaatgtgttcaaattccaactcatctgcttacttgccattaaacttggttcaagtcactgaacctctccatccctagggttctctgtctgtaaaaaggggacagtaatagaagtgcctcatggttgtcatgaggattaaattagttactacatgggaagcatctaaggaagggcaactgccacataccgtatgagtttcctgttgctgctgtaacaaattagcaccaatttcgtggctcattaaaaacaacacaaatttattctcctgcaattctggaggccaggagctcaagatcagtttcaatgggctcaagtcaaggcgtgggcagggctggtttcttttggaggctccaggcaggggaatccattcctttccctttctggcatctgaaggctgcggcattcatggcccctgctcacgtcacacccacgtccacttccatcatcactttgtctctacctctttgaccttctggcctctttcttatgaggacccttgtggtgatattttgggcccacctgaatcagcaagaataacctctctatctcaaagtccttaacttacatacatctgcactgtccctttctgccacagaaggtaacagtcacaggttctgaggattaggacacagatatctttgggggccattattcagcccataacatgtggtaggcaataaataaaggttcattgtattacgataatggtacttcatgataataatgataacatttttctcattatcatcttcatcattcccatgaaagccccagagcatatccctagccccctcctcaactatgtaggagaggaggggacgtttagaaaaccccaactcctagaagccccctgagacttggccccaagcccaacccagagctaggggcaatgctggctgatcaggcagaggcaccagtccccgggttggtcctgatgaggggagcagggggcagacggtcgatgaggcaggagtgtgctcacagcctggggtccaagaaggagcctggagtgcaggctaaggcctgctgatggtgctgtattccgtgggctcctcagggcccctgccggggaggtggctactgaggtggcccatgttgcagtaggtcggttcctgatcctcagcacccaaggtcagagatgcataggaaatgtcctccttcggcaaggaagcctgcagcaaaggcgggctccaggtcagagaggacggcaggaagtgacggtcacggggcagaggagccctcggaggaggatagtggggatggaccattcagggcttctaatcccactcaagccctccagcttcccccttcactctgccaagcaccctgagcttcaaccacaacagaacagattctcccccaaccctgcaccagtgcagcacatttcctgtggaatcccaagtcactcagcctgtctgggactctgctgcccacgtggggactgtgtttgccagtccctgtgtccccaggactgagacttgcctgtgggagctcctaggcgagtcctgcagtgactatggctttgccccacacctgcctcctctatgcccacatgagcaggagaaagcccaccctccaacggggtgcaacggcaggcctgtgtccccctgccccagcctcacagcagcccccatggaggacgcaccatggtgacatattccacttccacctggtcaacctgggcagaggaaagcttcgtggtagccttttgcggggaggttccggccagctgcagggtcaggtctgcatagcagaggtcgccctccaggggctgcagtacctgggacagggaacacaggctggggagtcacaagatctgtctgtggacacaggttccttttccacggtgggacgggacgagagcctctccacttccccaggtgcccctctcccatttccctccgtgtcctccacttctcaggctcctgtacccctcagcccttgtccccctggctgtttccaggccctcagcccccaggccctgcagggtgccatgaggacaggatactttggcacaggacttctctgatattttggaccttctgagagatggaaaatgaggaaggggaaagaagctgcctggtctctctggtccgaccttgggggctatcttacctgctctggggacatcccggctgctaaaagacaaacaacaattcagaattagaaagcccattccccagactcacaagaacccccaggtctagggaagagaaatatggaagaaaagaggtgaattgggtccaggctcagagacagggacctggttctaattctgattcctcagatgacacagtctgtgacattcgtcatgtcacctctctgacctttcacttctccaccaggaaaagagggacaccccagccccctgctccccacatcatagaactgtgcactcagctgatcgggtggccctgccagccatcggctcccctgggagtaagtttgcttctgcagaatcccaactcggcctggaattccaccatgtctctctacctgattcatccttcaggggtcaattcaaagtcatgcctgccttctgcagctacccaggctgtctaatccccctcccgggcccccggggggcacttgctctatgtctgtctcatcatcttcgtcctactgaattctagttagtcctcaggtgggctgtaagctgcagggtggctgggcctgtcccttccttacaacctgggtgcttggctgtgctgagcaggtggtgctccatcagtaaaagttgtctgcagagacaggaatgcaccaagctgtcccccaaccccgagtagaatgtgcaagctgggtcggcacagtagggaccgattttgtttggtttggtttggtttggtttggtttggtttggtttggtttggtttggttttgagatggagtttctctcttgtcacccatgccggagggcaatggcaccatcttggctcactgcaacctccacctcctgggttcaagcgattctcctgccttagcctcctgagtagctggaactacagatgtgtgccaccatatccagctaatttttttgcatttttagtagagaaggggtttcaccatgttggccaggctggtctcgaactcctgacctcaagtgatccacccgcctcaacctccctaagtgcggagattataggcatgagccacgacacccagagattggattggattgtttttccactgggaccgattttcaggtggttgctggtccctgtcttctttctcccctccccagccaccagccccacatccctgccctagggacaacaaagaaatggggggttttcccctggtttcaaaagtctagatgctggagaacacagaaagcacttagaccttaggccgtgggcaatacatttgggagaaaaagcgatgaataaaagtcaggctctaattttgaaaaagcatcacagaaaacaaactaacagagagtcaggctcccctcttcccaggcgaaagatttcccaggctgtggggagggagaagtgttggagggaaccctgtgagagttaggacccagctgttctagaagagaaagaggtacaattgtgtgagaatgtggaa

SEQ ID NO: 3288 - DNA, 6000 bp, Homo sapiens
caacatggcaaaaccccttctctactaaaaatacaaaaacgtttgccaggcgtggtggcacacgcctgtaatcccagctacttgggaggctgaggcaagagaatcacttgaacctgggaggcggaggttgcggcgagccaatatcatgccattgcgctacagcctgggcaacagagtgagactccatctcaaaacaacaacaacaaaaaaaaaaaaacacctcactctgctcatcccccacctgaacattcacggttcactattaccttccaaataaagtctgaatctctcatctgttggtcaagctgttgcacagtttagaccagtggttttcgaacactccttcagcgcacataaaagcctccagggggaagctcatctgaaatgcaaattctaagctccctcatacacatgctgcttcagtaaaaccacgtggggggcccagaatctgggggttctgacccagggggtccatgcgccacattttgcaaaacatgagttgaggccttgtccctccagtctctgcccgggtctccttcccacatcccgaccctgtgctctttgggctgtgctgttccccagctctgaagttttctgccatcgacctggatagcagggagtcccctgcccccatctctgcaggtgtgatttgaggtgtgtgtggtgaggtgatttgaggggtgtggcaggtgtgtggtgtgatttgaggtgcgtggtgaggtgtgtggtgtgatttgaggggttaggtgtgtgtggtgtgagtgtgtgtgtatggtgaggtgtgtgtgtctggggtgtgatttgaagtgtgtgtggtgtgaggtgtatgtggtgtgatttgatgtgtgtgtatgtggcgtgagatgtgtatggtgtgatttgaggggtgtgtggtgtgacgtgtgtggtgtgatttgaggtgtgtgtgatgaggtgtgtggtgtgatttgaggggtgaggtgtgtgtggtgtgaggtgtgtgtggcgtgatttgaggtgtgtgtgtgtggtttcaggtgtacacaagagcccccccatctttcaacacgcatgagggtctgtctcactgacacttggtacctccactatcagcagggctgcatgacaatgacagtgtgatctgtgatcaggagggtaggggtgtctatttgggggtattgtgggggtgtgcgtctcagatctggaggcaataagaggtgttgggggtcatttatagggtgatatacacatttggtgatggtgtgaggcatggggtccattggagaggcaggtgtttgcacagtgatgtggcacaggtgttgatggtgtgaaataaactgtgcctggagctgcactgtggtgacaggagtgtgtgtttggagtgaaatgaggtatgtgtgtttgagggtcatgtaagatgtgtatgtatgtggtatgatggtaggtgtgtttgtttatagtatgaggtgcacatttgtggcataatacaaagttgtgtgtgggacatgttatgaagtgtgtgtttgtggtataatgtagggtgtgaggcatgtgtatttatggtatgatgtgaggcagatgtgtgtggtatgatgtagggtgtgtgtgtatatttgtggtgtgatttgagagtgtatgtgtgtgatgtgaggtgtgtgtgatttgagggatgtgtgtggtgtgaggtgtgtggtgtgatttgaggtgtgtgtggtgaggtgtgtggtgtgatttgaggggtgaggtgtgtatggtctgaggtgtgtgtgtgtggtgaggtgtgtgtgtctgtggtgtgttgtgggtgggtgcacacgtgtgagtgtctgtggtgtgtgtctggggagagacacaggctaccacagcgcatacacagcctcagagtgaacgttaggaggcccaggtttcctccccagagaccacacggatcccttagtgagtccctattctgcacagcccctgttccctgttctgaatgtcttagaccctaacccacttctgactcacccgaggctgcccttgaacaccctacaggacattacagtggccctggggacagtgtacgcaccctccaagtatgacattacccacataccacagacccagcaggcctgcagcccctctccccatgttcaaagacttcttccctaggtcagattcctccatccagactagtgcagcaacgcagcagggaagtgcttcaggccactgctccttctggatgattcgtgctaatgttcaaccttctgtattccaaacccaccataggacaaagagggccttggagccaacaacgtgaaccacagctggaggctagaaatctgaactcaaagtaccagcagggccacgctccctctgaaggctccagagaagggtcattccttcctcttccatggccttggtggctcccaggagtccttggcattccttggcttgcagccacactcctcccatcttgcctctgtcttcacctggatgtcttttccctgtgtctctttcttcttatgacaccggtcatactggattaatggcctgccctatattagtataacctcatcttaatgagtgatatctgcaatgaccacatttccaagtaagggcatgatctgaggtactggtggttcagacctcaacctgtctttgggggacagaattcaacccataacagcatggtttacagtagaaggtgagcatgaggcatgccctgtcccctctctcattcttcctccaccatttccctcctgcaatgaaaacccgcatcctggctgggcacagtggttcacacctgtaatcccaatactttgggaggctaaggcaggcggatcacctaaggtcaggagttcaagaccagcctggccaacatggtgaaaccctgtctctacaaaaatacaaaaattagccaggcatgatgatgggcacctgttatcccagctacttgggaggctgaggcaggaggagaatggcttgaacagcccgggaggcggaggttgcagtgagccaagatcgtgccacttactccagcctggatgacagagctccacctcaagaaagaaacaaaaagaaagaaagaaagagagacagagagaaagaaagggaaagagagagaggaaggaaggaaggaaggagagaaagaaagagaaagaaagaaagagagaaagaagaaagaaagaaaaagaaagaaagaaaaagaaaggaagaaagaaaaagaaaggaaggaaggaagaaagaaagaaagaaagaaagaaagaaagaaagaaagaaagagaaagaaagggaaaagaaggaaggaaaagagaggggaaggaaggaaggcaggcaggcaaagaaagaaagaagagagagagagagaaaggaaagaaggaaagaaggaaggaagggagggagggaggaaggaaggaagggagggaggaagggaggagaggggaggggagggaaggggagagaaaagaccgcataccaggccaggtgcggtggctcacgcttgtaatcccagcaatttggaaggccaaggcaggcgtatcgcctgaggtcagcagttccaaaccagcctgtccaacatggtgaagttctctactaagaatacaaaaattagccaggcgtggtggcgtgcacctgtagtcccagctgctccagaggctgaggcaggagaattgcttgaacctgggaggcagaggctgcaatgcgccaagatcccgccactgcactccagcctgggcgacagagtgagactccgtctccgggagcccacggcattgagcaaacctcggcattatttgcagcaagagcctctggcatccaaatagcaaccaacaccacgcctctgtagtgtgctgcgcagcctccacactccagtctgaggctccctgtttgagtcccgccctatgcccagctgaggttatagcacgctcacctccagaagaggtaacccaagctctttactctactggagatcacctctgtccccactctgggcgcttctcccagctgacagaaaatacctccagctgatgtcagaaaatacagggctggaggctggcgtacaaagtcagtccccacaggcctatggtggcccataagccacgtctacccctgctcctcacctccacacctaagttaagaattgcaggccgggcgcagtggctcacgcctgtaatcccagcactttgggaggctgaggtgggcggaccgcctgaggtcaggaatttgagaccagcttggccaacatggcaaaaccccgtctctactaaaaatacaaaaagaaaaaatagccgggcctgatgtcgcgcacctgtaatcccagctactccgggagactgaggcgggagtatagcttgaacccgggaagcaaaggttgcagtgaggcgagatcgcaccactgcactccaggctgggcgacagagtgagactctgtctgaaaaaaaaaaaaagtgcaggtacccctctccagctctcccctccctacacatccctcaaaccgtcccgctgtaatgcacccgccctgttccttggtaacttgaagctgcttatagaatgtggagatgggggtaattgaaaggtcggcccaggccacagagcccctgagctctgctaccggcaaccccagctgcactccccactctctgtcaccaggagctgccgggtgcctgggatatcctggcagctctgctcaaaatgatctacgacttcatgaatttatttggctcctcctcggggccagggtgagtgtcatgggttaataaggccggccccgccttcaggagcggtccactgggagatgtgtgctgcgcagccctcttgcgaaagctctcccctggtgggacattctgggcacaaccaacaggccgggggaaatgagaggtgatccatactaaagggtcaaagtccccgcaccaggcagaggccccaaaacaccgcagcgtacatgtgctgcaaggcgagtacgggttggtaaacaaaactatattcagatgagctcgggccgggtgacttaacagatgaggaagtgtctcggggccatcggcggaggcgcagcccaggggtccccagctccccgcctcgccacctggggacagcccacggcccggggctcgggcgccgcctgctgtcgcggtgcgcagcgactacgggaactcttccgcagcagacggggtccccgcggcccgctcccccaggggcaagcaagcgaccacaggggaccggtcccggggctggatgtggctcatgtccgaagcgcacggagccgagccggtgttgctcagggaggctgcccgccccttcacgcagaccctgcggctctgcgtgccctcagggaacagcaaggtccgagccggtgtcgtcgagggggcgacgggacggagggaggagcctgaggggtcccggtcgagggaggggaggagtgggcggggcgggggtggggccgttcctgcgctctccttcgcctgcgggccggcactgctcacctctcgtccagggacatgacgggcacgccaggcgccgttgccacccgggatggcgaggcccccgagcgctccccgccctgcagtccgagctacgacctcacgggcaaggtgggtgggcctcttccgtgagacccccgccctcctcggcgctagccccttcctggctgcgtctgggttggactcagcccttcccccaggcagctgcgtctcccagaggagggagggagagagggtcaggacacagcctctggggccgtcccaagctctaggtgtctctgctggcttggtgggggcgggtcgcggaagatcgcaaaaactgagtgatccccccgccggccccaactcagttctcttctgccacactctggcaaatatgagcccccgggagcccatgcttcttggtgagggttaagcgcgcaactctcggggctcaggctgggaagggctgggagatggggaccgaacggagactcggagaggacgtcccctgctggcagaggaactggcgttaatgccattttccgagctaagctcttagttgagatctgacatccaggtttaa

SEQ ID NO: 3289 - DNA, 6000 bp, Homo sapiens
ggggttctgacccagggggtccatgcgccacattttgcaaaacatgagttgaggccttgtccctccagtctctgcccgggtctccttcccacatcccgaccctgtgctctttgggctgtgctgttccccagctctgaagttttctgccatcgacctggatagcagggagtcccctgcccccatctctgcaggtgtgatttgaggtgtgtgtggtgaggtgatttgaggggtgtggcaggtgtgtggtgtgatttgaggtgcgtggtgaggtgtgtggtgtgatttgaggggttaggtgtgtgtggtgtgagtgtgtgtgtatggtgaggtgtgtgtgtctggggtgtgatttgaagtgtgtgtggtgtgaggtgtatgtggtgtgatttgatgtgtgtgtatgtggcgtgagatgtgtatggtgtgatttgaggggtgtgtggtgtgacgtgtgtggtgtgatttgaggtgtgtgtgatgaggtgtgtggtgtgatttgaggggtgaggtgtgtgtggtgtgaggtgtgtgtggcgtgatttgaggtgtgtgtgtgtggtttcaggtgtacacaagagcccccccatctttcaacacgcatgagggtctgtctcactgacacttggtacctccactatcagcagggctgcatgacaatgacagtgtgatctgtgatcaggagggtaggggtgtctatttgggggtattgtgggggtgtgcgtctcagatctggaggcaataagaggtgttgggggtcatttatagggtgatatacacatttggtgatggtgtgaggcatggggtccattggagaggcaggtgtttgcacagtgatgtggcacaggtgttgatggtgtgaaataaactgtgcctggagctgcactgtggtgacaggagtgtgtgtttggagtgaaatgaggtatgtgtgtttgagggtcatgtaagatgtgtatgtatgtggtatgatggtaggtgtgtttgtttatagtatgaggtgcacatttgtggcataatacaaagttgtgtgtgggacatgttatgaagtgtgtgtttgtggtataatgtagggtgtgaggcatgtgtatttatggtatgatgtgaggcagatgtgtgtggtatgatgtagggtgtgtgtgtatatttgtggtgtgatttgagagtgtatgtgtgtgatgtgaggtgtgtgtgatttgagggatgtgtgtggtgtgaggtgtgtggtgtgatttgaggtgtgtgtggtgaggtgtgtggtgtgatttgaggggtgaggtgtgtatggtctgaggtgtgtgtgtgtggtgaggtgtgtgtgtctgtggtgtgttgtgggtgggtgcacacgtgtgagtgtctgtggtgtgtgtctggggagagacacaggctaccacagcgcatacacagcctcagagtgaacgttaggaggcccaggtttcctccccagagaccacacggatcccttagtgagtccctattctgcacagcccctgttccctgttctgaatgtcttagaccctaacccacttctgactcacccgaggctgcccttgaacaccctacaggacattacagtggccctggggacagtgtacgcaccctccaagtatgacattacccacataccacagacccagcaggcctgcagcccctctccccatgttcaaagacttcttccctaggtcagattcctccatccagactagtgcagcaacgcagcagggaagtgcttcaggccactgctccttctggatgattcgtgctaatgttcaaccttctgtattccaaacccaccataggacaaagagggccttggagccaacaacgtgaaccacagctggaggctagaaatctgaactcaaagtaccagcagggccacgctccctctgaaggctccagagaagggtcattccttcctcttccatggccttggtggctcccaggagtccttggcattccttggcttgcagccacactcctcccatcttgcctctgtcttcacctggatgtcttttccctgtgtctctttcttcttatgacaccggtcatactggattaatggcctgccctatattagtataacctcatcttaatgagtgatatctgcaatgaccacatttccaagtaagggcatgatctgaggtactggtggttcagacctcaacctgtctttgggggacagaattcaacccataacagcatggtttacagtagaaggtgagcatgaggcatgccctgtcccctctctcattcttcctccaccatttccctcctgcaatgaaaacccgcatcctggctgggcacagtggttcacacctgtaatcccaatactttgggaggctaaggcaggcggatcacctaaggtcaggagttcaagaccagcctggccaacatggtgaaaccctgtctctacaaaaatacaaaaattagccaggcatgatgatgggcacctgttatcccagctacttgggaggctgaggcaggaggagaatggcttgaacagcccgggaggcggaggttgcagtgagccaagatcgtgccacttactccagcctggatgacagagctccacctcaagaaagaaacaaaaagaaagaaagaaagagagacagagagaaagaaagggaaagagagagaggaaggaaggaaggaaggagagaaagaaagagaaagaaagaaagagagaaagaagaaagaaagaaaaagaaagaaagaaaaagaaaggaagaaagaaaaagaaaggaaggaaggaagaaagaaagaaagaaagaaagaaagaaagaaagaaagaaagagaaagaaagggaaaagaaggaaggaaaagagaggggaaggaaggaaggcaggcaggcaaagaaagaaagaagagagagagagagaaaggaaagaaggaaagaaggaaggaagggagggagggaggaaggaaggaagggagggaggaagggaggagaggggaggggagggaaggggagagaaaagaccgcataccaggccaggtgcggtggctcacgcttgtaatcccagcaatttggaaggccaaggcaggcgtatcgcctgaggtcagcagttccaaaccagcctgtccaacatggtgaagttctctactaagaatacaaaaattagccaggcgtggtggcgtgcacctgtagtcccagctgctccagaggctgaggcaggagaattgcttgaacctgggaggcagaggctgcaatgcgccaagatcccgccactgcactccagcctgggcgacagagtgagactccgtctccgggagcccacggcattgagcaaacctcggcattatttgcagcaagagcctctggcatccaaatagcaaccaacaccacgcctctgtagtgtgctgcgcagcctccacactccagtctgaggctccctgtttgagtcccgccctatgcccagctgaggttatagcacgctcacctccagaagaggtaacccaagctctttactctactggagatcacctctgtccccactctgggcgcttctcccagctgacagaaaatacctccagctgatgtcagaaaatacagggctggaggctggcgtacaaagtcagtccccacaggcctatggtggcccataagccacgtctacccctgctcctcacctccacacctaagttaagaattgcaggccgggcgcagtggctcacgcctgtaatcccagcactttgggaggctgaggtgggcggaccgcctgaggtcaggaatttgagaccagcttggccaacatggcaaaaccccgtctctactaaaaatacaaaaagaaaaaatagccgggcctgatgtcgcgcacctgtaatcccagctactccgggagactgaggcgggagtatagcttgaacccgggaagcaaaggttgcagtgaggcgagatcgcaccactgcactccaggctgggcgacagagtgagactctgtctgaaaaaaaaaaaaagtgcaggtacccctctccagctctcccctccctacacatccctcaaaccgtcccgctgtaatgcacccgccctgttccttggtaacttgaagctgcttatagaatgtggagatgggggtaattgaaaggtcggcccaggccacagagcccctgagctctgctaccggcaaccccagctgcactccccactctctgtcaccaggagctgccgggtgcctgggatatcctggcagctctgctcaaaatgatctacgacttcatgaatttatttggctcctcctcggggccagggtgagtgtcatgggttaataaggccggccccgccttcaggagcggtccactgggagatgtgtgctgcgcagccctcttgcgaaagctctcccctggtgggacattctgggcacaaccaacaggccgggggaaatgagaggtgatccatactaaagggtcaaagtccccgcaccaggcagaggccccaaaacaccgcagcgtacatgtgctgcaaggcgagtacgggttggtaaacaaaactatattcagatgagctcgggccgggtgacttaacagatgaggaagtgtctcggggccatcggcggaggcgcagcccaggggtccccagctccccgcctcgccacctggggacagcccacggcccggggctcgggcgccgcctgctgtcgcggtgcgcagcgactacgggaactcttccgcagcagacggggtccccgcggcccgctcccccaggggcaagcaagcgaccacaggggaccggtcccggggctggatgtggctcatgtccgaagcgcacggagccgagccggtgttgctcagggaggctgcccgccccttcacgcagaccctgcggctctgcgtgccctcagggaacagcaaggtccgagccggtgtcgtcgagggggcgacgggacggagggaggagcctgaggggtcccggtcgagggaggggaggagtgggcggggcgggggtggggccgttcctgcgctctccttcgcctgcgggccggcactgctcacctctcgtccagggacatgacgggcacgccaggcgccgttgccacccgggatggcgaggcccccgagcgctccccgccctgcagtccgagctacgacctcacgggcaaggtgggtgggcctcttccgtgagacccccgccctcctcggcgctagccccttcctggctgcgtctgggttggactcagcccttcccccaggcagctgcgtctcccagaggagggagggagagagggtcaggacacagcctctggggccgtcccaagctctaggtgtctctgctggcttggtgggggcgggtcgcggaagatcgcaaaaactgagtgatccccccgccggccccaactcagttctcttctgccacactctggcaaatatgagcccccgggagcccatgcttcttggtgagggttaagcgcgcaactctcggggctcaggctgggaagggctgggagatggggaccgaacggagactcggagaggacgtcccctgctggcagaggaactggcgttaatgccattttccgagctaagctcttagttgagatctgacatccaggtttaaggcctgatgtcccccagctgctcccctcccattccacccgctggaggcactgcctcccaccttcctccctgcagtcggaagccgctcctcccagaaggatgttgccagccggcctgcaggtcacttgggaatttttcgaacctgagaaagatttcagtggttggtctttcgcatcccgcacttgagagagctccagggctgctctctggggcttgctccctctacaggggtgtcctgtatggaaacaggtagggacagcagtggactggtctgtcgccttccatctgtgtccttggagtgagcgggtaccagaaactgaaagaactgctgagggagcctagagcttccactcttcctctgcagggttggggatggagtgagggctgtcctggattccgctgcatggccttgaaggagacctgcctctctctgggcctcggtttcctccccg

SEQ ID NO: 3290 - DNA, 6000 bp, Homo sapiens
ttagaaacttccagtcaggcgcggtggctcacgcccgtaatcccagcactttgggaggctgaggcgggcggatcacctgaggtcgggagttcaagaccagcctggccaacatggagaaaccccgtctctactaaaaataaaaaattagccaggcgaggtggtgcatgcctataatcccagctactcaggaggctgaggcaggagaatcatttaaacctgggaggtggaggttgtggtgagccaagatctcgccattgcactccagcctgggcaacaagagcaaaactccatctcaaaaaaaaaaagaaagaaagaaagaaagaaacttccaaataaatgttgtgacacaaaaaaaaaaacccaaacaatattcattatagagtatgcaaatgaccatgccccacccccagcagattctgatagactcccttgggtgggaatccttgtccaatatattgacacttccctttcctgtcagtatagcccagcccatgcgtgtactcacgagcggacgatggatgacacaagtacacagagggacggaatccctgcatggtgtggctatgggcaaatgtggccactgtctagattgtgcaaatgtggtggttctctggggccacagagcacacttggggacctgttcatggtgaggtctcaactccggcctctaggaacttgaatgaggacaggagggtcagagggagagcctaggaggctgagccaaggagcgtggagaggagagacagggtgaagatggcggctggctttctggaagcaggtggcctttggtgcggtcagcattcgtgccagccccctcttctctgatcctctccatgtgtctctctcctggaatcccagaagctgcccctgactccccattaactgcctctgcccctaccccctaggtgatgcttctgggagacacaggcgtcggcaaaacatgtttcctgatccaattcaaagacggggccttcctgtccggaaccttcatagccaccgtcggcatagacttcagggtgaggtggctgcaggcacttgcttccagcagagagccagggctgtggctcaggcatgggggggttgcccccaccttgctcaccctggctcccagggactcccgaggctcatgcctggagggcacacaacccgctcccccaagaccacagaggtggccgggtcaaaggagactgggcaaggttggctccttgcccaactataggatgcaaaaaaatgagactgagtcttcgattccagctccattcctgggggacttctcccaagcagagcagccgcaggcacggcataagctgaatatcttggcccacagagcccctgctcattgctctcctacctgggcccctttggaaaggcctcaaaggtcaatcagtctttctggagttcccagaaagcacagccctgcactgggtttaagagctgggcttgggccgggcatggtggctcttgcctgtattcccagcactttgggaggccgaagcggtcagatcacaaggtcaggagtttgagaccagcctggccaacatggtgaaaccccgtctctactaaaaatacaaaaattagccaggtgtagtggcacgctcctgcagtcccagctactcgggaggctgaggcaggagaatcgctcaaatccgggtggtggaggttgcagtgagctgagatcgcgccactgcactccagcctgggcaacaaagtgagactgcgtctcagaaaaaaaaaaaaaaaagagctgggctggccatgttgggagacagcagctcaccagggaccctccctctcaccttgacgactccatcttacaaatctgcatcagggatgctagacgctgcacacctgaagtgttcaatagagaaaaggtctcaccctggcaggtggggctctacagcttcaagcaggcagaaagcgaacacttccttcactagagaattagtgggcagctaaagaaaaggtgctgctgcagatgtagcctcaggtccccaggatgcaggcaaacaccccatctccaggggctcggtcacagtcccaaggctaggctccaggagagggagaccgaagtgggaaaagggcagggcctccagcagcaaccagccctccagccctgggctgcctgatccctggagagagccaggatgtttctcaggctcctcttgccctgctgttgtgagaaggcagttacagtcctcagaagggacgactccacagtggaggtgtctgggtatggggttcctgctgccctgatggtatgatctggctggagacggttctggggctcactgcacccactctaggcctggagagggaacaagacaggacgtctgcagagctgaggagccacatgactcctgccctcccatcctctgcctttttctctttcagaacaaggtggtgactgtggatggcgtgagagtgaagctgcaggtgagaccagaggctggagttggggagggaggatggaggacctgcccttccttctcaccctgaaccacaggaggcctgcagccctgccctccgcctggggcaatttcctgtggggcccacgggaggaaatggcttttgtttatttgacatctgcagaaaaagcagttcccaggcaccctctcatctatgaacagcagctccaaatgccttcagacaagcttagcctccatccatctcctccccagttgccagggctttatctgctcttaggagattggacatccccaacccctgagctaggggagaggagaagattctttttttttcttttcttttctttttttttttgagatggagtctcgctctgtcgcccaggctggagtgcagtggcacaatctcggctcactgcaacctctgcctcccaggtttaagagattctcctgcctcagcctcctgagtagctgagactacaggtgcatgccaccacacctggctaattttttgtatttttagtagagacggggtttcactgtgttagccaggatggtctggatctcctgacctcgtgatccgcctgcctcggcctcccaaagtgctgggattacaggtgtaagccaccgcgctcggctgaggagatgattttgaacgagcttgagaaatcagtaactgctactgtccaggtcattggatgctcaggggctcatgagaacctaaagaagaaaacagccccaccttcccacagatatctcatacaacaaagcaggcctgctccacccagcacattccttgcacctgcctccttctgaccatttctccatcccatcccttcccagatctgggacaccgctgggcaggaacggttccgaagcgtcacccatgcttattacagagatgctcagggtgagtccctcgcaccctccaacccctaccccagccccttggtagcatccgtgctgctgcctaagtcccctctgtgatcctctcccctccagccttgcttctgctgtatgacatcaccaacaaatcttctttcgacaacatcagggtaggtcctcccttcccctgactcccacccataagcagccaaggcaaggtctatgcaggctggggttgcttcctgccctgtggaaagcgggtggagcgtggagtcctcctgccttctgaaaaacacctacttgtgactcagaagtcatatctgctgctttgtatttggtggccatgtgggcatgaaggccaagcaggctgttgtgaccctgtgccacctgcatagccctcactgtgattcacgagtgtgtttcgtgacaaagtgttcagaacagcccccactccaccctggataattatccacagagaccaagggaaaaacacaaccagaaaagtccacacatacatccagggcaagttgcaagaaagtgactcagtcagacagagtgagtggttgtatcctcacaaccaaactattatagagacaaaaatttgataaattcaagcaccaattttgttcacgacattgtataggtttcatgaatcccctgacctcaaggacagtttgctgataagcaaactaggagaataaaacgtttatatagaaagaggaaaatccatggcactcatactcctacctccaaccccatgctcatggcagacatcactaatcaatcacagtacttttgatcactgaaacccttatgtggtcttagaatctttaacaggacactccaagaaatcactgctgacagccaactgatttgtgagataaggtctccatgcatctggatcttccatagaactgatagttgcacagcataaaatggtgagggtggggccattgtgggttgagccaccaaggaaggccatccaggcctggatgggccagaacaaaggtacagatgagagaacgcacagggtatcgtgttcaaggtagtgagtaactgaggatagtcaaacggagcagaagaagaaaggggcagcaggaggaagagaatgccagtctcgcacgccctctcccacaggcctggctcactgagattcatgagtatgcccagagggacgtggtgatcatgctgctaggcaacaaggtgagtggctccggggcagggtcagcccagccctgcacttcctcagccctagccggccccataaccacccaagaacagttatctaggcatccttcctgaaaaggactctgcagcctccagctcaggggtcagacatatctggaggcttctgcccatcccatctgccccttccagggaaagtccaagttgttgcctgagaaatcaaggggtgcccagttctcagcccccattagagcagagtgaacagggtcccaggtcaggggctaagagtgcaaagggttagccccaactgctgtcctattccaagaccctttaccaaaggtgagatcccagagctgggagctacactgggcagaaaccctggccccaggccaatcacacctgcctgcagtcccttgggccaccagcagagggcaggcaacgcctgcttctggggcaaaatatgggcccgctggggcggaggcctccttccccagagtgacccatttgggcttgacaggcggatatgagcagcgaaagagtgatccgttccgaagacggagagaccttggccagggtaagtgattgtctgtgggacagggtgaagggtgggggcaacccgacgctggccctgaggacactctctcccgggcaggagtacggtgttcccttcctggagaccagcgccaagactggcatgaatgtggagttagcctttctggccatcgccaagtgagagctgggcagggaagggaagtgtgcggggcagggcggcacactccaggaatccagtagggcccggcccctggcccagcccctggacacacctgcattctgcaggctgaggtccatttgctctgggagcactgggccactgggagaggggagggggcggctcagctcctcaccccagcccagcccagcccagcccagcccattgtctcttcttcaagggaactgaaataccgggccgggcatcaggcggatgagcccagcttccagatccgagactatgtagagtcccagaagaagcgctccagctgctgctccttcatgtgaatcccagggggcagagaggaggctctggaggcacacaggatgcagccttccccctcccaggcctggcttattccaagaggctgagccaatggggagaaagatggaggactcactgcacagccgcttcctagcagggagctatactccaactcctacttgagttcctgcggtctccccgcatccacagggagggtaaaacacttagcttttattttaatagtacataatttaataccaaaaaaggcgcctggatccccaaaaaaccgaggctgggagctagtggcccttttgctttctaggacttggggggccggccctccctcctaagcataacaaaggtggtgttgctccagctcagccccaggggacacagatgcactttgggggtgagggcaggtaatgactccatcgcaccctcagttcagctggacagaggctcaggtgaccccag

SEQ ID NO: 3291 - DNA, 6000 bp, Homo sapiens
ccttcctccccgctcacctgctggcggggcggccacccttcccctcccaggattcacagctgcgaagggaagagggtggaggagaaagtccagacacgggatcccccgtttatcttcctcccgagtcctcgccccctaccgctgggcatctccaacaagcagcgaagtctcccccgggcggagctctgggtacacgtggcgcaggaagggcctgggcagctcggggtctgctgcgcgggcggggatcgcccctcgctgctgggagctgccaggccgtccccgccccgcgccgctccgggacccccgagttggaatcgcggggccccggcggcgccgtcctgacgcaagagcgcctctgcctggcagggcccaggccggcactcgagggggcgcacgcagagcctgccctaggctgagcactcgagctggaaaacgccgccggcgtccgcgagcttggacaggggccctggacggcgggcgcaggagccaggcgaggcaggctccggctgcaggacgccgggggctgggggtggagacctggcgctttggccgtgcgcccaggcccgcccgtgagaccccgccaggcgctagagcagccagtgttgccagggacgacggcgcgcgggttgcgcatgcgcagtttgccctcccgccgccgcgccttcccctttaagcgccggccggccgcgtcgccgcttcatgaatggagcccacgtgaccaaacatcatgtgacgtctgtggagcggcggcggcggcggcggatcccgagcctggtccggcccggccttcccagtgcgctcggcccggcccgcgcaggcggcgagtcctccgagccccgggcccggacccctcgcgccggtccctgccccgcgcggcctcggagcgcgcgcggccccgccccgccccggcctcggcccgccgggcccgcagtgtggtgagtgcggctgcggcggcgggcccgggcggtgggggcggcgcggcgggggcggcgggggccgagggggcgcgcaggcagggctcctcccggagctaggcgggcggttgggggcccggcggcgggggccgctggtttcgggtctgccgcgcaccctgctggcggcccgtgcctcgatttccccagcggtcaggagccagctcctcctgcccctggcgcccgggtactggaggtgggccgcgggcggcggcggacccgcggagccgggcgagtgcggagcggactcggagacccgggcgtcctggagggaggggcactggacggcgggaggaaagggtggggtcgagcgaggcgcccgggggtccgcgccagggcccggcggcccggcccgcagctgctgattcatccggtggccgcgtcagctctccccggcgcgggggtccgcggcgagcccgggaggaggggcggcgatgggggtgctgcggggaagaccctgcccctggctggggctcgggttccgtcagtcgcgtgccagagcccggagggagacttgctgagtcatcagcgtgaggtcactcggtgctcaagctgataccggaggggattcgagcgaggggcctcggggactaaaaggccgccagcgggaggtgggagggagccgtggggatgtgggagggggccaggcccggcgccttggggtgcctgtttaagtgagcgccgagcgatccagttgaaggcaggggtgcttgaagaggaagtgggggtggctcgctgcaggtgttctcccggggtcaaaggtgaagccccgggcggtccaccccttcccaggcggctcttttccggcagctggtcctggtcccaagtctggagcagttttccaaactgggaaatagttccctgagtgagggaggggaggagcttcggtgggccgagctagccaaaggggaagtcggctttccctgggactggcctggttggacagcccctggccagagatcgaggtcctgggagaaagaggggtgtgtgtaccaagccctgggtgacagtgggctgggcagggaggaagcaggggcagctctaccaggaaacggcaaaggggaggaagcagcccagcctctctccccagttggccctggagtctgggttgagactgtaggtggtgggagcttcagggtgcctagccttggggtgcagcagatgggctggtgtggatggcacagggtggcagaacgcagcacccagccaccctaaagttgtcgctacctgaagtggggtctcagcgttgtgtgaagttagcaaagggagtggccctgttgggtgtctggcctggcagcccaggacgcttagaaagtggcagcttgggagtgatgtggccagagccacctttccttgggtatgtggagattcacgaaggttgacttcctttgcccaggagttcatttcatggctgggttaggctactttgtggtttgccctcagggatgccccccgccccccgccacacacacacacacacacacacacacacaggtccattctcagtgagcaccccccacacatacacacagaacacaggtccactctcagtgagccccggggcttatagattccagatgtttcaatgttttagctgaccgttggcctggagtttgatgccctgggaaaattttggggtcctggagggacatttatgtacatctttttttttttttttttttgagacggagtctcactcttttgcccaggctggagtgcagtggcgcgatctcagctcactgcaagctctgcctcccaggttcacgccgttctcctgcctcagcctcccgagtagctgggactacaggcgcccaccacgacgcccggctatttttttgtatttttagtagagacggggtttcaccgtgttagccaggatggtctcgatctcctgacctcgtaatccacccacctcggcctcccaaagtgttgggattacaggtgtgagccaccgcgcggcccatttatgtacatcttctcagtcacttatgcatcagtggaaactaagttttaggttctgttcaaagagtgactttcaggagctgagagcttatggagcagaggccatgactgccggggagtttcggccgctgggctttgcagccaggtggggctgtctgtgttcaggcacgggagtttctactttagccaaaggagacggagctcccaaatctccctccctttcctggctctcagtgtgaatgggtggcctaggtaccctcgcaggttgcggagccgtgaccatctgtgcctcctgcgtgaggtgggcttattagcctctgggagcagagggtgcatgacaggccccagctctgcccagccttgagggctggaggagggcgggggcagcttctcctcagtccagctcctgggatccctgcatggtccctctcagcccaggtccagaggccaggccaggagcctggaacgcactggctgtgctcagggctgcccctcccccaccccccggcgcacctttgataggaggcgatggcttgcacttgtgctgagttcaggccttctgcggagggcaaaatctgtcgaggaggcacttttccgtgtgatctcttcaggaagtcaccactgtcattgtgcttagcagcaggggtgggggcgatgggggtgggagaagctggtgccagggcagtgtctctgcaccctgacttgcactcaaggctggggggcccctccatgcttggctgagggcctgtctcctggggcagtgttgtgccggacgtgtaggaaagggctcctgtgggccttctgacctccagctcaggtcttccccatcctttatctggaagaatccagtggctggagcctcgggaccttgcctctgagctggcttggctgtggggaggggtctctggcctcccctccctgctctgtgcttgcagcctcacctcctggtcccaggctgggtgaggtggagtcttgagcctggtgaggatgtgtgcatccgcctggccacacttcagctcccctgatgagagtaagaagccccccagcccataatttcctgaagtgatcctagctcctctggaggagtctcccatctgtctgcatcaaacctggaaagtgggggatggagcatgaggcgggggtccatgcccaagggtctggtgggagctgggctgagctgggaatcccagaaacatccttagcaagaaagtgagagcagagtgctggagggaccccgagtggggaagagttggttgttaagtccggccaccccagcacttttgtttttgctccctggccctgtgggcactcacccggggcagggaccagagagcaggctgcagctcggaggggctgactccgccagccttcacgttgggcaggcccggggtggctcactgtgggagcccttgtgaaataccctggatggggtggggcaggggctgcttcctgcaacccaaagccacaggatggttactccatcagtggaggaggccgactgggaggtctagaggggcctcgggccaggctcctcccagctgatggcctgccacctggaaggtgggggaactccctggtcagtcctgccaacagaccagagctagatggacggcccacccccagcttttcaaagttaggaggctgggagactcggggttccctgtagcctcctctctggccaggtcccccgtggggcccctgtgcacccagggagcagggggctttgtccgaggccggctcaggggaggtggctgtagaaggtaggaccctggaagatgcacacacagggtcactggctggccctcacctgctattggccaggctgggggctgcggctctcgtggggcgctgttggctggcgggccagggagtgcgggcgcggcggggaggcagaggcaatgtgctgagtcagcgtgactcgccaggaacagccgcgctctgggcagtgccggggttatttttaaagctcccggcttccttctaggcctgcctctcccgcgtcttattccttctaatctctcccccgccccttgtcttgcgcctgccttcctaacagccttcagttccccttctcccgtcagaccttcctgacctcccacctggttctctaggggcagggtggacaggaagcagctcagcccagcctgggagaggccaagggctgcctcctatcaggtattgggggctgggcacctggacagcaggctggggcgggctgtgcggcaagggctcttgtgaactgggccgggggcggggggggggggggtgcggcgagggtggtctccagggtactgacctgctccgtgtcttgcagagagcgcctgctcgctgtgcccccgggttatgacgacccccaataaaggaaacaaggccttgaaggtgagtgggcagggacaggagcctgtgggctggggtcggggggcacagtgggcgtgcccgcttggcctgtgaccacctgcactgtgccccaggtgaagcgggagccgggtgagaatggcaccagcctgacggatgaggagctggtgaccatgtcggtgcgggagctgaaccagcacctgcggggcctgtccaaggaggagatcgtccagctgaagcagcgccggcgcacgctcaagaaccgcggctacgctgccagctgccgcgtgaagcgggtgacgcagaaggaggagctggagaagcagaaggcggagctgcagcaggaggtggagaagctggcctcagagaacgccagcatgaagctggagctcgacgcgctgcgctccaagtacgaggcgctgcagaccttcgcccggacggtggcccgcagccccgtggcgccagcccggggcccccttgccgccggcctggggcccctcgtcccaggcaaggtggccgccaccagcgtcatcacaatagtaaagtccaagacggatgcccgatcgtagggacgcgcgtctgcccaggcgggtctttgcggggccactaggcacatggcgaatttggctgccctgtccctctgtttccttctcttctctttcctccctctcttccccacccttctctcttccctgcaaagcacaacctgtac

SEQ ID NO: 3292 - DNA, 6000 bp, Homo sapiens
ctgtggccaccacctcctgctcctgacctccctgggagggtgctatcagttctgtcctggccctttcagttttataagttggtttccagcccccagtgtcctgacttctgtctgccacatgaggagggaggccctgcctgtgtgggagggtggttactgtgggtggaatagtggaggccttcaactgattagacaaggcccgcccacatcttggagggcatctgccttactgattaaaatgtcaatgtaatctaatgcaaaagtctacagattcaaatgttagtctcatgcaacccctccccacccctgccagaaacagaataatgtttgaccaaacactcaggcaccctgtagcccagtcaagtggacacatacaatcacccattccaggaggcccacaggattggaggagctgctgagggttgggttacaagggccaggggtgctctggttccttcaaccaacacatagttactgagtatggagacagcaagatgaggcccccttccctccagaggcagtgcacactgtgtgaggggagctgggctgggtagcagcagggtgtcagggtgtgcaggggggtcccaggtgcgccaggagtcagggtatgcagggggctccagggtgtgcaggggttaggagagctgagcaactttctggaacttatcccgggaactcatttccagagaccccataggctcactgcagaaccatgcttggtatatatggggcgtgtagagggcgcttggggaacagaatcctgcgtttcccccgagggagggaagacatgcaggggaacagggaggaaacgctgcggcagggcagatggcatgggtacatcctccaccgccactctccccctggcaagagtcctggccactccccataaaacgagtacccaccacacccaggcacaaaggggacggtaggtggggtgagtccctgctgtctggctgagatctggcagtgcaggagctaagcgggggacacagatggacggtgctgggccgggagtccctgcaggctcccctgaaggccccctcctgtatgggtggatgtgggcatcagggcgggtggggaatgcccttgtgtcagggctgtgagcaatagaataaccccctgccccagcaaagtgcctggcagtgctgggagaccctggcaactcctcccacctgggcagaggtgcccccagaagagattgtcccacaggccacacgcctgtcccaggaccaaagctgccccgaccattcccctcaaagccagtttccctgctagcgcccattctcaggtgctgacgcagagcaagacgaggggcgcggggctgccaaaggtgcttctggtccggggacacaagggaagccagcaggcgacgcgggtttcaagtgaggcagactggtcttgggctccagaggaagcacagggaggtgaggaggtgtgtggggggctgcagacgggctttgcaaggaggcgtttgcttcagcaggcgggccctaggagctttcccactgtgggttcctgattaagcagaggccagaggcaggtagagccagagtccacaggaggctcctgacgtgcgtgagaagtctggggaggtaggtgaggcaggctgtggggaggtggacacccaggaagccacagagcgtgaggacgggcccaccccaagtagcaacatgttttatgtgggcctcagcaggtcaaggagggagatggtgccgggggccaaggacccaaggatcctgccaagaagcgtcgaaacgctgccaggcagaggaaccctacagggggcccctgggggctggccagatggtgctttccctgctcctgtcaccagcagctctgacacctctcagtcctggaaagccccctccaaaaatgaagcggtttggagtgagtccccagcaggccaggtgggccctggaggaggagctgcccgcctctgcttggctcagcttctgcccccatttatttttcattttcctttttttttagagaggttctctgtcgcccaggctggagtgcagtggtatgatcacagctcactgcagcctgcaacccctgggcacaagcaatcctcccacgtcagcctcctgaatagctgggacaacaggtgtgcaccaccatgcccagctttttttttttttttttcttgtagcgatagggtctctatgttaccaatgctggtctcaaactcccgggctcaagcgattctcccactgcctcccaaagtgctgggattataggcttgagacactgcacccggcctgccgcagtttcttggttggaattgccctgactccagcttgccagctggggcccttgccctgcccaattctgccacgcctcttcagtgcccggctgacccctgtccatggtacttgtgcaggacaggctcagactctggaaccagtgggtcagcagcccctggccaggcagagatgggcaatgtccaccctgggagggccctgcctggagaccagggagagcagggctggactggacccgtctgggtgtggacgctagcacctccctcccggcagcatctggctgagatctgctgctctcaggaggaaccgatggggtcttaaggtcagtcccacagaagctgcagcctggggcgggaggatgccggggaagtgcctgcggggctcagtcccacagaaggtgcagcctggggcgggaggatgccggggaggtgcctgcggggctcagtcccacagaagctgcagcctggggcgggagggtgcccgggaggtgcctgcgggggccagtcccacagaaggtgcagcctggggcgggaggatgcccgggaggtgcctgcgggaggaggcatccagctgtgacgggaagtgagctcctggaggtgcagagaagtccaaacagggagccaggcctcaaggccgcacttaaagccggtcgtggagatgagtgtgcggagtgagagggatgcttggaaacctgtgggcctctctcgcagtatccctctcagtacagtagcctttcgcggttctggtggcctcatggtttggcccaagcatggctgcaccactgtgtccagggacaagtgtcctgggctctccgtggggagctggccaggagccgctggggaggtgaggagatcttcgtgcagagccagtgccagccctcactgaccacggaacaccttcagctctctaggaggacagggagacaggtcctaggggtttggcttgggctgtttccacgtggcacctcccctccctcgatactctttctacaagccaccgtatgctactctgcaggtgcctgggaccccacccaccccaagaagattctggggtgaggggcagcaaaggagcctgggcagctccctgagtgtcctccccagcccgtcctgcccatctctatgacagtgcccagggaggggaggactgaggctccttcccaggagaagacagcaccgcagtgaggacgattcataaatccgttccaaattcgcgcggaggtgcaaatgagagcgggctcgaccctgtgaggaggagttggggtgtgggagtgagtggggacagcctggtgagcgtctgcccgcggggtgggggctgccagccccagggccaatcacccctggctcctgacggcaccgtggctccagctcccgctgtgtggcacggagggcgggtcctgaggagactcgggggcccgccaggtccccgctgtgtggacctagccctcaccgcccagcaatgcacgacttcaccctcccgcggagcaggatgcccagcggctcagggcgccctcccctcgccagcccagtgtggtgtggtaggatgaggacgcgagcagggaggagaggcaggagacggagctgcactcctggcctcagggccccgtgtgctgttttgtacactaaggttgaggcctcggaagccacgccaggaccatatcatgcccctagagcctgtgagactcgggctgtgtccagagcagggggagcaggtccccgacgactaaggacaccaccgtaagaaccacacgcagccccacagcgcacacggcgacaacgtgctgtggggctcggaggagttcctggggtctggcagggacaggcggagggacgcttctgagccttacacctcacggcttcgggactttggggccggcctgttcatggacggagcccaggaggaccccacagcccgtccccgccccttcctccccgctcacctgctggcggggcggccacccttcccctcccaggattcacagctgcgaagggaagagggtggaggagaaagtccagacacgggatcccccgtttatcttcctcccgagtcctcgccccctaccgctgggcatctccaacaagcagcgaagtctcccccgggcggagctctgggtacacgtggcgcaggaagggcctgggcagctcggggtctgctgcgcgggcggggatcgcccctcgctgctgggagctgccaggccgtccccgccccgcgccgctccgggacccccgagttggaatcgcggggccccggcggcgccgtcctgacgcaagagcgcctctgcctggcagggcccaggccggcactcgagggggcgcacgcagagcctgccctaggctgagcactcgagctggaaaacgccgccggcgtccgcgagcttggacaggggccctggacggcgggcgcaggagccaggcgaggcaggctccggctgcaggacgccgggggctgggggtggagacctggcgctttggccgtgcgcccaggcccgcccgtgagaccccgccaggcgctagagcagccagtgttgccagggacgacggcgcgcgggttgcgcatgcgcagtttgccctcccgccgccgcgccttcccctttaagcgccggccggccgcgtcgccgcttcatgaatggagcccacgtgaccaaacatcatgtgacgtctgtggagcggcggcggcggcggcggatcccgagcctggtccggcccggccttcccagtgcgctcggcccggcccgcgcaggcggcgagtcctccgagccccgggcccggacccctcgcgccggtccctgccccgcgcggcctcggagcgcgcgcggccccgccccgccccggcctcggcccgccgggcccgcagtgtggtgagtgcggctgcggcggcgggcccgggcggtgggggcggcgcggcgggggcggcgggggccgagggggcgcgcaggcagggctcctcccggagctaggcgggcggttgggggcccggcggcgggggccgctggtttcgggtctgccgcgcaccctgctggcggcccgtgcctcgatttccccagcggtcaggagccagctcctcctgcccctggcgcccgggtactggaggtgggccgcgggcggcggcggacccgcggagccgggcgagtgcggagcggactcggagacccgggcgtcctggagggaggggcactggacggcgggaggaaagggtggggtcgagcgaggcgcccgggggtccgcgccagggcccggcggcccggcccgcagctgctgattcatccggtggccgcgtcagctctccccggcgcgggggtccgcggcgagcccgggaggaggggcggcgatgggggtgctgcggggaagaccctgcccctggctggggctcgggttccgtcagtcgcgtgccagagcccggagggagacttgctgagtcatcagcgtgaggtcactcggtgctcaagctgataccggaggggattcgagcgaggggcctcggggactaaaaggccgccagcgggaggtgggagggagccgtggggatgtgggagggggccaggcccggcgccttggggtgcctgtttaagtgagcgccgagcgatccagttgaaggcaggggtgcttgaagaggaagtgggggtggctcgctgcaggtgttctcccggggtcaaaggtgaagccccgggcggtccaccccttcccaggcggctcttttccggcagctggtcctggtcccaagtctggagcagttttccaaa

SEQ ID NO: 3293 - DNA, 6000 bp, Homo sapiens
ggcagcccttggcctctcccaggctgggctgagctgcttcctgtccaccctgcccctagagaaccaggtgggaggtcaggaaggtctgacgggagaaggggaactgaaggctgttaggaaggcaggcgcaagacaaggggcgggggagagattagaaggaataagacgcgggagaggcaggcctagaaggaagccgggagctttaaaaataaccccggcactgcccagagcgcggctgttcctggcgagtcacgctgactcagcacattgcctctgcctccccgccgcgcccgcactccctggcccgccagccaacagcgccccacgagagccgcagcccccagcctggccaatagcaggtgagggccagccagtgaccctgtgtgtgcatcttccagggtcctaccttctacagccacctcccctgagccggcctcggacaaagccccctgctccctgggtgcacaggggccccacgggggacctggccagagaggaggctacagggaaccccgagtctcccagcctcctaactttgaaaagctgggggtgggccgtccatctagctctggtctgttggcaggactgaccagggagttcccccaccttccaggtggcaggccatcagctgggaggagcctggcccgaggcccctctagacctcccagtcggcctcctccactgatggagtaaccatcctgtggctttgggttgcaggaagcagcccctgccccaccccatccagggtatttcacaagggctcccacagtgagccaccccgggcctgcccaacgtgaaggctggcggagtcagcccctccgagctgcagcctgctctctggtccctgccccgggtgagtgcccacagggccagggagcaaaaacaaaagtgctggggtggccggacttaacaaccaactcttccccactcggggtccctccagcactctgctctcactttcttgctaaggatgtttctgggattcccagctcagcccagctcccaccagacccttgggcatggacccccgcctcatgctccatcccccactttccaggtttgatgcagacagatgggagactcctccagaggagctaggatcacttcaggaaattatgggctggggggcttcttactctcatcaggggagctgaagtgtggccaggcggatgcacacatcctcaccaggctcaagactccacctcacccagcctgggaccaggaggtgaggctgcaagcacagagcagggaggggaggccagagacccctccccacagccaagccagctcagaggcaaggtcccgaggctccagccactggattcttccagataaaggatggggaagacctgagctggaggtcagaaggcccacaggagccctttcctacacgtccggcacaacactgccccaggagacaggccctcagccaagcatggaggggccccccagccttgagtgcaagtcagggtgcagagacactgccctggcaccagcttctcccacccccatcgcccccacccctgctgctaagcacaatgacagtggtgacttcctgaagagatcacacggaaaagtgcctcctcgacagattttgccctccgcagaaggcctgaactcagcacaagtgcaagccatcgcctcctatcaaaggtgcgccggggggtgggggaggggcagccctgagcacagccagtgcgttccaggctcctggcctggcctctggacctgggctgagagggaccatgcagggatcccaggagctggactgaggagaagctgcccccgccctcctccagccctcaaggctgggcagagctggggcctgtcatgcaccctctgctcccagaggctaataagcccacctcacgcaggaggcacagatggtcacggctccgcaacctgcgagggtacctaggccacccattcacactgagagccaggaaagggagggagatttgggagctccgtctcctttggctaaagtagaaactcccgtgcctgaacacagacagccccacctggctgcaaagcccagcggccgaaactccccggcagtcatggcctctgctccataagctctcagctcctgaaagtcactctttgaacagaacctaaaacttagtttccactgatgcataagtgactgagaagatgtacataaatgggccgcgcggtggctcacacctgtaatcccaacactttgggaggccgaggtgggtggattacgaggtcaggagatcgagaccatcctggctaacacggtgaaaccccgtctctactaaaaatacaaaaaaatagccgggcgtcgtggtgggcgcctgtagtcccagctactcgggaggctgaggcaggagaacggcgtgaacctgggaggcagagcttgcagtgagctgagatcgcgccactgcactccagcctgggcaaaagagtgagactccgtctcaaaaaaaaaaaaaaaaaaagatgtacataaatgtccctccaggaccccaaaattttcccagggcatcaaactccaggccaacggtcagctaaaacattgaaacatctggaatctataagccccggggctcactgagagtggacctgtgttctgtgtgtatgtgtggggggtgctcactgagaatggacctgtgtgtgtgtgtgtgtgtgtgtgtgtgtggcggggggcggggggcatccctgagggcaaaccacaaagtagcctaacccagccatgaaatgaactcctgggcaaaggaagtcaaccttcgtgaatctccacatacccaaggaaaggtggctctggccacatcactcccaagctgccactttctaagcgtcctgggctgccaggccagacacccaacagggccactccctttgctaacttcacacaacgctgagaccccacttcaggtagcgacaactttagggtggctgggtgctgcgttctgccaccctgtgccatccacaccagcccatctgctgcaccccaaggctaggcaccctgaagctcccaccacctacagtctcaacccagactccagggccaactggggagagaggctgggctgcttcctcccctttgccgtttcctggtagagctgcccctgcttcctccctgcccagcccactgtcacccagggcttggtacacacacccctctttctcccaggacctcgatctctggccaggggctgtccaaccaggccagtcccagggaaagccgacttcccctttggctagctcggcccaccgaagctcctcccctccctcactcagggaactatttcccagtttggaaaactgctccagacttgggaccaggaccagctgccggaaaagagccgcctgggaaggggtggaccgcccggggcttcacctttgaccccgggagaacacctgcagcgagccacccccacttcctcttcaagcacccctgccttcaactggatcgctcggcgctcacttaaacaggcaccccaaggcgccgggcctggccccctcccacatccccacggctccctcccacctcccgctggcggccttttagtccccgaggcccctcgctcgaatcccctccggtatcagcttgagcaccgagtgacctcacgctgatgactcagcaagtctccctccgggctctggcacgcgactgacggaacccgagccccagccaggggcagggtcttccccgcagcacccccatcgccgcccctcctcccgggctcgccgcggacccccgcgccggggagagctgacgcggccaccggatgaatcagcagctgcgggccgggccgccgggccctggcgcggacccccgggcgcctcgctcgaccccaccctttcctcccgccgtccagtgcccctccctccaggacgcccgggtctccgagtccgctccgcactcgcccggctccgcgggtccgccgccgcccgcggcccacctccagtacccgggcgccaggggcaggaggagctggctcctgaccgctggggaaatcgaggcacgggccgccagcagggtgcgcggcagacccgaaaccagcggcccccgccgccgggcccccaaccgcccgcctagctccgggaggagccctgcctgcgcgccccctcggcccccgccgcccccgccgcgccgcccccaccgcccgggcccgccgccgcagccgcactcaccacactgcgggcccggcgggccgaggccggggcggggcggggccgcgcgcgctccgaggccgcgcggggcagggaccggcgcgaggggtccgggcccggggctcggaggactcgccgcctgcgcgggccgggccgagcgcactgggaaggccgggccggaccaggctcgggatccgccgccgccgccgccgctccacagacgtcacatgatgtttggtcacgtgggctccattcatgaagcggcgacgcggccggccggcgcttaaaggggaaggcgcggcggcgggagggcaaactgcgcatgcgcaacccgcgcgccgtcgtccctggcaacactggctgctctagcgcctggcggggtctcacgggcgggcctgggcgcacggccaaagcgccaggtctccacccccagcccccggcgtcctgcagccggagcctgcctcgcctggctcctgcgcccgccgtccagggcccctgtccaagctcgcggacgccggcggcgttttccagctcgagtgctcagcctagggcaggctctgcgtgcgccccctcgagtgccggcctgggccctgccaggcagaggcgctcttgcgtcaggacggcgccgccggggccccgcgattccaactcgggggtcccggagcggcgcggggcggggacggcctggcagctcccagcagcgaggggcgatccccgcccgcgcagcagaccccgagctgcccaggcccttcctgcgccacgtgtacccagagctccgcccgggggagacttcgctgcttgttggagatgcccagcggtagggggcgaggactcgggaggaagataaacgggggatcccgtgtctggactttctcctccaccctcttcccttcgcagctgtgaatcctgggaggggaagggtggccgccccgccagcaggtgagcggggaggaaggggcggggacgggctgtggggtcctcctgggctccgtccatgaacaggccggccccaaagtcccgaagccgtgaggtgtaaggctcagaagcgtccctccgcctgtccctgccagaccccaggaactcctccgagccccacagcacgttgtcgccgtgtgcgctgtggggctgcgtgtggttcttacggtggtgtccttagtcgtcggggacctgctccccctgctctggacacagcccgagtctcacaggctctaggggcatgatatggtcctggcgtggcttccgaggcctcaaccttagtgtacaaaacagcacacggggccctgaggccaggagtgcagctccgtctcctgcctctcctccctgctcgcgtcctcatcctaccacaccacactgggctggcgaggggagggcgccctgagccgctgggcatcctgctccgcgggagggtgaagtcgtgcattgctgggcggtgagggctaggtccacacagcggggacctggcgggcccccgagtctcctcaggacccgccctccgtgccacacagcgggagctggagccacggtgccgtcaggagccaggggtgattggccctggggctggcagcccccaccccgcgggcagacgctcaccaggctgtccccactcactcccacaccccaactcctcctcacagggtcgagcccgctctcatttgcacctccgcgcgaatttggaacggatttatgaatcgtcctcactgcggtgctgtcttctcctgggaaggagcctcagtcctcccctccctgggcactgtcatagagatgggcaggacgggctggggaggacactcagggagctgcccaggctcctttgctgcccctcaccccagaatcttcttggggtgggtggggtcccag

SEQ ID NO: 3294 - DNA, 6000 bp, Homo sapiens
cttgtcactagggggactagggggtccccaaagtggcccactttctgtggctctgatcagcgcaggggccagccagggacatagccagggaggggccacatcacttcccactggaaatctctgtggtctgcaagtgcttcccagcccagaacaggggtggattccccaacctcaacctcctttcttctctgctcccaaaccatgtcaggaccaccttcctctagagctcgggagcccggagggtcttcacccactcctactccagtatcagctggcacgggctccttcctgagagcaaaggtcaaggaccccctctgtgaaggctcagcagaggtgggatcccacgccccctcccggcccctccctgccctccattcagggagaaacctctccttcccgtgtgagaagggccagagggtccaggcatcccaagtccagcgtgaagggccacagcccctcttggctgccaagcacgcagatcccatggacatttggggaaagggctccttgggctgctggtgaacttctgtggccaccacctcctgctcctgacctccctgggagggtgctatcagttctgtcctggccctttcagttttataagttggtttccagcccccagtgtcctgacttctgtctgccacatgaggagggaggccctgcctgtgtgggagggtggttactgtgggtggaatagtggaggccttcaactgattagacaaggcccgcccacatcttggagggcatctgccttactgattaaaatgtcaatgtaatctaatgcaaaagtctacagattcaaatgttagtctcatgcaacccctccccacccctgccagaaacagaataatgtttgaccaaacactcaggcaccctgtagcccagtcaagtggacacatacaatcacccattccaggaggcccacaggattggaggagctgctgagggttgggttacaagggccaggggtgctctggttccttcaaccaacacatagttactgagtatggagacagcaagatgaggcccccttccctccagaggcagtgcacactgtgtgaggggagctgggctgggtagcagcagggtgtcagggtgtgcaggggggtcccaggtgcgccaggagtcagggtatgcagggggctccagggtgtgcaggggttaggagagctgagcaactttctggaacttatcccgggaactcatttccagagaccccataggctcactgcagaaccatgcttggtatatatggggcgtgtagagggcgcttggggaacagaatcctgcgtttcccccgagggagggaagacatgcaggggaacagggaggaaacgctgcggcagggcagatggcatgggtacatcctccaccgccactctccccctggcaagagtcctggccactccccataaaacgagtacccaccacacccaggcacaaaggggacggtaggtggggtgagtccctgctgtctggctgagatctggcagtgcaggagctaagcgggggacacagatggacggtgctgggccgggagtccctgcaggctcccctgaaggccccctcctgtatgggtggatgtgggcatcagggcgggtggggaatgcccttgtgtcagggctgtgagcaatagaataaccccctgccccagcaaagtgcctggcagtgctgggagaccctggcaactcctcccacctgggcagaggtgcccccagaagagattgtcccacaggccacacgcctgtcccaggaccaaagctgccccgaccattcccctcaaagccagtttccctgctagcgcccattctcaggtgctgacgcagagcaagacgaggggcgcggggctgccaaaggtgcttctggtccggggacacaagggaagccagcaggcgacgcgggtttcaagtgaggcagactggtcttgggctccagaggaagcacagggaggtgaggaggtgtgtggggggctgcagacgggctttgcaaggaggcgtttgcttcagcaggcgggccctaggagctttcccactgtgggttcctgattaagcagaggccagaggcaggtagagccagagtccacaggaggctcctgacgtgcgtgagaagtctggggaggtaggtgaggcaggctgtggggaggtggacacccaggaagccacagagcgtgaggacgggcccaccccaagtagcaacatgttttatgtgggcctcagcaggtcaaggagggagatggtgccgggggccaaggacccaaggatcctgccaagaagcgtcgaaacgctgccaggcagaggaaccctacagggggcccctgggggctggccagatggtgctttccctgctcctgtcaccagcagctctgacacctctcagtcctggaaagccccctccaaaaatgaagcggtttggagtgagtccccagcaggccaggtgggccctggaggaggagctgcccgcctctgcttggctcagcttctgcccccatttatttttcattttcctttttttttagagaggttctctgtcgcccaggctggagtgcagtggtatgatcacagctcactgcagcctgcaacccctgggcacaagcaatcctcccacgtcagcctcctgaatagctgggacaacaggtgtgcaccaccatgcccagctttttttttttttttttcttgtagcgatagggtctctatgttaccaatgctggtctcaaactcccgggctcaagcgattctcccactgcctcccaaagtgctgggattataggcttgagacactgcacccggcctgccgcagtttcttggttggaattgccctgactccagcttgccagctggggcccttgccctgcccaattctgccacgcctcttcagtgcccggctgacccctgtccatggtacttgtgcaggacaggctcagactctggaaccagtgggtcagcagcccctggccaggcagagatgggcaatgtccaccctgggagggccctgcctggagaccagggagagcagggctggactggacccgtctgggtgtggacgctagcacctccctcccggcagcatctggctgagatctgctgctctcaggaggaaccgatggggtcttaaggtcagtcccacagaagctgcagcctggggcgggaggatgccggggaagtgcctgcggggctcagtcccacagaaggtgcagcctggggcgggaggatgccggggaggtgcctgcggggctcagtcccacagaagctgcagcctggggcgggagggtgcccgggaggtgcctgcgggggccagtcccacagaaggtgcagcctggggcgggaggatgcccgggaggtgcctgcgggaggaggcatccagctgtgacgggaagtgagctcctggaggtgcagagaagtccaaacagggagccaggcctcaaggccgcacttaaagccggtcgtggagatgagtgtgcggagtgagagggatgcttggaaacctgtgggcctctctcgcagtatccctctcagtacagtagcctttcgcggttctggtggcctcatggtttggcccaagcatggctgcaccactgtgtccagggacaagtgtcctgggctctccgtggggagctggccaggagccgctggggaggtgaggagatcttcgtgcagagccagtgccagccctcactgaccacggaacaccttcagctctctaggaggacagggagacaggtcctaggggtttggcttgggctgtttccacgtggcacctcccctccctcgatactctttctacaagccaccgtatgctactctgcaggtgcctgggaccccacccaccccaagaagattctggggtgaggggcagcaaaggagcctgggcagctccctgagtgtcctccccagcccgtcctgcccatctctatgacagtgcccagggaggggaggactgaggctccttcccaggagaagacagcaccgcagtgaggacgattcataaatccgttccaaattcgcgcggaggtgcaaatgagagcgggctcgaccctgtgaggaggagttggggtgtgggagtgagtggggacagcctggtgagcgtctgcccgcggggtgggggctgccagccccagggccaatcacccctggctcctgacggcaccgtggctccagctcccgctgtgtggcacggagggcgggtcctgaggagactcgggggcccgccaggtccccgctgtgtggacctagccctcaccgcccagcaatgcacgacttcaccctcccgcggagcaggatgcccagcggctcagggcgccctcccctcgccagcccagtgtggtgtggtaggatgaggacgcgagcagggaggagaggcaggagacggagctgcactcctggcctcagggccccgtgtgctgttttgtacactaaggttgaggcctcggaagccacgccaggaccatatcatgcccctagagcctgtgagactcgggctgtgtccagagcagggggagcaggtccccgacgactaaggacaccaccgtaagaaccacacgcagccccacagcgcacacggcgacaacgtgctgtggggctcggaggagttcctggggtctggcagggacaggcggagggacgcttctgagccttacacctcacggcttcgggactttggggccggcctgttcatggacggagcccaggaggaccccacagcccgtccccgccccttcctccccgctcacctgctggcggggcggccacccttcccctcccaggattcacagctgcgaagggaagagggtggaggagaaagtccagacacgggatcccccgtttatcttcctcccgagtcctcgccccctaccgctgggcatctccaacaagcagcgaagtctcccccgggcggagctctgggtacacgtggcgcaggaagggcctgggcagctcggggtctgctgcgcgggcggggatcgcccctcgctgctgggagctgccaggccgtccccgccccgcgccgctccgggacccccgagttggaatcgcggggccccggcggcgccgtcctgacgcaagagcgcctctgcctggcagggcccaggccggcactcgagggggcgcacgcagagcctgccctaggctgagcactcgagctggaaaacgccgccggcgtccgcgagcttggacaggggccctggacggcgggcgcaggagccaggcgaggcaggctccggctgcaggacgccgggggctgggggtggagacctggcgctttggccgtgcgcccaggcccgcccgtgagaccccgccaggcgctagagcagccagtgttgccagggacgacggcgcgcgggttgcgcatgcgcagtttgccctcccgccgccgcgccttcccctttaagcgccggccggccgcgtcgccgcttcatgaatggagcccacgtgaccaaacatcatgtgacgtctgtggagcggcggcggcggcggcggatcccgagcctggtccggcccggccttcccagtgcgctcggcccggcccgcgcaggcggcgagtcctccgagccccgggcccggacccctcgcgccggtccctgccccgcgcggcctcggagcgcgcgcggccccgccccgccccggcctcggcccgccgggcccgcagtgtggtgagtgcggctgcggcggcgggcccgggcggtgggggcggcgcggcgggggcggcgggggccgagggggcgcgcaggcagggctcctcccggagctaggcgggcggttgggggcccggcggcgggggccgctggtttcgggtctgccgcgcaccctgctggcggcccgtgcctcgatttccccagcggtcaggagccagctcctcctgcccctggcgcccgggtactggaggtgggccgcgggcggcggcggacccgcggagccgggcgagtgcggagcggactcggagacccgggcgtcctggagggaggggcactggacggcgggaggaaagggtggggtcgagcgaggcgcc

SEQ ID NO: 3295 - DNA, 6000 bp, Homo sapiens
atcagtggaaagtggaggacagaggcccagagctgctgcaacgcccaggcctgcctgaagatgtgggcgaccagctgtccaagccaagtgggaggccaccggtggcaccgccactgcacacctcgctctgcccgacaggagaccaggaactcggcacactgcctcctgggatgcaggggggcttgtggccaagtccaagggttctagacccttcgagggggcagaagctgcttgagaaccgtggcctccgcagcctcgcatttttagaggagcctgtttctgggcactcactggctacatcgtgggcttctctggaaggagagctgcagaggccgtgtgctccacgacggtctccagggtgaggtctggtgcgagcctcggcgctgcttctcccctcggcctctcagcggcgcgcttccctttagaattctgattccctattcagccatacttgtcaaagcactcaacatccgatcacagccgagagtgaggccagggcttgtctcttgtaggtttagtgctttgagagatactgtcaagtaaatcctatacatgaaataaatcaagcaaatcccacaaaggctggtcatgtcttgttactaagcagtttgggttcctgtgattgtacgtgtcattgtacctggttttaggaaggcagtgctcctacccggcattctccagccccttaactcaaaccctctctttccatgttctcaatgacagacctggtgctcatccggaagcgctagaagtgaacacaggagatgtttcctaaagaagcagaacactggtgtctggggggtgatgggggcggggaaacatatttttccctttaaaaatatttattggccgggagcagcagctcatgcctgtaatcccagcactttgggaggccgagacaagtggatcacctgaagtcaggagttcaagaccagcctgactgatatgatgaaaccccatctctactaaaaatacaaaaattagctggacgtggcggtgtatgcctgtaattccagctactcaggaggctgaggcaggagaatcacttgaactcaggaggccgaggttgcagtgagccaagattgcaccactgcactccagcctgggcaacaagagcgaaattccatctcaaaaaaaaaaaatgtattgtggccaggcatggtggttcatgcctgtaatcccagcactttgggaggctgaagtgggaggatcacttgagtccaggaggttgaccagcctgggcaacacagcaatgccctgtcaattagccaggtgcggtggcaggtgtggtggcaggtgcggtggcaggtgtggtggcaggtgcggtggcaggtgcggtggcaggtgtggtggcaggtgcagtggtgtgcctatgagcccaggaggtagaggctgcagtcagctgtgattgtgctactgtactagagcctgggcgagggggagaccctgtctcaaaaaagattttttttaagtgtagttttttttttttttttttttttttgttgttgttcttgttgtttgttttgatacagagtctccctctgtcgcccaggctggagcacagtggcacaatctcagttcactgcaacctccgcctcccgggttcaagcaattctcctgcctcagcctccctactagctaggattccaggagcccgccaccacacccggctaatttttgaatttttagtagagatggggtttcatcatattggtcaggctggtcttgaattcctgacctcaagtgatccacccgcctcagcctcccaaagtgctgggatgacaggcgtcagccaccgcatccagcccttaattgtagctttttattttagaagaagtgttccagcatggtggcttatgcctgtaatgccagcactttgggaggctgagccgggcagattgtgtgaacttaggcgtttgagaccagcctgggaaacatagcgaaaccccgtctctacaaaaaaatacaaaaattatctggccctagtggcacatgcccgtagtcccggctactcaggggactgaggtgggaggatcacttgagcctgggctgtggaggctgcagtgagctgtgatcacgccactgcactccagccagggcgacagagagaaactctgtctcaaaaaaaaaaaagaagaagaaaggcattctcgggttttttttttgtttgtttgtttttaacttgaaaaaatagaaatgtggaaagaaggttccagcctacctgtaatctgcaccccagaggtggctgggacgggtgtgcagtcccgtgtccctgcacatgcgtggttcacatgcacatgtacacagctgagagcgggcatcccacgcagcgtcacgtctgtctttactgtactttcctagtgtgatactgggggacgcagtctcagtgtctgcagagccgctgccttagccccgttcccttggaaacagagctgagtcggagctctcaggcctgcaggcttggggaggaggtggggagggaaggaccagcccagacgggggcacacccagcggccacagccccgcggcaaacccaccggcctccaggtcacatgtaggccctgcagtgcctgtcggggagccccctgggccagggtgatgcgagcctgacccccacagaggccaaggcggctgaggacaggaggggcccgggtgcgggagggcgcaggcagggcccctgtgagcttgggcagacacagggagggggtcccatccgcctgccttgtaaacctggaagttgcactgatgagaaacccttttcttccctgaacgtgagacttccagcgtcctgttagctgcagcctcaggcctaagccgtctctaacccttccgcaggcatcgactacaagacgaccaccatcctgctggacgggcggcgggtgaagctgcagctctggtgagtctggaggaggtgcgagcgtcccgcacccccagggagtaacccccctggctggcatagcaccccctgtcagcacagtgccccggggagcacccatcccccaccaccatcggcacagcgcccccgggaacaccctcccaccaccaccgtcggcacagcaccccggggagcaccaccagccccaccaccatcagcacagcaccccggggagcaccctccccccaccaccatcggcccagcaccccagggagcaagctccccccaccaccatctgcccagcaccccagggagcacccttcccccaccaccgtcggcacagcgcccccggggaacaccctcccaccaccaccatcggcacagcaccccagggagcaccctccccccaccaacatcggcacagcaccccggggagcaccctccccccaccaccgtcggcacagcacccccgggaacacccttcccccaccaccgttggcacagcgcccccgggaacaccctcccaccaccaccgtcggcacagcgccccggggagcacccccagccccagctgcaccagggcttctctgaaggaggtggtggtccggttgtctgggcccccgtcatccagagtaggggaccccagaacggacatagcgctgtggctgggaatcggcttttgggatcagaacctgtggcctggtgtctgtgggaagatgccaagaggggaccgatgcagcgtggttgaggcagcccggggctcctgggtcccccacgcctggctcagtgatgccactgagcacccggcagggagctcggagcgtcctggtgccagcggggctgtggtcgggcctgcgggtggaggacccagacgtggggaggtgaggacttgctggccagcctggggctgctggctctgctctctcagctgtgagaaccccagctcctcaccttggggcaagcccggggcacctctccctcccccagcacccccaccttggggccagcttggaacacctctccctccacccgctcttggcttgggatggggggagctcctgcggttccagctctggggcggtggggatggggggctcctgcggtgcctcatcctggggctgcctccctcttgggcatccctcctgcactgctgccactcctgggtgaccctcgcctgagcctcctggcccttcctgcctgctgggccacccccgagccacgtgtgcctccagcagctgggacccccttctcttacctgtccccttcctacgcctgccccgtctagtagtggccagtcctggggagcctgtctccacagtgtccccaagcgccccgacccttcctgctgcacagcttcaggcctcccgcccagtctgctctcaggtccccactcccccggggccatgccctcgctgggctggcgttggggttgccgtcagcccctgtcctgctccccaccctccgccagctgggcctttgctgcctcctcctggccctgagccctgcaggtccaggaccttgttctcaagtctctccctccctccccgagaccactccttcctgaggggccaaggccacccaaaggccgcactcggccccacgcctgcccctgagctcagtgccttcctaaagatctgcttgcatcagggctggcgcgtgccctctcccagctccaccccgggtctggctgctcaccttagcgaacgcctccctgaccccagctgcccagtgggccgaacagtcaccctcacacttttctccctctcacctcaggagtgagatcccagggggcttctgccaagctcagaatccccccaggccccagcaggaccctgaggctgctctcctgtggtgccggtgccagctctgtccacactgtcgtctgagcaaggtcacactcccaccgtggaccccggagtgtggaccccagagtgtggtccttcctggtgcccacaactgggtcttctgcctgcccccacctgccctcacctccctccccacacccactggggctggggttgggctctgctctgctccttcagggtggcagcggcccaggaggccggcacgttgtcccagctgaggagggagtgctcccacttcacgatggggcactctgacagcacgtgctggcccttcggcctccctgcgaagctggcagattgacctggcccgctgcctcctcgaccatagcttttgggcagctcccgctgtgtgcaaagcctgagcacctgaggtcctgctgaggcttgaattctagatcaatttgcttctcaggaaatgaggcactcactcctaggctttggcaatggccagtgtcgctggtcccctctggagccccaggcccttctctctcgtgctgagggtggtcaccgaccacaggtgcatgtgacacaaacagcaaaaccatgccgcgtcccaccgctcatccgtgaggttgtgtctcgtgtgcggggccagcccctggcccactggggaatctcccattgatgtaggtgtgttcgttgcatgtgcagactccgggaaacagcgctggctgtcccagggccgcctcctctgggaactgatccctggggagcaccctttccaccctcatttgtttcttcctttttttttttttttttttttctgagacagagtctcactctgtctcccaggctggagtgcagtggcacgatatcagctcactgcaacctccgcctgccgggctcaaacaattctcctgcctcagccttccgagtagctgggactacaggagcacaccaccatgtccagctaatttttgtatttttagtagagacggggtttcactatgttggccaggctggtctccaactcctgacctcgggtgatccgcctgcctcggtctcccaaagcgctgggattatcggtgtgagccgccaagcccggcctttcatttgtttcttggagctccgttctggtctttgtgggtcccagtacctgctgcgtgtgccgtcatctgagaactcaagccctgcctgcagctcacgccaggcagttccctgtatccctcccctcttaggggcacactggaagggctgactccatgtgagctcttacagttgaactggaagagcagggatcccaccggcctctctcccctg

SEQ ID NO: 3296 - DNA, 6000 bp, Homo sapiens
gcagccatccccgaaccctccctgctgtgcccaaagggcagagccagtgcccggggccctcacccgctgggaagaccagagaccacagggctggaaggcggacgcaggcttcccctatgagcactcggaaggcacgtgctgtctcccgtcgggggtgggcgctggtgcagccatgtttggagagatcccctcccacttagttctcaaagtggggttcctggagctgtagcatcaccaccatctgtaaccacgttgcaaatgcagattcctgggcccccagtgctgaatgggagcctctgggtgtggccgctgtgccctgctccagcgtgggaaccactggcggggggctctgcttctgaagggaagaggggactgtgtgaggggcagcggtgcaggggtcccgtagtgcaggggagagcagagaggggcctggcgacggcctctgcctcgcccaccagcctcatccagctgtgaccttgttgcctctgcccccgctggccctcccggctggaagctgcgtcatctgctggggtttcagttccgtgcgctcagaggacgcactaagatgcagagatgcggggccccaagcatgatgagacccccaatgtagttgattcacccggaggtgggcactgatccccactggggaattcccttatatgggaatttggggatcagacctgagagtgagtgaggccgttctctctccaaggggtgaaacctgggggccatgttttctcctgtgaggagggagcccctctgcagcgacaggaagaccagcgggcaccgtgggaggaacaaaggcggcaggtgggccggcctcgccggcactgggtccctggctcagctacttccaggccggccacacctggcccttcccacagcacagccggtcagcccttcccagctcacaggagacactcccaaccatccttccataaaatcgacatcgtgcttaggctggttcaagttgcatttccactgtttgcacatcacagacggaactattttaaaaatgaaaaacatgttagccttcaagctaaatttggaagaagaaaaaagaaaaatgccccctccctgtgccccctccgtgggaaaatgctgaaatagatattatgtgaattactgaggctggtttaacttccagcaacagaaaatccatctggaggtggcaccagggagctgctctgtatcacaggacaggaggctcgtgggtgggcccacagtgcccagacgctgagaggagacttggagtctgcgttcctgtttgcgaacccccagcagacgccctcacatctcactgctggagtctcctcgtgggccacacctacatggtcacaggcaggagttggcaggagcacaggcatggctcagagcagcagttttcacagtggggcccatgggcccccacaggtctctgagaccctttcatggtcctattggattagagcccaccctacggacctcctcctaacctgattacatctgcaaagaccaaagtatttccaactaaggtcacagtcacagcttccagagggtgtgatttcaataaatctttttagggactccattcaacccagacaaccaaaacttcatacgtggtgaacctttgtctcctgttttctcacgactgcagacaagcctaaacaagatgacttttttttttttgagacggagtctcgctctctcaccccagctggagtgcagtggcacgatcttggctcactgcaagctccgcctccctgtttcacgccattcttctgactcccaaatagctgggactacaggcgcctgccaccacgcccggctaatttttttgtatttttagtagagacggggtttcaccgtgttagccaggatagtctcgatctcctgaactcgtgatccacccgccttggcctcccaaagtgctgggattacaggcttgagccaccgcgcccggcctttttttttttttttttaagatagcatctcactctgttgcccaggccggagtccagtggtgtgacagcggctcactacaacctctgcctcctgggttcaagcaattctcctgcctcagcctcctgagtagctgggactacaggctagcgccaccgtgctcagctaatttttgtatttttagtagagatggggttttgctacgttaaccaggctggtctcgaactcctgacctcaagtgatccacccaccttggcttcccaaagtgctgggattacaagcatgagccaccacgcccggcctcacctccaccttctgatgacattttactcgtggagaagcatcagtaaatgttcctttcattccttctgcccacagaggcctagtctccagagcagccccagatcatgggtgggtggatgttcaaggagatttcagcgtggccacagggaggaatgttccgatgatccgagatggacaggtctggaagcctggctctgagttgggcagaaggtaggctagtgctgtccagacacctccaccctctgcctggactttacacatgtactgaaactggggaggaggaagaggtatcccaccacaggactgtccctcaggaaactgggggccctggtgggaggaaacctgctttggctgtagaaataaacacctctgtttggtgaaagcaatgtttggggcaagaagatggacaccatatctgaacacagccctcttctgacgtggttattttacctggccctccaggtgggagtggccatgttccagctcagccaaggccagcttggaggtgacaactaggaggtggtgaggaccttctgtggggcaggagaagagcagacaagggctcccccatcacctgtcctctgtaggaagtggtctggccacccctctccatgccccaccgtgaacactgctggactgctgggtgtgaccccgagggtgggctgggggcctcctgacccctattgtacagtgagtctggatgtgtaggtggggagcgagcaaaagaaggtaccctttcctcactaggtaatagccatgtgacccacagctgattggaacatggagactgagggttagggatgggaaggaaactcccctgaattctttttggcagagtggtggggctggggactaaatgccatctttctcatagttttctagcgtccaccttccatcctcttttcttcctctgaccttccttctaaaaaaaaacagtgctgcaatcccagcattttgggaggccgaggtcgatcacttgaggtcaggagtcaaagaccagcctggccaacatggcaaaatcccatctctactaaaaatgcaaaaattagctgggtgtggtggcacatgcctgtaatcctagctacttgggaggcttgaatccaggaggtggaagttgcagtgagccaagattacatcactgcactccagcctgggcaacagagcaagactctgtctcaaaaaaaaaaaaatgtggctgcattagtaactaaagcaactaatcaaccaatgaataacaggtgttgcaaactaaattggcattccaaagtaaacattttctaggtccaaatgaatgcaaatgacaaatataataatcttgacttcagtctcttttgtaattcttcttccgctccctcttctgttcctcccccacaaaaaacttctaatggggtctagagcagttccctacacaacgcagggtggaggggatgaagtagtgggggcattatccttcttcttggacggagctcgccctttgcctgctgcctgaattctgcaccaaataaaccaatgtgcacctggtgagaccctcagagcgaagggcagacctcggcctggcaacccttgctctctagagcagaggagaagccaaaaggctggagggtcccacccaatgctctcctccagcacgcacgcaaacacatgcatggatgcacaaacaagcgcacgcacacataggagcgcatgcatagaagcagcacacgcagacacacacatgcaaagatgcctgcaaaggcacacatgcacacgcacatacatgtgcagacacctgcagaggcacacatgcacacgcagacacacagatgtgcagacatctgcagagggacacatgcacacgcacatacatgtgcagacacctgcagagggacacatgcacacgcagacacatagatgtgcagacacctgcagagggacacatgcacacgcagacacatacatgtgcagatatctgcagaggcacacatgcacacgcagacatgcacacacacgaacacatgcacacgtacacaggcgcatgtgcacacacaggcattcaggcacgccgcgtaaatggggcaacgacgaggccctggatgaaccgtggggagagaccgcgagcctggattctacggcgacagggactcctccggcgaggcggcctgcgggggccttccggccgcgtccgccaactggaccgaccccgagccccacccggccaggcacccgaggtctccctggtgggcaggtggggaggccccacgctgggaccctgcaccgcccctcgcccctcccgactcggggcgtgcagacccgacgaccgtgggagcgagttcgtggcgctcacgggcgcacgcgagagtgtaaacacccggccccaccccctgatcgcccccaccccgccccgccattggctgcgggagcagagtccccgcctcctgcttgttctggctccgcccctgccccgtctccgggcctccattggctgtggtgacagcgacctttcaggaggggcgggtgggcgacagcccggaggcggtgacgagagtaagatggacggacaaccaagccagtgaaagcgcgcagctgccctagcaactgcggtccaccaatggcggggccgggcggggatgcgcgctgtcagcgctgggcggcggggcggggccggaggcgagcaaggactcggggcccgcgcggcgcctctcggggccgggccgccgcctctgcgctcagccccgcaggccgggcatgggtgggggcgccgggccgtcacgatgagcgccctgggcagcccggtccgggcctacgactttctgctcaagttcctgctggtgggcgacagcgacgtgggcaagggcgagatcctggcgagcctgcaggatggcgcggccgagtccccgtacggccacccggcgggtgagcgcgggcggagggcgtgccggggtgcgggcgcggggccggggaggggcgcggggctggggagggggtgcgggtgggggtccgggtccggggacgcgagaccgggcaggggtcgggaagaggccggggcgcgtggccggggagggtaggagtcccggtccgggggcgcggggctgaggaggagcgcggttcgcgggcgggcctttctccgcccggccctggccctcgtgctgcggcgtccctgttgcacccccagttccactcgaggccccgcggcgcagtctccatccttctccgcagtctgcgcgcagcgggagcccgcggctgggccgggcgctgggctcctcccgacctggggccgctgctgtggggacccggggcgggggctcgagtccgcaagtgcgcgttcggccgcggggcaggaggggcgggaggggacgcgagctccggggctcctggggcggagcgcggcgagcaggcgcccaggtgctgggtctgcgcgtgggtcggaggggaggggagaccagggtccggtcccgaggccaggggtcccgcgtgtccgggggagaggaaggagcacaggtgactcgcgtgcggaagaggggaccccccacgacagcggccggagagcgggttccagggcgaggggaggccggagcgcccagagctcccaggcaggcagcccggggatcccccaagtttgaggcttgaaagccggcgcccggcgagggggtggacggctccggggaaagaaaggcgggggcaggaacccaggagaagggggaacgcgcagaggcgaacacctcggctgggagtgaggagcaggcggggccttcacccacgcgcatccctggaacagct

SEQ ID NO: 3297 - DNA, 6000 bp, Homo sapiens
aacccagttacagtgttaccttgcaaaacatctaatacaaatttccttaatactaaccttttatgtttcatgatctgatgtccgttaactttaaagataagagcttgatttatagtttcttttctaaacactcaatgcaggtaaacaatctactttaacttcttgccttcaagcaatgttatgttctacttttcataacccatttgtaaagatttccaggaagtagcaatctggtagcaattttactggtgtctaaactcaatgtcagacactgacacgactatatatcagcttaatatttcagaaaagtatgggccaaacacttgctaatgactacagaaattgcaaatatagactcaggaggaaattgtaagccgatagggcagagatatgaaatggttttcaatgtattctaactccagttttgcagtggctgttgcctgaattgtgttgaggattctgaggatggtattaatgctctgggggagagtatatgctatgccatggtctaaaagccatgactgccatgggcaagcaggaggagagactgacctgccagctctgttctaggtttggggtcttctatgtgacaaaagtcacaagtctcaagtctcagtgttggggtcccacaatctcttatctcccacctctggctgtgcctgcttcatcctctgtgaaaactggattccccatcccactcccactgcctctccaagcacgtggcaggagatgccaccctcacagctcctgagtttactgttggctgcacaagtaagtagcaaagactaagtaatggttttcatttgcaaagaacaaaaatggtctctattgaagcataaagggaatttattggaggatggtgagaatcaacaggaagactagaggagcaggctcaggcaggaagcaaggaaggcaagacaaagtccaggttctgccacggggatggtatgctcatgacgcaggcaccaccagcactggaatcctctacccctggacactcatcttctgtcatttgactcaactccaccatggttaccatgaataatcactaaccgagttacttttgtgttactcctcaaaattcaaactttcagcctagaacctgggattagcagtactcagatcataggcctacatgccacctatcgaagaattaattctcagagaagaggaacttgagttaaacaggcaccctcaagaggtgtccactacaggctgtattctactcggcagagggcatgtaagaggatgtaaggtgctcatctggcctagaaactgctgtcaccaaacagagtgagaaaccaagctgagcctatgaaagtctgaagctgtgggtaaagctacctaggaataagcagagtggtaccagaagctagagctgaaaccagggactttggtagataaaacaggcctgggtcaagctgcagaactagaaagaattgaagtcagaaataaaacaagagatgtccccaaagtagattccagtagcaaagactatactgccagaaaatagttctggagcggagaaggcatactcagcacagggttaaattctaagattgtaaaccaggtagtgaagaagtgaaaagctagagagagcaacaaaagggagcaagatggagacagacttgctgaagttcatgtaagattgccatgtttgacatttattaattgcaagacacatttgattgacaaatattcattgcaggatatgtccttctatatccatttatttatttatttatttatttattttgagacgaagttttgctctttcacccaggctggagtgaagtggcatgatctcagctcactgcaacctctgcccccggggttcaagcaattctcctgcctcagcctcccgagtggctgggattacagacgcatgccaccatgcctggctaatttttgtattttttttttttcagtagagacagggtttcaacatgttggccaggctggtctcaaactcttgacctcaggtgatccacccacctcagcatcccaaagtgctaggattacaagctaagccaccgcgcctggccctcaatatacatttacttaggtcgcttagacagtcttttcccagttgaggggaaataaaactgtaatatagaaaccacagtccttgaggcaatgaagacatcaggagcattgagaacttgatgagttggtgcatttctccactgagcttggcacaataggcccaacactcaaggagaaataccttcctttttcctgatcttccaaattaatccttagagaggggttctcatattcttcctaactgggcataggagcagtcttggccaggtggaggcggcaaagctaaggtggtgcagacaatgtcaggcactgaatggatttgaggaaggtggtgaggggatggttgttagaaaagaggcaccttgtgtagggctgcaggcttttttactgttaccaggaagagaaaatcatcatagcctcagtggcggaagcagcagcagcagcatatcactgatagcacgtaggagaggtttaccctaaacaaaaacatttcctggtagaatcacaggttccaaggtggtactgagtgggccctagttcaactttcagcttttcaaacttccagccaaataattttaagcattaatcaacttacataaatgaaagcattttacttttatagggacctaacatatctcataaagtttgtttgtttaaagctttcccctagctttttcctccagcagacatttccaggggtttcaagacttaagttccttatcactccctaacacacatgtacataccacacctctatgctgtgcaggagggaaaagtaggggcaagcttatttgtccgtttcaggatgaacagattaaaagcaatttttgttacaccaaactcagtaagactttccagttttctcttcctcattaaaaaattttttaaaaaatattcctggaaacaagtgagccactaaatgtaagattgaaaactttccaggttatttacagactgaagtttgacattgatgaatatactaaaaaagaaatcagggaatgtagtaataaaaaaaaaaagggagggcgaagagaagcaaactcagtaagtcaatgtaatccataacttgtaggtgacattctgacatactctcccaactttaaaactccatatagaacatcttcaaagccaccttaccccttaaactggggcaaactactatttcatttcattattattttttaaaatatattttactaaatagataggaggtctcccatgttgcccaggctggtctccaactcctagactcaagtgatcctcctgtcttggactcccagaatgctggggttacacgtgtgagccactgtgcccggcctattttagaggtgatttttgagactgagtgtttaggaagacgaaattatctctatttagtgaagaaaggcaacagctcaaggaattttctattttaataaaagctgaatatagacctacataaaattttaaagccctgagacagtcaatgacaaatgaagttttagtagctaagaaaatacagcatcgttccacattatgtgtctctttaacgcctacgcctacctttcgttcatttagtgagctgaagaaaaaaatgttcaaacccttatatgcatttccttaagttcctagaataccggaatactgacacatatgattgcactatttcctatccgtcgaagatgattctgaatttcactaaaaaccgcaaaggaaaccaatagtcacaaaataattctgataaccccaccaaagaggaaataaagagaggaagttactctaaaagtctgatagggcaaaagtgactgcagcagaagggcctcaaggttcagtccatgaggaccttgattaaccttcatctttacgcccccaccccatccttccgggtcctcccccttcttcaacgactggctttacaaggctcataggaaaggtgcgtgtattcagacggacacgattccagctgtggctcctccactttcagggtcgctgtttccacagttgacaagcaggagaaccatacttgttgcacttccctcactgggctgccgccagcatcatatagaaaaacgctgtcccaacataagccaaagccaccatgactgggatagtcgccaaacagaactcagcttcggttcccctcccggcaaggctggttcgacctacagtcaacaggaagctcctgggggcagggacaggatccctgcctcggaaggaggcaagacgtgaacgttttttggacggcgatcaggatggtgatgagggtgtgagtaacgcccccggctcacgcggttgggcttgagattttactaccaacgacaaagggtgcggaagcgtagcgctgagaagcaaacagccaaccaaaaaaactcaaccccgtcctcccccacaaaagcaagccccaaagccctggccactactgagagctgggccaaggaacagagaaaggcagaggggcagaatcggagcgctccattcaatctccgcggcagccgagcgtcggtgggttcgcgggtgggaagggacgccgcgggcctgctctccgggcagggaagcacctcctcctcacgccccctcggcctgcaccgcccccgggaatccgccccggaccccgccgccatgttgggtcgggagaagtgacacggaccggtcgcctatcctgaccacagcaaagcggcccggagcccgcggaggggacctgacgggggcgtaggcgccggaaggctgggggccccggagccgggccggcgtggcccgagttccggtgagcggacggcggcgcgcgcaggtacccgcagcccccgcccccgctagaagtcagggggcggggccggggggggggggcggaggaggtggagagtgaggccgaggcgtggggagcccgggaactccctcctcctgaagtaacgcgtcccgggccggctctgccgtcgttgctgccgccgggcgccccgggacgaggaggtggaggagggagagggcccgcgggcctcgcctccgccctccgccacctcgagctgcggtagcagcgactcatgagagcgcggccggaggacaggtaaggacccggtggggccccgcgggcggagggttccacctctgcccggacagggctaggccccagcgcccggagccgccgccgccgccgccgccgcggttccccgcccccgcgggcccgagtcgggaagttgggaagaaacttctcccctcccccggatcgcccggcgggcttgtctcgttccccgcgctacctgctcgcccctgactcggtctctgccctgtccagacctgccgggtcccgcccaagtccgacctgaggttccaggggcgtggggacactccccaccccttgtctttggggtcgtgtggaccgcccggcgacggggaggagaggtttatttttgcccctacggccgaagtaggggcgagggaagcggcccctttgggtcctaaaggctgggggtctgtgtatcggccgacgccggtagcagctgtgcggggagaggagcgggtgtgtggggcgagtggatgagcctttctggctttacttggtttgattgaaaaccgcaacatgtttaaagttttcctttgttttgggttgggggttgggaaatttaccattcagcgtccacttttacggaatcatgccactccgcctcccgttgcgttcggttccctgtccacatgtgttaaagaaaattgtcttaaagtgtgtttttcttcttgataattgcttccagctttcactttattgggcatggggcagagctgttttaagaagctctttgaaaatcaagtctggtgtagggactttagtttttgttttgtaatgagtaggacttaacagttcggatttggttgaatcattttctgcataattaattgatacaggcgtggaataacatactgtataattataaattactaaaggaaataatgaaagtctttggtggaagcacaattttatgtccattt

SEQ ID NO: 3298 - DNA, 6000 bp, Homo sapiens
gtgccactgcacttcagcctgggcgacagagggaaactccatcccaaaaaaagaaaaaaagaaagaaaaattagaagctgatccaaacagaatggagtatgacaattcagcaaggcataaaaaagatcttaactccttatagtaagttatatgggctggacgcaatggctcatgcctgtaatcccaacactttgagaggcggaggcaggtggatggcttgagctcaggagttcgagaccagactgggcaacgtgataaaaccctgtctctactaaaaacacaaaaatcagctaggtgtggtggtgcattcctgtagtcccagctacttgggggactgaggtggaaggattgcttgagcctgggaggtcaaggcttcagagagctgagatcacaccactgcactccagcctgggaaacagagtgaaaccctgtctcaaaaaaaaataaagaaagaaagaattaagttatatggcaagaagaagacaagcactgttcaaacaattatttatagttttttttattataacagagacgaagtctcacttttttgcctaggttggtctcgaactcctgagctcaagtgctcctcccacctcagcctcccaaagtgctaggattataggtatgagccaccatgcatggcccaaactattcctgataagtattttaaaaaaaaaaacacttaattctcaatgtttccggcattttaaattatagtgtcctaaataaatactaactttacaattttttcttcatgtctttatacacgtatagcaatagttgaagtgttctcaatgttttgacaaaaattttaaaggccatgaaataataataataattttcccattggttattaagatcactttctactattcaggcttaagcaacgatctttatggtgtctgactaccttgcaaatctgtgactgcctgtacttattttatgtgaccattctgtgacacggggctcttttgatcattcctgcctttgtgaaacacaattgtgccctgtttttccatgacctcactatctccagtatcccctccctcccatcccaggtttctttccagcttctcttctcttgcttatcttttggatgctggtgatcctggagctctgttcttgaccttttgtttcttactctacatactcttctggttctggcctttgttatacttgaaacttctcccccgtattagcccgttttcatgctgctgataaagacataattgagactgggtaatttataaagaaaaagaggtttagtggactgacagttcgacgtggctggggaggcctcacaatcatggcggaaggcaaaaggcacgtcttacatggcaccgggcaaaagggaaaaatgaaagccaagtgaaaggggaaacccattataaaaccatcaggtcttctaagacttattcactaccatgagaacagtgtgggggaaaccacccacatgattcaattatctcccactgggtccctcccgcaacacgtgggaattatgggagctacaatacaagatgagaattgggtggggatacagccaaaccacatcatccacctcaggtggtgatgatgttgttaaagtgaagacagtgaaaaagggagacttcaccaaatgataggagggaggtttttttttttaggaaaaagcaggatatggggtgtctaggtttaagacagagcccaaagagccaatgaagtttatggataaactatgaaatgttctatagggatatctacgaaaatggatatctatggatatagatagctataaaaatttcattaattcattcacttcaccaatatttactaacttgtaccatgtgtcaggcacagttccaggtgctggagcactgtggactgataccgtgtgcggtacaattcaatactttgcaagagaaagagaccacattcacataactgttattacagtatatatcttcatagtaattgtatagttggctcttgaacaatgtgattggtaggagtgccgacaacatgcagtcaaaaatttgtgtataattttgactcccccaaatgttaactactaatagcctactgttgaccagaagccttactgataacataaacagtcgattaagacatattttgtatgctatatacattactgtagtctagtaagaatattatattgtaagttacaaaatatgtaagttagagaaaagaacacgttattaagaaaatcataaggaagagaaaatacatttactattcactaagtggaagttgatcatcataaaggtcttcatcctcgtcatcttcacattgagtagctgaggaggaggaggaggaagaggaggggttggtcttactgtctcaggggtggcagaggcggatgaaaatctgcatataaacaaacccatacagttcaaacccatgttgttctagggtcaactgaattttattattagttattgttaatctcttactgtgccaaatttttaaattaaactttgtcataggtatgtatgtatagaaaaaaacatagtatatagagggctctatactctctgaggtttcaggcatccactgtgggtcttgggacatattcccaggggattaggggcactataataattgatttaaaatagtgaatatgcacttacctgtcctccagaaacactgcccaacctctgtcatttagttcattaattattctagtggcagaaactacagatctaccttatggggaagatattttattttgggcaagaaggtcttcagccccacaagccatgccacatgcatctgcctattaagacaggcggtgctattaatcagaatggaccaaattaaaaatcttgagattacctttgcagatgcgtcttgctttgtaaaatcacagtattcctgaaaagccatgcataaatcagtttctttaatcccttacatttatatagtgccttatggttgcagcagactgcagagattgttagttgcttttttcctaacaatgctagaggaaaggaggggccactactctcattctcatagaacagaagagaaacccacagctaagaaatgttctgcggcggagcacagtggctcatgcctgtaatcacagcactttggaaggctgaggtgggaggatcacttgaggccagttcagggtctcacactgttgactagcctggttaacaaaccaaaaccccaactgtacaaaaaatttttaaattagccaggcgtggtggcacgtgcctgtggtctcagcggctcaggaggctaagcaaggaaaatcacttgggcccaggagttccaggctgccgtgagctgtgatcgcaccactgcactccagcctgcgcaacagagcaaggctgtctcaaaatcaaaacaaaacaaaatgaaagaaaaagaaagaaagaaggaaagaaagaaagtaaattccgtgatggtaagtgatggatctgtgtttcaaataatatagagggatcatattttacatattctcagaattcatattataaagatccctacagtgactgcacagttaagaatgctctcatagatgtaaacttccaatctacactgtgggcaacgctagatttttacaaatcaggtttgctgtgtaacatatgcgtgtactgtgcattactaaacctagttctaaatacagcacagctgaaattttgtgggtaacgtgatcattcggcaaatgttgccagcccctatcatattcagaaccctgtgttctgagatgctcaagttcaagctgaggaatttgctaaacaaatctctggcaaggaatcagcagtgattttctgtatccttaaatccttccaaacagaaatggcaaaacatacgacccgagtccataattcctaaagtttcaatcttctcgcactgtttgagttttaactcgcttattcccccaaaggagtatgccatttacttaatttaaaaattaaacagcataaaaacttctgaactctgagtgagacagcgatcagagttaaaaataactgatttcgcgcgtttccgtgcaaaatgggagacagacgtgacggagagagaccgagcagtgccacggcccggtagagggtgcgggggcttgcacccgctggtgtttgtgagagagcgctggtgtagacgcgaacgcagcgcaggcggcccggcggcgcggcctcaggtcggggcctttccagcgttccagctacaccgagcgcgcgggggcgaaaacatgtgcatggtgtttggggactgtgcgcatgggagtgttttcactgtcaaccagggttctttttcttattttgaacccattttcatgatgcaccggaatgctgaagttcaaaattgcctacggagaattttaagactaaaaccacactaagtttcttgtgttaactataaatgcgggtcagagtgaaagccgagtagggaggagtgaaaagggggaaaagggaagagataagaggaagaaaagatgaaagagccggcggaagagggagggaagcgggggcgggcaggcgagcagaggcagggaaagagcggcgcgggttgcgggaaagctccgcgcgcagtacccaaccgaggcccgggcgcgcggtcctcccgccggcagggggcgcccacccgcccgcctccggcccctcgcggccagccgccccgcccgcgcctgcgcttcctgcccctcctcgtccgggatgctgctgccgctactgcggagtagctgcttcccttcctcctctcccggcggcggcggcggcagcggcggaggaggaggaggaggggacccgggcgcagagagccggccggcggcgcagttgcagcgcggagcccacgggccgccggggccgctccagcgggcggaagccgagcccggggccgaccccccgcgcgcggcggaggccgagggggcgccggggcccggggcgcgcagccggggggcgggcggcggcgggcggcgggccgagcgggagccgcatgcgtgtatggatccgggcgccgcgctgcagaggcgggccgggggcggcggcggtctgggcgcgggctccccggcgctgtcgggcggccagggccgccggaggaagcagccccccaggccggccgacttcaagttgcaggtcatcattatcggctcccgcggcgtgggcaagaccagcctgatggagcgcttcaccgacgacaccttctgcgaggcctgcaagtccaccgtgggtaagggcgccacggcgaccctgggccgggcctcctggcgcccgggcaggtgcccttcgccccgtgggcttcgagtctcatcgagcctgggagtctttcggggatgggcctctcggtgaaactaggggcgggggtctccttggagcgccctgcatcccaatcccaaagcctggcagaggttttcgtgccgcctccgggcagacctgcccttggcccccggccctgcctcagaggtcctggcagcccccggggcctgtgggggcggctctccacggaaacttcggcccttagcatactcgcccaagaaaaagctgggttcgagtggagcgcaggcaggcaggggagtgaacgcctaaggccgctctcgcccggcccgccaaggccagcgcgcgccgtctgctgcgggtgtgatccctgcgcaaccagggcagttttcttattttgaacccattttcaagaaatgaagtttaaagtcacctatggagaatgttaaaactaaaactacagtaagtttctcgtgctagccgtacgtacggggcagaggagcttcagctgtatttatccatgacctcaaacaacccggtgactggcgggcatggggttgattcctccagtaccgctgttttcggtgagggacaggagtgaagtaagtacaggaacgctccagggtcaaggaggaaaacagccgtggatctgaaatggaaactgcaggggaaatttttttaattaagtcatgcttagaggacttgacattgagatttctcagttggatgtgggtagcagttgtttctatggaaaaccccttaaaagatgtccaaacta

SEQ ID NO: 3299 - DNA, 6000 bp, Homo sapiens
caattaaatctttaacgttgttgaaattttgtttttttaacaataataacctcagtagaaataaaatttgcaagagttctaatgtaattggagccttaaggcaactcagttaactattaaatacttagtacagtagttcagtactcttagtacaggttaagcatccctaatttgaaatccaaaatgctccaaaattcgaaactttttgactgctgacacaatgctcaaaagaaatgctcattggagcattttggattcgggatttttggattagaggtgctccactggtaagtataatgcaaatattccaaaatcggaaaaacgctcctggtcccaagcattttggatgacggatactcaacttgtacgcagatattcttagaggcacttcagattaggaagagtctgcattaggttcttccttatctagggcagtcttgggaattcaaacaaaacacaaatctattttccccccatcacaaacacacacactcacctaccagttgactaggttcaaactccaaccatcctgatcatcttctcctttacttgggggttgatttcagttgaattcaaggtttggcatctctggaatttatacccatttcttgaataagaagatctacaaaaatgaagcaactacaccaagcctcagacatttcacatcatacaatagtctcctgtttatatgtttgtctctttcctttatagctcgacgtcaacgtgggtcttcttccgccattggtcattcttccagtgtctagcacagtcagtgtctgctatttgccgaatgggtgggtaaacagctaaacatagaaatccctgtgatatgagaatcgttgccaacatctaaaattaaaccaatttttagtttgagagcaaataatatcaaggtacaaaaaagtgaaacacaactccttttaagaaaaagaaatcctaaactccgtgtattactctgagcaattgcaggaaaacttctgactcgccagaagaaataacccaagacagtctatgaaacgaaactggggttgtggtgactttgatctgcatcattgtagtttaatttctcagttttacaagtaagcaatgaaaatgaacaggactgactgaattacatgttacttagggctttcgggaggtggtcacagctgaatcaatccgtttaccttccatgggaggtgttaatatatatcttattgcttattttcttttaacccaacactttaagctcagccagagatccaagggacagtggaggttgctaggcaggagtgtcagtaaagaggccagttggatgctgaggatggcttaagctgcccagtgctggctctcaggaatctggaaaatttaaacattatcacctgacaccaatcctttgtgagatcccaacagagccttccctgtcttcagtgagagctgtctacttgttctggaacacttctgagcactcccatttgaggcgatggagacgatgaggaggcgagcccccaccctccccatctcccatctaagatgtcaccacactttccacatgaagacatctggaattgcaaaggaggctgtgcagtttctatccgcttacctaatagcccctccaccgagcagccaccttccttggggttctcagggacgctccctttcccacagacaggctccttcagtttccagcctcccccctccagctattgtctcctttttcaagtctgtgggtgaattgtggggtccactcacctctgtttttctaaatccctcaaatccctttcctaccctggtatgtccaggattcatctcctcaaaatttgtttaaagggcgtgggttacaaataaggttaggtagcacatgctatttagaaagtttcagaaagagaaggaaagaaggaaggaaagaaggaaggaaggagttgttacataaatgagaaatactaaaaggctgtttaactgatattgcagacactatagttccataaaaaagataaattatgaaaaacaaggtttgtaaacatttttatctttccttaattggcccttgagcagaccagatgactcagtactggtctccagggatcagcctgcactccagggcgttgtgacacatttatattgcttatcctatttaacattttgagtcatattattttcacagaaccttatttactataaacgtctctataaatctacatagtatacacatttcatttaatatctaagtaacatatactattgtacaccatcaaatatacccagtaacgacaccctagcttgcttaatcattcctcaagtgttaagaggtttgagttacaattaacgcaacaatcctccctttacctccatggatgtaatttttttgttgttgtttctctaacccatttatttgttttttttgtctgcatatgtgtttatattcaaacaggcagctttgtttacttttcgtctttgtatgttattgttcaaaaaaggatttcctgaatcaaaaaacatgatcagttttatgaccattactggctttttctgttggagactttatagcagcagagaagttgaggtctgaattagcacaatgaccatttacgttacaaaattcttataagaaaaacttgcatgttctatttcttaatttgataaattgtcagttatgtaccattgaatttttacccctgctgaagttacaccagaactacatatttgcagaaaattccagagaagtcaggatgggcccttagtacagtaatcatagagtgtaacaatagagaacatggcacttttttaaaaagtcgagagctgcctctgacgtgtcactcttaaaatatgtctcccagcagtcatcttcctgccttccagggctagagctttgtaggttaccttagggtgatcatggggacctggttttcatgaggccatgtttaagctcaggggtgacctggctgggaagagggtataaacccatgaacacgagtcagttgacagactaggattgccactttgtaaagaagagcccaagacctgatcagaatgagacacaaatgaggtcatttttaacagaactaggggaggggagaaggacaaatagactggggcgattctcagggagggaagggctggatacgagactcttttgggagagcctagaaacgacgcaagcgtcccagacacccgggctagtggagaagagagcagaatgagagcagtcatgaaaaagagtaagggaacacaagagaaattcggtttgcctatttctgtctgggcacagttctgcccttagcaatctaaggcaacttcacaaagctccactcactgcacgggatgtagaacacagtggaggcttccaccctggtttgactggcttttgggaatcaagctggaaagccaaaaggacatgtttcactgtggaggtgccctcagggctggcgaaggccttgggggaggtgtctttgcaactgtgtaggggtggttttctgattagcaaatctgagggcagggagatattgtgatcaggactgtttgattctggggaagcctctttttaccctgcccacatagaagactctgctttggatacagagtcaaggacggatactgatacaatggacctgtaacttgtccatggctgccttttgtacagtttagtccatttgagtaatctctacaagcctgcacctcgagggcaaacttcctgctcttctggggaatttaattgtgaattgtctgtttcggggcccattttgactcctgtattccaggacttatctctttggaggccttgatttggaatttcccattggatggggctacttgggtactgggtagcttcaacctggcttccgtaagaacaaagccagatgatcacggtgggtggtctgctaggagaatggaaatgccattgattaaaattggaaggttaagagagaggcctgagagtttgggataggagatgaagtttcaaaaaatcagtttttaaaaaaacatttcccatctgaaatgccagtgaattgttcagatagattacattgaaaaggctgacatttctgtagcagcaacgaatgaagtcatccgagtggatgaggtgctctaggccatacatggagaagagaacacagttacccaagcctccccgactgtgtgcggccacagactctgctcatttcccagttaggaacgatgcaggggtctgctgggatctccacgtttctacctgtacctctgaggactgggtttctgcccacacgagttgcaggatttgctctactgagaaaaagacttttgctccagaaagcaagtttcccgtttcagacacggacagcgagttttgcttctagaatcattttcagctgcatacagaaaaatgaacttggctgagctgaagagccacacatatgttaaacggaagctcgggtattaggaacgtcgagaaaggcaggccgaaaagttagcccccttctcctcacccctgtcctcacagcggccccttcagtggcctgactttttctgcgtgggacccagaatgtcgcttgaggatgggacccccgcagacctccacgcgctgccacgcaaacggcctcggccgagagcattcgctttccagatgagaatggcatcttcagggacccgctggtagtggggccaggtctccacagggccggtccagtccttcctacccacccgggccctgcggccaggcggggccgggaggggcggatgccggagggcgctgggggaggccgacccgcgcggggctggtccgagggcggaggcaatccgccggcgacgccgcaggtcccgggtggctgacgccgtccgggggcgttcctgggagctgggggccggcgaggctggacccgacgcgcccgggaggagccggccggcggccacgtgacccaccgcggcggggccggcggcccagaaatagcagcggcggcggttccgcccgcgggcggcgcgagcgaggggcagaggcgagagacgccggcggggcgcgggcgcggcggccccggaggatgctgctgagccccggcactgcctggctgcgagcacatgatggcgatacgggagctcaaagtgtgccttctcggggtgagtcctggccgccacccgccggcggaccccggcccgcgctctcgcgccccttcgctcccctattccctgcgcgctcagtccccgtgatcccctcgctctccgcacccctctcgtagcccccgtccccctcgtccgcgcgccccctggttccccgggtccccctggctcccctagtccgtgcgcccctcgctctccgcgcccctcgctctccgcaccccgcctgttctccgcctccccgccgtccgtgcgcccctctggtccgcccccgctctcaccctgccggggtccgggtccgagcctgccccgggcttactccgctctttcctcccggcccgcgagtccccggatccgcggcgacctcgcggggacccccagcggggacggggcagtggcggcgagtctggggccccgagggctttctcctccgcttttgatagtttccttccggcagaaagtttaagttgctcagccaagtcgctgagtgctcttttgcctcctgggggcaattgatttactcacgtaaaacagaaaaataaaaccaaaagcgaacccagccaagggggtgaaagccgagggcgcggccggggtggaaggtgaggcagtgacctgtgcggagcgcgccctgcaaacttccctgctgcgggtgaaagaagctgcctgggaaagtcctccccaccatcactcccctaaagtggggttttctccgcccgaagaagccttaaagcagccagaaacaaaaaagcagtcaatccgtgcggcccggggactgcagacaggggacccggcgaggacgcagggagccgctggcgaaccgcccctgggaattcagataaacgtagggtcgcttcctttcgggggcccactccgcattccagaattccttcttctaaaagaagagccggttctaagggcgttttcagcagccattag

SEQ ID NO: 3300 - DNA, 6000 bp, Homo sapiens
accttaggccctaagatcggggtttgcgttcggcgtttgctttcttgttttgcgttctggtttcctggtgcaggctcccttctccttttaaaggtgccggcctcattgttatgatctggcttttctctttctctgcgtggaagcatttccttctccctgtgtttaaggttggcatgtgtgtgacttatcccaggctgagagttttgtagatgagatgggtcccggtccactaactgaaccctgagaattgaccgtgaccatgaatcacacagcatttctccccgccatgcaaaacccatgagccgtgcccagaagccctcaactgctggggactccctccatcatcatttgttcctccccttttagtgacggctgtgtgtgttcctttcccacattcgttctataggtgaacaaaggaaggctcggaggttttaaataactggtccaagttcattgaactggaatgctgactctctcacatctcaaaactcttcctaccaaaggagaaaaatgaagtctgagaaatattttactctaataagtgaaattttgaatattctgaagataaaagaacctggcactcctaagaagccatgttcaacagctgattcaagagtgctgctaagagttcaaaacatgcaggaggggagtcttcttgagacagagccaggccttcctcaattttgcattctgtgcatcagtgctcattgttgactggggagagaaatgagaagcagcaaagaggaaggaggtggcggaaagcggggaaaggtgtggacagaccttcctggcatcctactttgctatctgtacgctcttcctttctagattttcattatacttttgtcactttaataactgtcttacatataaactttttctttaatttgtgtactttccaaagcaaaaaacttatgaaaacaagacatgagggaaataaagtcatggagggctaaaaagctaatgctgttctgctaacattaggattagcataaggacagcacaaagttttgatgttaacatagaatttgattttgatacagtgaaaaatgctaaaatgtcaactccttttactgataagtaaacagctcttggctaactagggcaacagctgtacccatgagaattatagtactgtccaaaaatatttcaggtgcaaaagcaaaagtcctgattgcagtgtgtaacacactcaggaggctcctgaaatattactaacttcaataatgatgtaactcgacactgtcacccctttctcttcaggagtaagtaactctttattggcaagatctgacttggctagatctttaaagagtactggtagtcattggagacttccttctctatttatcacttaaggttgaccaagtagaagaggcattttgtttactcccttttaattgtgataaatttaaaagaatagcatgtccagaaaaggaaaattcatacttatggtctcctttcctcctggattgggactgaagtttttggagatgtcctgcaaaagctctgtagatctctgttggctacacaaaatggcaaaagccacagctgcagaaattgttgcaaacttttcatttgcttcatcatcaaatgaagatctctactattacttttgagtttggagttaaatgctggtgaccttcatctttatgctgaagctttggtgactgtctataccatctgatctacacaatgtattattacctttgaaatcaactctttttgtcccttgtggaaatgcacctctgctggggtgttttggtgctctatattgtcattaggtaacacccacttgcattaaaagactttgtcagggcccagcgcatagtcagtattccgtgctatcagtgtgtgttcagattctcctcttactggttttcttagactgtactgttttctaagcaaatgcccatgtgtgatttttaagatgtgctggggaaaaataaatcaataccacaaccaaaaaaaaaaaagactttgtctttagaaccaatttcccttccacttctaattactggttccttagcaaatgaatacactaactagccaataatatagatagatagatagatagatagatagatagatagatagatagatgatagatagatagatagatagatagatagatagatagatagatatagatattcattttagcctaggcctggtggctcatacctgtaatctcagcactttaggagaccaaggtgagaggatcacttgaggccaggagtttgagaccagcctgggcaacatagcaagaccctatctctacaaaaaaaaaaaaaaatttatcggggcatggtggcgcacacctatagtcccagctactcagaaggttgaggtgggaggatccctttagccccggaattcgaggttgcagtaagccatgatcaagccactgcacttcagcctgggtgacagagtgagaccctgtctcaagaataaaacaaaatcctcattttagagctagtgtttcatgcctttttcaaggggcatagaaaagtagcaaagagacctaatgtggttcagtgggaagagcacaggccttgcgacccatcaggaagtcaaggtgtagattataatcaaagcaccagctgtactactgcctgttattgatgggaccttcagcaaagtgctcaagttctcgagtcacagtgaaatggtgataataacgaccattacatcaaattcacagggcgaggtgaggatggtgtttgtgaaaatctttgaaaactgggagctactaaggttatttccagattccattgccttttttcagaaaacaactttattgagataaaattcacataccatacatttcacccatttcaaatgtacaattcggtggtgttggtatattcacagatctgtgcagccatcagcacagtcaattttagaaaaatcacctcataaagaaacccataccctttagctgtcatctccctggccccttccattgcctgtttaattttgattttgtgtttatttatagagactttctgataatttttaaaattaagttaagtaaaaataagattacttgtggatgacattaaaatactgtttcctatgaaaagtgtctctgtagggctttccagttaatgatctaaatgcattggcaggatgagggatgatgagctaagtgttaataaatgacactgctaggaagattacaattcaaatctatttctattttgagaagcagaaaagatggatgagtactcactgttactgttgaagtcacggtaccatgaaagccgctcattaaaccaggatgggtctctgggaaggcagggagagggaagagcgcgctgatgagcggaggctggatgggagctgcccccaggagtggatcttcctagcccaggaattccacaccaccaggaaactgctggactgttccttacctgaacttcctaagcccatgaattgggcttcatgcagcagaactagggaggaaaggataggaagaaggaagggaggaaggaaaggaaggaaggagaaaggagcccctccaggaacacctttattttgtgcacagcccaaagcaggagtgttgaagcagggtgaaaatctgtgtgtgcagtgttggctgtaggaaagggaactcacccttggcctcctttttgttgcaggccgccagatcccacccttggacccccatgaaaatggaaacaatggaacaatcaaagttgagaagccaaccatgcaagccagccgccggtgctgttgacccaagggccgtggtccacggtacttgaagaagccagagcccacatcctgtgcactgctgaaggaccctacgctcggtggcctggcacctcactttgagaagagtgagcacactggctttgcatcctggaagacctgcagggggcggggcaggaaatgtacctgaaaaggattttagaaaaccctgggaaaacccaccacaccaccacaaaatggcctttagtgtatgaaatgcacatggaggggatgtagttgcatttttgctaaaaaaaaaaaaaaacctttaaaaattgttggatgtgtacaaaagtcttactgccttattatgtgtatgggattctaaagtggcattccacttggatttcctgtgctacctatccaaattccagtaactacttcagtgtcattgcctttgttacctaaccaaccttcactgaaaggcaaatttagttcaggaggttagtttttagctagctttggaagtaagcctttatttattactttttggaggaaatcagagaagtgtcaatggaccgtcactcagactgagacttgagttattacagaagccaggaaaagtgtattagaaactgttgtctacaccacttttaattggtgaacaatttttctaagttatggtcatatatacccaaacaaaccaaatcaaactaaattactgcatataattttgggattgggtggcctagtttgaaagagtgatttaagtaatcactatgtaagtggtgagagatgcaggacatacacattattcaagagaccacctgacatgcatctcctccgcaggaatacattcgtcctctcttagagaagtttaacgcacatagtattattttactaagagaatatctcttggtgtcatatctaggggaagagaattaactagaattaaatttaatgtttgaatctaaatcattgggcaaacttctaataataacaattaataataggttacaggaaagccagccagaggaagtgtcagcactttaaaattctagaccccaaaaaactacaaaatcagaaaaagtatttttatgtttctagcttgaggagaagggctttagggctaaccagaggtctgaccctagaatgccaaggaactgagaatgggctccgatgaaaaccttccttttcagattccctgtctgctcaattaaagatgtttgaatccaaaggaagtcaaggaagaaaaagcatggaaaggaagagaactgattcctactgaaaattcaaattctattaccattctaactttcataaaaagttgggatcaagaagcagctgatttcctgccagggcttatattagggggtgattcttaaaggacattaggattggtgctcagaaatggttaatcatgctgtgtgctagccagggccagctggtaccttctttgccatgagcattcaagggacggctaacctttattgacaatctatatcgcaaaagtcaggaaagaggttgtgagctgattggattaaagacctggcacttcagtaactcagcacgcttccacttcactcaacttaagagagttcattgacagtgttaggatgtgaaggctgggaaacacttattttgcttcaagagttccacttggctctcccaaataggtacctcaaaaactgttagcaagcggcatttggatgtcttgacaggggctttgcagggatttttagggttttttccacattgtccacattaatggttggcatgattgtgcttgcaggccaagaaatgatcataccccttgccaaaggtaaaaaaaaaaaaaaaaaaatgagttgaaaattgaagtgacctctttccagctgagttgcaggcttattttgtaacctttcctcatccagttttccctgagaacctgggtttatctctagatagctgttcaggttttttagctgaggggtaagtatcctagctgagagttttgcatctttgggctgggtttgcagtggttgtgttttgcataaaatgtctagtctttgccacagatagtgagctacccactaatgagcccatggttttatttcagaagcacatgagggtgtgaaaccactctgttacctttctgtattgtcttagctattcaagccagtcagaggataatatatatattctcatcagcactcagagtagtcagtgaagagagtagatcacacttgggcacaccaggattcacataaacattgtatcttctctgtggatgctcaggccttgtctacaatgaggctttacaac

SEQ ID NO: 3301 - DNA, 6000 bp, Homo sapiens
aggcacaagttgcttaataaatgtttgttgaatgaataaatcattgtgcaaacctctcaaatctatcttcattctgcatttcaattcactttctccactgcttatagatcattatattaaagtatatgcaaatactttaataaagcatagtgttttctctatagaacaaatatcttttgtttccttatgtgtattttaagggtaatttaaaattaactttatttttattaaggtaatacatctcataatttaaaacaaaatcaaaatctacagttcttgtggaacagtgcagatcgcctcctaagccctggtcttaatccccacaggcaaacatttgactctttagcagcttttgtacttttatatgtctaattggtttgcctatcctgctatttctttatttagcaactttacacattatttattgatttttgttatgatgattgagggtttagctgtcttctctgcacatatacacagatagtctttccctctgccatcctccacatgtagttttattgtaggttagggttaattctcttgttggcattcccaatatttttattatgtccagatctgaacaaagtggtattctatcataatgtttcttttttcttgcaactttttgtttctcatggagttaataatatccttttaaaattagttcagcacactccgtacctattgtatattattcacaattgcctctgactgatctttaagactgtaacagagtgatctaactgtggtaacaactctaaaaaatcttcgtggcatcatacaatacaagtttacttctagctcatgtggtagtccaatgtgtggcagctgaggtagccatgtcacaccctaattcaggttcatgacttttcatctaggggctttcatgtcttctaggggcttagagctcttcgttggttcttcgcatctgcgcactagtaagggaagaggggaagtgtggaggatctcaggggttattttatgggcataccctggaagcgatgtacatgacttctgcccacaatccatgaaccagacctcagtgacatgcctccccacctgcaaggggctaagaaatgaaatctagtgtggtgctcaggaaaaagagcagaacatggaatctggcgggcacttcccgctatctactgtattttcaaatgcacatgtgtatcaaacaatctatcattttctttccatttttttttttcttggagacattcctactgcaagccatctgttcacctctctttaggcctgcttcacacttattgctctggagaatttattttactgcctcttatgttgggcctgcatttttggggtttcatctcttcctctttcttgatttataagcttgtttggggaactgttactttaaaatggcacacaggatgtatattttttaagtccttgcatatctgaaaattttttaaaatcaagcttggctgacagtttgtcttgatatacaattctaagttcaaaataatttcatttaaaaaatgtgaaggcattcaaagaaacttctggatccattattgctcttgagaaatccaatgcaattttttttccttgtatgtgatctgctttatgtctctggaagatgttttaggtttttctctttattcctgcatttattttatctcagaatgatatatttcgatgagtttaattatttgattaatttaaaggattgttttcctggacgtttagtgaaactttcgatctccaaagttcatcatcttcatttctggtattgtttttgcattgttttcaaattagtgtttttatccttttctgcatagaaagaagtcttttctagagctttctgagatttccattagtcagaatttttttccattttttgaaaattttctgcagctaaatagatttttcaacttagtcttctaacccatctgtcagtttttttgtaaatgttgagtatattttcaatttcaaaagatttttttcctgttttgtatataaatttcttttttattcattatctctaggagcagggtaaaaaggcatgtgttcagttcatcttgttgaaccacaaattactctagtttactttctccagaaaataaacctccagtctcctggaagctggattgagcagatggaggaacttatggttggttgattgtgtgacagtggggaagggaactctgggtccaagcattccaatatacagacgtataaccaaacccctgtgtttaccccaccacctggcctccttctatgctgagatttctgcctcctaggcctgagcctgcccaggttttgcaggaagaattggcttgctttttaccataatctctcctgcaggcatgcagtgtatagaatcctctgctcttccaaatcagttaccacgcctgcatctgatttagcttcttccaaaattcattacaagtttatgtgttattttatctgcttatttgtctttgtgattcaataacatttaaaaaaattcatttattcttgtaataaagcagtttgaggagagatgaaatacatgtgataatcttgccatttgtaactacacatcaccccatgtacattaatgtttacctcagtgccatattgattgaattagacagatgttatgtctacttaagttatgctacataaactccaggtacaggaagatgttattactattattatcatgacacacaatgctgtcaccttgttttcactggttttccactgttttttattctgctctacctctggtcaaagtggccttcatggagtggccaagcaacatttctcttatgtcttcctactctttctcttccttggaacccctcttcccagggaaggaaatgttccaccactctctggtagtgtcactatgtaacactactgaatctgagccttggaacctcggagacaggaccatatgtggcaagtcactccaggagagctatccctgcaagagttggccctataaagcaggtgacacacttatctagggaaaggtggcaaggagagtcatcaataaatgtgtgtgtcagattttcttatggcaggaaccttttctagaagttgcagtgaggtagtacaacacagtgaccactgtgagctcggcattcaggatcaatagacctgtcttccaccttttgaacttcatcactttggacagatttactgcgactttctcaacctcagttacctcattctgaaaatggagacaataaatataatagacgccttgcctatttcacagtaatgttgtgaaagccaaatgagatgaaactctattgcatacaggaaataatagctattaggactaatgtcagtagtgaacacatgaactagataaagaatatgggttatcattgtatagcacagagggtgattttaagtcaatgtgttaacagtggaaaagattcaaggctcttatgttctttcttttatttctgtctgggcccatggacacacacttcttatatacttagatattgctgttaaatgcaaagtagatttatcataaatatagattccaagcatacatactttgaaaatctacaggctgagcctcaaagacttttatgcagtagatccaaaataatttttaggaactggatcttacttggggagaatggaatagattgttaccaaaattataagtatagccaacacattcatagaacttactgtgccaggcacgttctacacacattactgatatgaagtcaattcttcacaataacactatgaagacattattattactcttcttttcaactttcaagaacattgaaggacataaaatagaacttctttaatagtttcataatagaatagacagatttctatgagaccaaaatgttttctctaatattccatttttccactagtttgctattgtttgttttgtgttttggtttgggctattcctttgctcccttctacaagaaattctctgggagctgataacagcagtgcctcccagattgtctctagggcatcgaataagaaacaagttaagtaattaaaattcaagcagtcattggcatctcgttgtttactaacatgaatgcaagacacaggtttggaacttttaaattttgttcacagaggagtaaatcggttgttattataatgtacctaaccttgtattcttacctttactaccagtctgtaaattagggatgtctgaatgtgtctaaaatggaatcccaagatgggcagccaggatctttgctttgtggacgaatctaatgtgtttagaacacggcatagcacatagtaggtgcttaacaaatactggttcaatgcctccgtgtgctcattatcttacttagtggtaacctattgatctctgaagtgactttaggaagtgaattagggctttgggaagtgaatttggatgttgcatactgattaatgcattcatacgaacacatcctaacttttaaaatattaatttctttccaacgccctcttttatttcccgaggccatcctctgctccccactcgcaatccctcgccttcactcctcatagttaatgagacaccccctcggaggagagaacgcaatgtcagggccccagttctcacagcgccctgggctctttgaatgagagacatcaaagaaaacacagaacaaaaatgaataaaaatgagctcgctggtaaggctagaagccccacagtgtggagacttcatccccgagaggagtgtgtttctcactgcagcagttgagtcaccagcaagacttgcctgaggtgagctccgcacatccgcgttgggacttgcagacacgccttcttctcacacaaaccttacccagccccgccgccgcggcggactccgagggtggtgccaccagccctgccactcgcagtcctgacgggcaggggctgcggaccgcccggccttggacccatccggagccacaggttggaggagataagtagctgtccccgtgctcatcgccctgtggagcagatcctgtctccttgctgacggtggagcccgggagttccagggcttgggaaggggaaggaaacctctctgaaatctgacacctgctctcccggcaaggaaacttcgcaggctggtgagttgggaaggcgggctgctgctgctggaacgcgttcccacccacccgggtgctgcagcgccggcctgcgccgtgggaagtgaggcctctgtgtgtgtgtgtgtgcatgtgtgagtgcgtgtgcaccttcgatcgcggtttccagcagaaatccttgcaaagaagacagtagtgctgtgtgctgcacggatggcatgggccaactcgacctggctctccttgagtgtttgcttatcaaacagctggttaccaccaaaaaaagcaaaaagaaaaacaaaaagcctaggcacagcaatgccaatttcctttcatttgcatctcaaaaaacaatcaaaataatgaataagaaaaagcatggatgatgatgtgctcagagtttcattccaggaggagcgacttagtgaggcaagccaggagagcaataagacatttatatgcacttccttagatgaaatagccacagagaccttaagagtactttctgttttccaattttttgctctgttactttcgaattctgatctaagtgttgcaccaactagggtatatgtgtgcatgtgtgttcacccaactgatcacaataaattagctttcaagactttcccacccaatgcaacattaattaagcctctgaaaactactgaagtaggtgaactgtaagcagagactgcattcctaggaaaaagctgtgtttggttagagccttcacacctgtatcatgttttgtgagttttttatgtcaagatgtaaagctaagggtatgtaattccagttgttttaaactgcacatcattaaattaagcccaaagtaataacataaatttcaaggttattaacaacaaaattattgtttaatataatacagctctgaattttgattttgttctgtttataagaaaaatgtctacagttctcaatatttagt

SEQ ID NO: 3302 - DNA, 6000 bp, Homo sapiens
ccgccgaatgactacgcccacccgcagccacctccttctcagccccgccccttagggcaatagaagaaatttcatcccaacgttcccgccccttagaaccctgcccctcccttccacccaggcggccccaagcacccatggccctttgggaccagggcggggtggagtggggtgcctctctcccctccccgccaaggctccgggtcagggcagggcaactccctcgggctcttacgccaggctggggtagctgcggcagctgtgacgtaaggaggggtacgcttcctccagaccgccctcccggattttccggaaagaagccccatttaggtggcgggttttgtggagagacgtccgggaaaacgcgacagcttccttcagtgacagcacgctggagcggggcgggactttggtggaggtggaaggcaaatcattcaggtggtttcccaggtgggaagaagggtgggggggacttccatcgtgatgcctggagacgaacaagagaaaaggtgacagggacctagtgcaagagagaggactctttggccacgtttattgatgagttcctcatattaacatcagtcttgtcttgtagagacagggtcttgctatattgcccaggccggagtgcagtggtgatcatagctcactgtagcctcaacctcctgggcttaagctatcctcccgcttcagccttccaagcagctgagactaaaggtgcacaccaccacacccagctgattttattttattttttgtagatgtggcgtcttactatgctgcccaggctctggaactcctgggctcatgcgaacttcctgccttggcctcccagagcgctgagattacaagcaagcatgaaccactgtgcttggccccagtaaccacagtcttaaaagcagtagcagcagctaacatttattgagcacttactgtacacaagggctgttctgtcaacttgcctttattttattttattttattttttgagatggagtttcactctcgttgcccagactggagtgcagtggcagcagtctcagctcactgcaacctccacctccccggttcaagcgattctccggctgtagactcccgagtagctgggattacaggctaatttttgtatttttagtagagatggggtctcggccagactggtctcaaactcctgacctcatgtgatccacctgcctcggcctcccaaagtgctggggttacaggcatgaggcctctattttaattttcaaacagaccaccctgtaagggtggtaggtagtattttcatcacttccattttccagatggagaaactgaggcacagggcaactaaaccatttgcccaagttaacctggcttgtaagtggtagaggcgaaattcaaacccggagctctggagctttatcctgtctgcctccttttcaatcttcgcatgcccactttctccacgatgctgctttgcggtgaaagttactcacccaccattttacagatgaggaaattgaggcctagagggccaacgatgcttggggatgaaaagttttgatgcctgtaggttgcaaagcagggaatttccagactgggctcccccgactggccctggcaaatatggaagagactccaggctcaagaggggaagaaagtttcttccttatccctcaccggtctggtattggtacagtcagagggtaggggcatgttcagggaaggggtctagcgcctcctcgtggttataataatttaaaaagagggcccagcactttgggaggccgaggtgggcagatcacctgaggtcaggagttccagaccagcctgaccaacatggtgaaaccctgtctccactaaatacaaaattagctgggtgtggtggaatgcacctgtaatcccagctactggggaggctgaggaaggagaatcacttgaacctgggaggcggaggttgctgtgagcagattagctgtgtgtggtggcatgcacctgtaatcccggctactagggaggctgaggaaggagaatcacttgaacctgggaggcagaggttgctgtgggcagagattgcaccattgcactctagcctgggcaaccagagtgaaactttctcctaagaataataataacgataatttaaaaagaaactccatgatgagggccacgtattaggtggacgggggagggcctgcttacactctactggggtggaagctagggatgggggcagagagacctaatctcatgaagatgatttcagctaatgataaggtaatggccgggaagccagtaaatgtttgttgaatgagttaatgaaagacactattgggcctggcacagtggctcgtgcctgtaatcccagcactttgggaggctgaggcaggtggatcacttgaggccaggagtttgagaccagcctgggccacatggcgaaaccctgtctctactgaaaatacaaaaatttagccacgcatggtgacacctataatcccagctactcgggaggctgaggcaggagaatcacttgaatctgggaggcagaggttgcaatgagccgagattgcgccactacactccagcctggtccatagagcaagacaaaaaaaaaaaaaaaaaaagacactattgtagtctataaggagagggatgatggtggcttggatttgggtggtgaccatggacatggtgataaagggatggatttgggataaatgtcaggtgcagtcaatagagctttcaattatttattcattcaacaggtatttaaggggcatgcctatgtgtcaggtgctgcataagagaggggtcagtagtgaaccaaagaaacataaattcttgaacagacaataaagaaacaatgatgagcgggtgccatggcccacgtctgtaatcccagtactttgggaagccgaggtgggaggattgcttgaggccaggagttcaagaccagcctgggcaacatagtaaaagcccctctctgcaaaaaaatttaaaattagccaggcacagtggcacaagcctgtagttccagctacttgggaggctgaggcgggaggatcacttgagcccaggagtttgaggctgcagtgagctatgatcatgccactgaactccagcctggatgacagaagaaagagcctgggcacagtgactcaagcctgtaatcccagcactttggaagaccaaggcgggcagatcacttgaggtcaggagtttgagaccagcctggccaacatgctgaaaccctgtctctgtgaaaatacaaaaattacctgggcatggtggcaggtgccagtaatcccagctgcctgggaggctgaggtcagggaaaacctgggaggcagagcttgcagtgagctgagatcatgccactgcactccagcctgggtgacagaatgagaccctgtcaaaaaaaaaaaaaaaaaaaaaaaaaaaaagccgggcgcggtggctcacgcctgtaatcccagcactttgggaggctgaggcaggtggatcacctgaggtcaggagttcgagaccagcctgaccaacatggagaaaccctgtctctactaaaaatacaaaattagctgggcgtggtgatgcatgcccgtaatctcagctacttgggaagctgagacaggagaatcgcttgaacccaggaggcagaggttgtggtgagctgatcacaccactgcactctagcctgggcaacgagagtgaaactccgtctcaaaagaaaaaaaaagaagaaagaagcctggcgcggtggctcacgcctgtaatcccagcactttgggaggctgaggcgggcggatcatgagatcgggagatcgagaccacgatgaaaccctgtctctactaaaaatacaaaaaattagccagacgcggtggcggacgcctgtagtcccagctactcaggaggctgaggcaggagaatggcgtgaacccgggaagcggagcttgcagtgaactgagattgcgccaccgcactccagcctgggtgacagagtgagactccgtctcaaaaaaaaaaaaagaagaaagaaacaaagagagaaagaaaggaaagaaagaaaggaaggaaggaaggaaggaaggaaggaaggaagaaaggaagggagggaaagagggagagaaaggaaggaaggaaaaaaataacttaaaaaatcagatttgttggacaaagatcagggcttaacctagggaggtgggtagagctaatggaatgcggaaaaggctgtgatttgaaatgaggggatttaggaagacctcatgagaaggtagcatttgagcaaagacatgtaggggtgagggagctagccatgaagttgcttaaggtggaggacacagcccgtgcaaaggccctggggcagggccgtatgttcctggcatgttggaggaagagcgaagaggcccgtgtggctggagcacagtgaagagggggagagagggagtggggagggcagggagggaactgggcaattcaagcagggttttgtgggccttggggaggacttgggcttgtccctggaggaaagtgggagccatagagagttgtgggcagaagaagggtgtgccctgactcagatgctcacaggcaacctctggtggtggctgcagggaggacagactgtggggtacgggggctggagtcagaagaccagctgagtgatgacggggctggaccagacagaggagggggtgagaagtgggtgaattctgggtatatttcagagtgtcactgccgccgtctgcatatggaggaagctcacccatctcatagtctagctggcctgactcccccagccccccaactccccatgcccaggcctgtgtcgagtgggcggaagaaagagatgtcagattctgcatggaaggcgtggggtggggctgggctgcaggtgctcccccagctcccccccgccccatggctcctcctcctccaccccctctcagggcgacagttacaggcaaagaagaggaagtggtagcactagctgtcgctccacaggcgagcagggcaggcgtgcgggcgggtgggtggtggaggctgcgagggtgcacggccggccctgggcaggcggtagccatggagctgtggcgccaatgcacccactggctcatccagtgccgggtgctgccgcccagccaccgcgtgacctgggatggggctcaggtgtgtgaactggcccaggccctccgggatggtgtccttctgtgtcagctgcttaacaacctgctaccccatgccatcaacctgcgtgaggtcaacctgcgcccccagatgtcccaggtgagccctccgcgggcaggtgtgctgagggttggagacgggggtcctccccggggctgacagtcgaggggctgacgtgctgctccacctctgggcctgcaaaggagagggaatatgcttacaggtccagggctggcccagggggtggtcacaatctgagattctggggtggcctccccaagcttaacaggctccctgtgtgggttcacgggccctgagttggcccgcatctgggctgagaactggcaaactaggggttaactctctcaagccccaggcgcctctactgtggttcatgcccccagatgggaccaaccagaggtctcgggggagctccccagaacccccagggtggccattgggttacctgaggctttggactcctttgacccccagagtctggatgtgggggaggagcctccgccaacatcttcccccacatgtgtctcctcctcccgggccctgggccccttccttccccttacatcttccttccccttggcttcctgcctgggcctggggcagcatggggcaggtggggggctgcagccccagggatctgagcttcctccctgcatccatctcagaggagatagtaaggcagggcccagtcctgggctcagagagtgggtcctgaggtcttggtgcttggaagagctgcattttctcggcagggatttctgcaggggcccaggctggaggggtggtggtggatttgactgtggctgtatgag

SEQ ID NO: 3303 - DNA, 6000 bp, Homo sapiens
cacagctcactgcagcctcgaactcctgtgctcaagcagtcctcctgcctcagcctcctgagtagctgggactacaggtgtgcaccagcaatacctggctaattttttattttttgtagagatggggttttgctatgatgcccaggctggtcttgaactcctggcctcaagcaattcctcccgccttggctttccaaagtgctgggattacaggcatgagccactgcacccggccagaatagaggttcttatctccatcctcccataacaggaaagatgacacatgccacccactgctctatgcttgctttcctcactaatcaccttggcagtctttccaagtcagtctgtagagattataattattctttataacatgactgcgtattccatttatttcaagaaagacttacattttgctcgccctgtgctagacattagtctaaaccagggaggggcctggctggatgcagtggttcaggcctgtaatcccagcactttgggaggccgaggcgggaggattgcttgggtacaggagttagaggccagcctgggcaacagagtgtgacctcgtctctataaaaatgaaaaataaaactaaaataaagctgggggctgggtgcggtggctcatgcctataatcctagcactttggcttacaggtgtgagccaccgtgcctggcccaattatagcttctaaaaaataataaaaggccgggcacggtgactcacacctgtaattccagcactttgggaggccgaggcgggcggatcacaaggtcaggagatcgagaccatcctggctaacacggtgaaaccccgtctctactaaaaatacaaaaaattagccgggcgtggttgcgggcgcctgtagtcccagctactcgggaggctgaagcaggagaatggcatgaacctgggaggcggagcttgcagtgagccgagatcaggccactgcactccagcctgggcgacagagcaagactctgtcttaaaataataataataataataataataataataataataataataataacctcatccatgaatcattttccagctcctctgctgtgtgatcttgggcacattagtaaacctctctgtttcctggtttctcatctgtaaaatgaggatgctaaatccctatttacagcatcattgtgggggataagtgtattattataaagaacctagaaaagtgtttagctgcatatgcagttgtgtgttgcttaataaaaggaatctgttctgagaaatgcgtagttagatgatttcacagttgtgtgaacatcagagtacatttacataaacctagagggtacagcatactgcacacctgggctatatggtataacctattgctcctagctacaaacccgtacagcatgggactgcactgaatacttaccattgcattaaaagattgccttctccttttctttcttttttcttttttttttttttttgggacggagtctcactctattcctcaggctggagtgcaatgacgtgatctcagctcactggaacctccacctcctgggttcaagagattctcctgcctcagcctcccgagtagctgggattacaggcacgtgccaccacatccggctaatttttttgtatttttagtagagacagggtttcaccatgttgaccaggctggtcttgaactcctgacctcagatgatctgcccgcctcagcctcccaaagtgctgggattacacgtgatagccaccatgcccaggcgatttcttatcatttataccatattttatacaaagatttcttatctttcttttgagacagagtctcactctgtcacccaggctggagtgcattggcacgatctctgctcactgcaacctccacttcttgggttcaagtgatcctcctgcctcagcctcctgagcagctgggactacagatgcacaccaccaagcccaccattttttaaagtagagatgggggtctcaccatgttgcccaggctggtctcaaactcctggcctcaagagaccctcccacctcggcctcccaaagtgctgggatgataatcgtgaatcatcgtgctccacccagtcctcgtgtttttatttttcaaattttaagacgttttattttgtcaaccgaagtgctagccaatctttgtgtttttgatagatattgccaaattgttatccgtctgggattgtttccatatgaattatttcaattataccaccacatgccagaggactggcttctctgccgcctccccgacagacggttctgttgccaagattctggagttttgccagctggatgggaaatcagtggagctcattaaggctcagtttacattttctcttattctgagtgaagctgagcctctttccttatgtttaagagctatttatattttcttcctgtgatacaatctctgttcatatcacttgcttactattgttgcactttctagaactactgaccttttctcttactgattttttttttttttttgaggctgagtctttctctgttgtacaggctgcagtgtagtggcgcaatctcagctcactgcaacctccgcctcccaggttcaagtgattctcgtgcctcagcctcacaagtagctgagattacaggtgtgcgccaagatgcccagctaatttttgtatttttagtagagacagggtttcgccatgttggcctggccggtctcaaactcctgacctcgagtgatccacccgtcttggcctcccaaagtgctgggattacaggcatctcttactgatttttaggagctctttatatataggttgacttaaattgcaagtcaggtatttgctagctttgtggtcttggagaaaaaaataattacttaacctattggatccctgattgtcttatctataaaacaggaaatctataaaatgagaatgttggccgtgcacatggctcactcttgtaatcccagcacttcgggaggctgaggtgggggatcacctgaggtcaggagttcaagaccagcctgtccaacatggcgaaagcccaactctactacaaatacaataattagccgggtgtgctggtgggcacctgtaatcccagctactcaggagactgaggcagaagaatcccttgaacccaggaggcggaggttgtagtgagccaagattgcaccactgcactccagcctaggcaacagagtgagactccatctaaaataaataaataaataaataaataaaaataaaaataaaataaaataaaatggaaatgttgacagtacctttatttcagagttgtgtaaggattaaacatgataaggtaaatgaaattcccagcatggcaattaacatatagtgagtgctaaatgaacgagagtcattatttttgttaatttaattccattgagtcccagctgcctgtaggcaatggtatataagtcagggtacgtatgttaactgctgtaacaaattgcatcattttgccaggcacaatggctcacgcctataatcccaacactttgggaagccaaggcaaggctaatcgcttgaggccaggagtttgagactagcttgggcaacatacaagatccccatctctacaaaatatatatatatattagcagagcatggtggtgtgtgcctatggtcccggctacctaggacgctgaggcaggaggatcacttgagcccaggaattggaggctgcagtgagctatagatcgcgccgctgcagtccagcccgggtgacagagtgagatcctgtctcggaagaaaaaaaaaaaaggccaggtgcagtggctcacgcctgtaatcccagcaccttgggaggccaaggcaggtggatcatgaggtcaggagtttgaaaccagcctgaccaatatggggaaatccggtttctactaaaaatacataaattagccaggcgtggtggtgtatgcctgtagtcccagctactcaggaggctgaggcaggagaatggcttgaacctgggaggtggaggctacagtgagctgagatcatgccactgcactccagcctggtgacagagcgagactccgtctcaaaaaaaacaaaaacaaaaacaaacaaaaccaaaccctcaaaacacaaaaccaaattacatgacttcagtgatagtgagactttacttcttattgatgtcacaattcagtttgggtcaatgtcaggggttgggggaggagggctctatgttatagagtctctctagggccgaggctccatcatctcatggtcttagcttcccgaaggcccttggagtcttttctactggggaaagagcgctatgaaagaatttcccaggccaggcctggaagtggcgccatcacctccatcctttttttttttttttttttttgagacggagttttgcccttttcctccaggctggagtgcaatggcgcgatctctgttcagtgcatcacggcaacctccgcctcccaggttcaagtgattctcctgcctcagcctcccaagtagctgggattacaggcatgcaccatcacacctggctaattttgtaggggtttctccatgttagtcagggtggtctcgaactcctgacctcgggtgatccactcgcctcggcctcccaaagtgctgggattacaggcgtgagccaccatgccctgcctccattcttgttattggccagaacttggtcacatggctccatttaactacgagggagactaggaatgtggttaaactggagctggggataaaaaggagataggttggttggacgcaaagaagtcactgccgtagaacctcagggtaatgcctcactggctccagaaatgcaggtatggagcgggtttcaggaatgcaggtctagggccaggcatggtggctcatgcctgtaatctcagcactttgagaggccgagacaggaggattgcttgaggctaggaattcgagaccagcctgggcaacataccaaggtcccgtctctacaaaaaataaaaaaataagcccggcatggtggtgcacgcctatagtctcagctactcaggaagttgaggcaggaggatcgcttgagcccaggagtttgatgctgcagtgagctatgattgtgctaccactgtactccagactggacaaaagagtaagaccctgtctctaaatatatctatgcaggtctgtggaaatctcaatgggatgtagaataagaaggacctgagccaaggccatgggggaggaattcagctggggatgagggagctgggtgatagcaacttcagcaaaatgggttgggctgattggaaaacctcctcttaccttgcctgctagggccaacaggaggggcatctaggagggtcagcacttggcaccatccctttccattccattctgttccttttttttttttttttttgagacagagtttcactctctctcccaggctggagtgcagtggcacaatcttggctcacggcagcctccgcctcccgggttcaagcgattctcctgcctcagcctcctgagtagctgggattacaggcaagtgccaccacacctagctgatttttgtatttttagtagagacggggtttcaccatgttggccaagctggtctccaactcctggcctcaagtgatctacccgcctcggcctcccaaagtgctgggattacagacgtgagccaccatgcccagcctccattctattctattcactgacctcctctcttggtccagtgctgggaaatgtcacctttcaggactttcacagagatgctagaaatctctgtcccttccctactcacagcccttccctggttccccactgcccttggtgaaaaagacaaaatcctcactgtagcccacaagggcttatgcatttggcctctgtccatctctcagcccttccctgctccctctctacccattgctctctgcaccgcagccaaatcggccacccagcacaatccagcctcagggcctttgcactggctcttccttcttcagggatttctcttccc

SEQ ID NO: 3304 - DNA, 6000 bp, Homo sapiens
gacaggaaactcgggccctgcccaggcattcccgacaccttcacaccattccagccttgccccagctgtacagccttagtggctcctcagccccatcagtttgtttgtttttgtttgtttgtattgagatggaatctccctcgcccaggctggagtgcactgacacaatctcagctcactgtactctccgcctcctgagttcaagagatcctcctgcctcagcctcccgagtagccgggattataggcgtgcaccacgacgcccagataatttttgtatttttagtagaggtggggttttgccatgttggccaggctgtctcaaactcctgacttcaagtgattcacccacctcggccttccaaagtactaggattccaggcgtgagccatggcacccagccccatcagttttgccctcaagcactttggccaggctgggtccccagtgctttgcaggcctcagctgtccacattctcagggctgccccagggacagatgtaaatattatcattctccctgaacagctggggacactcaacccagagtgaccaagtcagagcaaaggccaaatggccactgaacagatcaatgacaggccaggtgcagtggctcacgcctgtaatcccagcactttgggaggccaaggcgggtggatcacttgagctcaggagttcgagaccagcctgtcaacatggcgaaaccccgtctctactaaaaatacaaaaaataggtgggcatggtggtaggcacctgtaatcccagctactcaggaggctgaggcaggagaatcatttgaacccaggaggcggaggttgcagtgagctgacactaagccactgcactccagtctgggtgacaaaacaggtgaatggcaaagaggctgagctgcccaaccagtccctggcactgggtgcccgatgcagagaggtggccagcggggcagtggcgggctggtccaggatgcaggctggggatgaaaacttcattgtctaggacacaagcaatctgttgtcttggggaaataaagagcccttgaggacacagctccgagcatttccacagaagttggtggcttcactggctgggaagcgacccccctaccccagacacgccacttggctgacagagcaggcaagcccggttggcaaaaacaaagaactggcacctctgagaagtcctaggtgccctggcctgccccatgacagtgtggtggccctgggggcccagaccctaatgctcaggcagactgagagactcttcaggggaatggtgcccccattccggcagagcctggcggagccaagcagtgcccccatccctcccctggaagctggtcctaagcatcctaggccccagggaccggcactgggggccactcttgtctcagctcttctatggggaggtgtacagagccagggcactggagggacccccattctaaatggggaagatggtatgtttgggtccccaaacagcaactggaacagcaggcccactgtgaggtctgcccaggcttgagggctgggagctgcctcaggagcctcagcacagaaagggaagcaccaggcaggccccttccctggggacaggggccaccttgtccttgggcaggggaggggtggacaagacccagaggacagggcctggggcagctgcggcccgtttcccccacgacccatgtcctccagggccaggtgagccctgattggccagggcctctagggtaggggaagggctctgagaggacctcagtggcccttggggacacagctgcaaccatggagtaccgagtccatcagaaaagaaatctggggtcccacggcaattagtggcaggctatgaaaatggcccatggctaaaggagaaaatgttaggaggataaatgtgaggctctataattaggtacaaatcaacagtgtcattcctgggggaaggaaagaacattcacgaaggaaaacaaatggcacacggggcatcacccgggggatctgctggccttggccgctgaagtcaagggagccagtgcgtgatgtggccaccaaaaaaaaaaaaaaaaatgcagaggccaggcacggtggctcatgcctgtaatcccagcactttgggaggccgagacaggtggatcacctgaggtcaggagttcaagatcagctggccaacatggtgaaaccccgtatctactaaaatacaaaaattagccgggtgtggtgggtgcttgtaatcccagctactcgggaggctgaggcaggagaatcgtttgaacccgggagacggaggctgcagtgagccgagattgcgccactgcactccaggctgggtgactagagtaaaattctgtctcaaaaaaaaaaaaaaaaaaaaaagaaaagaaaaaggaaaagaaaaatattgaaagagaatagaggaggtcctctgatgaggcacagctgtgaaggtgagacggcagatgaccagtttgggaaaagctgaacttgtgggttagatttttgctaccaactagcttgagaaggtcagcagggcacctgctagactcagtaaaaggaggccagtgtggggagggcagcagggcaggcaccgcccccccccaccccacaccgcctgcccgccaaatgccagatgccgcagaagctaaatcagtgtttccaggaagcagtctctgcagacaagtcccgggaaccacacagcctctccattgctcctgacccagtaactgttctgctgggaacgcacttcaaggaaataatctaaagggcaaaaccatgacttgagcaagcactcggagctgggtcatttaacacagcaaaagggcaaaaataacaagcaggggataaccacagaaacctggatggggcatgtggggagcaacacccctgccctggcagtgccacgtctgggtgggtgcccagccaggacctgggagcagctgcctcacggtgggctgagtggagatggcacccgatcagcaggacccaaagtttagtccccctgtctccagacggccccttagaatcccagtctccaaaacccttccaaagcttcctcctgccacgaggggcgagaccttgggccgggcacctgctgaccacagagcctcacccaccagtgacattatcaacctgtgtgcagctgccagagccctcagtgccacaggacgactctaggcccttgtagaggcacttcctctccctccccccggaaggctttcgccacacggacagcccaggtggggagacctctgcctcattccccacaatcagaagacgctggatgagaccagacacaaggcccagctaggcctggtgcaagccacagagcacactcggaggaacggctcagcgaggtgaggataccaacagctgatgtgcgacgcaggccctcatagagcaggccgcagggtgaaggcaccttggatccaggggttagccctcaagggctgccattgtcagccagggagcccagcaaccagggcagaccactaggccaaagtgtagctgggcacagaaggctcagctgagaaacaagggactccggcttcctccagctgtccctaaatgggcaatggctgcctgatctacctaggccttatgtgatgctcctagagccccctcagtccctcgggcggggaagaccctccagcaggctggctggggccccggccatcagtgcgcacgtgttggaagaagttggtccaacaacccaaagtcccagatgctggccacaagccccctaagacacgcttcctaagtggtaaggcctacaggtggcctgggctcaatcgggttccaacacttataaactgtgtctttgtcactctgggcctcagtttcccaacgtgtaaaaagagaggctggttagtatcaacctcaaagggctgcagtgaggattttagttaattcgggtaaagtgctcagaaaagtgcaagtactggcttagcactgttgagagttctgagtgaagagatggaattcttgctgcacacacgggtgcctttccactcaatcccagctttgcaccccaatccaaggctcccaccaccacacacctcacccccaggccctcatctcggcccagcccccattgcctgccccgcctctcccgggccccacccccaaacacgctgccccaatcaggacaagcctcgtgagagccccgcctccgtttgcccaggcccaacccacctattggtcacgcccatcacgccttagccccgcccctaaaaaccccgcccccatcccgaatcacgctttcagcccagcccggcccgccaaatcttgggaaagctccaccccctgcggaggccccgccctaacagcctctcccaccgctccgggccccaccccctctaggctctggccccgccccggcgcgtcctaggtcccccaggtctctccgggcctccggctccgtatagccgcgcatcctagcccgaagctgatgctgcccggtcggctccggccttcccggctgcctgacccgccgggccccaagccccgggctccggcctgggcccagcggcctggagcgcggccttggcccgtctgcccgccgcctcgccgccacgacttcgcccgtctgtgccccaccggccgcacctttgaataggtagtcgtactcgtcgtcccgggtccccattgtcctggcgcttccggcgggatcggcgactccgcagccccaccacaaacacccgacgggggcggagccggcgccgcgcagagcggcggttgaatggcctatcagcggcgagtggagtagcgacgggcacccagcgaagccaatcagagatggaagtagtgctctgagggtgggcgccgcttggtaccaccctcctcgccctcggtgtcctggagaaaggcggaaggaatgcggacctttttgaagtgacggacgcgccagcctatcaggggcgagctcaagagggcggggcggaagactgcaggaatgaaatggattgacagaccaaataactaatgagaggcttgattgagaacctacccgactatcagaggacctgtccgggaagagaaatggggctacgtccaggtaatgctacgatgcttaacgtcccgatgacgtcataggtcagcgcgcgctgccctggtcgccccccaagcccataaatgaccatttccggggacctcagcgctgggtcccctttctcggttgcagtctccatctctatattgggactcactgggttatccttctgtgcctcagtttcctcctctgtaaactgaagaaacccgtctcatggaatcttttgaaaataaccagatcagccaggcgcggtggctcacgcctgtaattccaggactttgggaggccgaggctggcggatcacgaggtcaggagttcgagaccagcctgaccaacatggtgaaaccccgtttctactaaaaatacaaaaattagtcgggcgtggtcgctggtgcctgtaaacccagctactcaggaggttgaggcaggagaatcgcttgaacctgggaggtggaggttgcagtgagccgagattgcaccaagtgtgaatcaaccgtccactttctgctattctttgttaaataaatacttttaaatccttactggataccaatgctctccaacaggacctcctaccactacccctcttttgtcctatattttgccacataggtaaaatataaaaataggtaatatagaaaataaaacacatactgctgtattgtcaggtagtgataggatttatcactacctgacaatacagtatgtgtttgttttatatatttagggtgtacagcgtgtgttttgatacacatgtacccagtgaaataataattatgacagtttttttttttttttttgagacggagttttgctgtcgttgcccaggctgaagtgcaatggtgtgctctcggctcactgcagcctctgcctcccgggttcaagcgattctcatgcctcagcctcccgaatagctgggattacaggcatgcaccaccatgcttggctaatttttttgtatttt

SEQ ID NO: 3305 - DNA, 6000 bp, Homo sapiens
tctgctcaaacatgccagttgtttccactcagccaaatcttaaagtacttacagaatcaggaagcagccatctataccaattctaagttaatatggactgaacaaggtcttactaatagcaaagaataattgaaatcccaaacttacaaggttttcaacaaaagtaaagtttgctaaaaaagttaacagtgtaacatgtattatcctaacttctaatcttatggaaatcagaccgtatctgtgcccctcaaagctcaagtctatcagcgcagggccatacaactaatatccctacttatagggttaggaatggctactgctacaggaaccggaatagccagtttatccacttcattattctactaccatacaccttcaaaggatttctcagacagtttgtaagaaataacaaaatctatccttactctacaatcccaaatatactctttggcagcagcaactctccaaaaccactgaggcctagacctcctcactgctgagaaaggaggactctgcaccttcttaggggaagagtgttgtttttacactaaacagtcagggatagcacgagatgccacctggcatttacaggaaaaggcttctgaaatcagacaatgcctttcgaactctaataccaacctctggagttgggcaacatggcttctcccctaggtcctgtggcagccatcttgctcttactcacctttgggccctgcatttttaaccttcttgtcaaatttgtttcttctagaatcgaggccatcaagctacagatggtcttaaaaatggaaccccaaatgagttcaactaacaacttctactgaggacccctggaccgacccactggcccttccactggcctaaagagttcccctctggaggacactacaattgcagggccccttcttccagcaggaagtagctagagtggtcatcggccaaattcccaacagcagttggggtgttctgtttagaggggtgattgagaggtgaagccggctgggcttcttggttgagtagggacttggagaacttttctgtctagctaaaggattgcaaatgcaccaatcagcgctctgtgtctagctaaaggtttgtaaatgcaccaatcagcgctctgtgtctaactaatcgcgtaggggacttagagaactttcctgtctagctaaaggattgtaaatgcaccaatcagcactctgtgtctagctaaaggtttgtaaatgcaccaatcagcactctgtcaaaacggaccaatcagcactctgtaaaacggaccaatcagcactctgtaaagtggaccaatcagctctctgtaaaatggaccaatcagcaggatgtaggtggggccaaataagggaataaaagcaggacaccgcagccagcagcggcaacgtgcttgggtccccttccatgctgtggaaactttgttctttcactcttcccagtaaatcctgctgctgctcactctttgggtgcgcactgcctttatgagctgtaacactcaccgcaaaggtctgcagtttcactcctgaagtcagcgagaccaaaagcccaccagaagcaagaaactctagacatgtctgaatatcagaaggaacaaactctggacacaccatctttcagaaccgtaacactcaccggagggtctgtggcttcattcttggagtcagcaagaccaagaacccaccaatctggacacaggatgtgttatacaaaacttataggaggctattactttggactgacttcctacaccaggcccaacaaactaaaccaaaatggagtcactcatgctaaagttttacgtgatcaaaaagaaactaagttgtttatctgaccttctacaaaatcaggagagagagagatgggatagccaagtctcccaccaggtcagttttagccatcatgataaggatgtcctctctgctttaacctttacaagaaaagtaactttgggctgagtgcggtggtggctcatgcctgtaatcccagcactttgggaggccaaggcaggaggattgcttgagttcaggagttcaaatccagcctggccaacaaggcaagaccctgtctctggaaaaaaaaaattagctgggcatggtggcacacacctgtgatcctagctcctcaggaggctgaggtgggaagattgcttgatcccaggaagttgaggttgcagtgagctatgatcgcaccactgcactccagcctgggtgacagagcaagactcagactccaaaaggaaactttaaaatgaccaatccaagttttcttttctttttttctttttttttgagtcggagttttgctctgctctcccaggctggagtgcaatggtgtgatcttcgctcactgcaacctccgcctccctggttcaagtgattctcctgcctcaacctcctgagtagctgggattacaggcacctgccaccgcgcccggctaatatttttgtattgttagtagagatagggtttcatcatcattatcatgttggtcaagctggtctcgaactcctgacctcgggtgatctgcctgcctcggcctccaaagtgctgggattacaggcatgagccactgcacctgacctccacgttttattttctgtttgtgctttacttggccctttttctgcctgtaaaaccaacctacctgctcagctcatgggaaaattagtttcattttgtgaaatgaagtgttgcccgattgtagaattgcaaataaaatcaattaagatctttaaactaaatgtgttgtaattttgtttttttgacagatgcccaatgaacaccctgggaatgagatccaagaggcgataatggcatctgctctaataactagtacattgactctaggcttagattattcaccactgaataaataaacgtatttattcagcagtggggaacttacagcaatgatggggacagatacagtccctgatgtcatcaggctgatatgctgctgacagaggacaaaaaacaaacagatcaatgggtcaggaaagcaaggcttttttttttttgagacagggtcttgctctgttacccaagctggagtgcagtggggtgatcatggctcactgcagcctcgatttcccaggctcgaatgatcctcccgccttggcctcccaagtatctgggaccctggcatgatgcaccacatctggctaatttttgttgttgttcttttcttttttttccttttctcttttttttcctttttttctttttttttttttttttttgagagactgggttttgacatgttgcctaggctggtctctagctcctggcctcaagtgatcctcccacctcagcctcctcaaagggcatgtttttaggcataagccaccgcagccagccaaaacaaacaaacaaaaagtaacgtatactttgtgttaataattttgcatagtatattgaaaatttgccaagaaagtacattttagatactctcactacacacacagttaattatggaaggcaatggataggttaattgcttaactctcataattggccatgtgtggtgaaaatgcctgtaatcccagcactttgggaggccaaggtgggcgaatcacctgaggtcaggagttcgagatcagcctgaccaacatggagaaaccccgtctctactaaaaatacaaaaaaattagccaagcatggtggtgcatgcctgtaatcccagctattcgggaggctgaggcatgagaatcgcttgaacccgggaggcagaggctgcagtgagccgagagcacaccattgcacttcagcctgggcaacgacagcaaaactccgtctcaaaaaaaaaaaaaaaaactgtcataattattatttcactgggtacatgtgtatcaaaacacacgctgtacaccctaaatatataaaacaaacacatactgtattgtcaggtagtgataaatcctatcactacctgacaatacagcagtatgtgttttattttctatattacctatttttatattttacctatgtggcaaaatataggacaaaagaggggtagtggtaggaggtcctgttggagagcattggtatccagtaaggatttaaaagtatttatttaacaaagaatagcagaaagtggacggttgattcacacttggtgcaatctcggctcactgcaacctccacctcccaggttcaagcgattctcctgcctcaacctcctgagtagctgggtttacaggcaccagcgaccacgcccgactaatttttgtatttttagtagaaacggggtttcaccatgttggtcaggctggtctcgaactcctgacctcgtgatccgccagcctcggcctcccaaagtcctggaattacaggcgtgagccaccgcgcctggctgatctggttattttcaaaagattccatgagacgggtttcttcagtttacagaggaggaaactgaggcacagaaggataacccagtgagtcccaatatagagatggagactgcaaccgagaaaggggacccagcgctgaggtccccggaaatggtcatttatgggcttggggggcgaccagggcagcgcgcgctgacctatgacgtcatcgggacgttaagcatcgtagcattacctggacgtagccccatttctcttcccggacaggtcctctgatagtcgggtaggttctcaatcaagcctctcattagttatttggtctgtcaatccatttcattcctgcagtcttccgccccgccctcttgagctcgcccctgataggctggcgcgtccgtcacttcaaaaaggtccgcattccttccgcctttctccaggacaccgagggcgaggagggtggtaccaagcggcgcccaccctcagagcactacttccatctctgattggcttcgctgggtgcccgtcgctactccactcgccgctgataggccattcaaccgccgctctgcgcggcgccggctccgcccccgtcgggtgtttgtggtggggctgcggagtcgccgatcccgccggaagcgccaggacaatggggacccgggacgacgagtacgactacctattcaaaggtgcggccggtggggcacagacgggcgaagtcgtggcggcgaggcggcgggcagacgggccaaggccgcgctccaggccgctgggcccaggccggagcccggggcttggggcccggcgggtcaggcagccgggaaggccggagccgaccgggcagcatcagcttcgggctaggatgcgcggctatacggagccggaggcccggagagacctgggggacctaggacgcgccggggcggggccagagcctagagggggtggggcccggagcggtgggagaggctgttagggcggggcctccgcagggggtggagctttcccaagatttggcgggccgggctgggctgaaagcgtgattcgggatgggggcggggtttttaggggcggggctaaggcgtgatgggcgtgaccaataggtgggttgggcctgggcaaacggaggcggggctctcacgaggcttgtcctgattggggcagcgtgtttgggggtggggcccgggagaggcggggcaggcaatgggggctgggccgagatgagggcctgggggtgaggtgtgtggtggtgggagccttggattggggtgcaaagctgggattgagtggaaaggcacccgtgtgtgcagcaagaattccatctcttcactcagaactctcaacagtgctaagccagtacttgcacttttctgagcactttacccgaattaactaaaatcctcactgcagccctttgaggttgatactaaccagcctctctttttacacgttgggaaactgaggcccagagtgacaaagacacagtttataagtgttggaacccgattgagcccaggccacctgtaggccttaccacttaggaagcgtgtcttagggggcttgtggccagcatctgggactttgggttgttggaccaacttcttccaacacgtgcgcactgatggccggggccccagccagcctg

SEQ ID NO: 3306 - DNA, 6000 bp, Homo sapiens
taagacaacggggctggcattctctcacgtcaccatgggtgccccgcacagggctaccaagtggacttcagagaaagacagaaagatggccgggtacagtggctcatgcctgtaatcctgtaatcccagcacttggggaggccgaggcaggcggatcatttgaggtcaggagtttgagaccaacctgactaacatggtgaaaccccgtctctatgaaaaatacaaaaattagccgggtgtggtggtggaggctgaggcaagagaatcatttgaacctgggaggcggaggttgcagtgagccgggatcgtgccactgcactccaagctgggcgacacagcgagactccatctcaaaaaaaaaaaaaaaaaaaagaaagatggaaagaggtggagtgaatgtaggcgtgtggcccagcacctcccaaccaagccagtagggatgagaatcggctcccaggccactgggggccaagatggactcactgtgagggcccccatctacaccaccaaccttaacctcctttccacggcagctacgggagcctggccaaggccagggaggtctgctcagttctcacgtcctcaggaaataagacaggaaactcgggccctgcccaggcattcccgacaccttcacaccattccagccttgccccagctgtacagccttagtggctcctcagccccatcagtttgtttgtttttgtttgtttgtattgagatggaatctccctcgcccaggctggagtgcactgacacaatctcagctcactgtactctccgcctcctgagttcaagagatcctcctgcctcagcctcccgagtagccgggattataggcgtgcaccacgacgcccagataatttttgtatttttagtagaggtggggttttgccatgttggccaggctgtctcaaactcctgacttcaagtgattcacccacctcggccttccaaagtactaggattccaggcgtgagccatggcacccagccccatcagttttgccctcaagcactttggccaggctgggtccccagtgctttgcaggcctcagctgtccacattctcagggctgccccagggacagatgtaaatattatcattctccctgaacagctggggacactcaacccagagtgaccaagtcagagcaaaggccaaatggccactgaacagatcaatgacaggccaggtgcagtggctcacgcctgtaatcccagcactttgggaggccaaggcgggtggatcacttgagctcaggagttcgagaccagcctgtcaacatggcgaaaccccgtctctactaaaaatacaaaaaataggtgggcatggtggtaggcacctgtaatcccagctactcaggaggctgaggcaggagaatcatttgaacccaggaggcggaggttgcagtgagctgacactaagccactgcactccagtctgggtgacaaaacaggtgaatggcaaagaggctgagctgcccaaccagtccctggcactgggtgcccgatgcagagaggtggccagcggggcagtggcgggctggtccaggatgcaggctggggatgaaaacttcattgtctaggacacaagcaatctgttgtcttggggaaataaagagcccttgaggacacagctccgagcatttccacagaagttggtggcttcactggctgggaagcgacccccctaccccagacacgccacttggctgacagagcaggcaagcccggttggcaaaaacaaagaactggcacctctgagaagtcctaggtgccctggcctgccccatgacagtgtggtggccctgggggcccagaccctaatgctcaggcagactgagagactcttcaggggaatggtgcccccattccggcagagcctggcggagccaagcagtgcccccatccctcccctggaagctggtcctaagcatcctaggccccagggaccggcactgggggccactcttgtctcagctcttctatggggaggtgtacagagccagggcactggagggacccccattctaaatggggaagatggtatgtttgggtccccaaacagcaactggaacagcaggcccactgtgaggtctgcccaggcttgagggctgggagctgcctcaggagcctcagcacagaaagggaagcaccaggcaggccccttccctggggacaggggccaccttgtccttgggcaggggaggggtggacaagacccagaggacagggcctggggcagctgcggcccgtttcccccacgacccatgtcctccagggccaggtgagccctgattggccagggcctctagggtaggggaagggctctgagaggacctcagtggcccttggggacacagctgcaaccatggagtaccgagtccatcagaaaagaaatctggggtcccacggcaattagtggcaggctatgaaaatggcccatggctaaaggagaaaatgttaggaggataaatgtgaggctctataattaggtacaaatcaacagtgtcattcctgggggaaggaaagaacattcacgaaggaaaacaaatggcacacggggcatcacccgggggatctgctggccttggccgctgaagtcaagggagccagtgcgtgatgtggccaccaaaaaaaaaaaaaaaaatgcagaggccaggcacggtggctcatgcctgtaatcccagcactttgggaggccgagacaggtggatcacctgaggtcaggagttcaagatcagctggccaacatggtgaaaccccgtatctactaaaatacaaaaattagccgggtgtggtgggtgcttgtaatcccagctactcgggaggctgaggcaggagaatcgtttgaacccgggagacggaggctgcagtgagccgagattgcgccactgcactccaggctgggtgactagagtaaaattctgtctcaaaaaaaaaaaaaaaaaaaaaagaaaagaaaaaggaaaagaaaaatattgaaagagaatagaggaggtcctctgatgaggcacagctgtgaaggtgagacggcagatgaccagtttgggaaaagctgaacttgtgggttagatttttgctaccaactagcttgagaaggtcagcagggcacctgctagactcagtaaaaggaggccagtgtggggagggcagcagggcaggcaccgcccccccccaccccacaccgcctgcccgccaaatgccagatgccgcagaagctaaatcagtgtttccaggaagcagtctctgcagacaagtcccgggaaccacacagcctctccattgctcctgacccagtaactgttctgctgggaacgcacttcaaggaaataatctaaagggcaaaaccatgacttgagcaagcactcggagctgggtcatttaacacagcaaaagggcaaaaataacaagcaggggataaccacagaaacctggatggggcatgtggggagcaacacccctgccctggcagtgccacgtctgggtgggtgcccagccaggacctgggagcagctgcctcacggtgggctgagtggagatggcacccgatcagcaggacccaaagtttagtccccctgtctccagacggccccttagaatcccagtctccaaaacccttccaaagcttcctcctgccacgaggggcgagaccttgggccgggcacctgctgaccacagagcctcacccaccagtgacattatcaacctgtgtgcagctgccagagccctcagtgccacaggacgactctaggcccttgtagaggcacttcctctccctccccccggaaggctttcgccacacggacagcccaggtggggagacctctgcctcattccccacaatcagaagacgctggatgagaccagacacaaggcccagctaggcctggtgcaagccacagagcacactcggaggaacggctcagcgaggtgaggataccaacagctgatgtgcgacgcaggccctcatagagcaggccgcagggtgaaggcaccttggatccaggggttagccctcaagggctgccattgtcagccagggagcccagcaaccagggcagaccactaggccaaagtgtagctgggcacagaaggctcagctgagaaacaagggactccggcttcctccagctgtccctaaatgggcaatggctgcctgatctacctaggccttatgtgatgctcctagagccccctcagtccctcgggcggggaagaccctccagcaggctggctggggccccggccatcagtgcgcacgtgttggaagaagttggtccaacaacccaaagtcccagatgctggccacaagccccctaagacacgcttcctaagtggtaaggcctacaggtggcctgggctcaatcgggttccaacacttataaactgtgtctttgtcactctgggcctcagtttcccaacgtgtaaaaagagaggctggttagtatcaacctcaaagggctgcagtgaggattttagttaattcgggtaaagtgctcagaaaagtgcaagtactggcttagcactgttgagagttctgagtgaagagatggaattcttgctgcacacacgggtgcctttccactcaatcccagctttgcaccccaatccaaggctcccaccaccacacacctcacccccaggccctcatctcggcccagcccccattgcctgccccgcctctcccgggccccacccccaaacacgctgccccaatcaggacaagcctcgtgagagccccgcctccgtttgcccaggcccaacccacctattggtcacgcccatcacgccttagccccgcccctaaaaaccccgcccccatcccgaatcacgctttcagcccagcccggcccgccaaatcttgggaaagctccaccccctgcggaggccccgccctaacagcctctcccaccgctccgggccccaccccctctaggctctggccccgccccggcgcgtcctaggtcccccaggtctctccgggcctccggctccgtatagccgcgcatcctagcccgaagctgatgctgcccggtcggctccggccttcccggctgcctgacccgccgggccccaagccccgggctccggcctgggcccagcggcctggagcgcggccttggcccgtctgcccgccgcctcgccgccacgacttcgcccgtctgtgccccaccggccgcacctttgaataggtagtcgtactcgtcgtcccgggtccccattgtcctggcgcttccggcgggatcggcgactccgcagccccaccacaaacacccgacgggggcggagccggcgccgcgcagagcggcggttgaatggcctatcagcggcgagtggagtagcgacgggcacccagcgaagccaatcagagatggaagtagtgctctgagggtgggcgccgcttggtaccaccctcctcgccctcggtgtcctggagaaaggcggaaggaatgcggacctttttgaagtgacggacgcgccagcctatcaggggcgagctcaagagggcggggcggaagactgcaggaatgaaatggattgacagaccaaataactaatgagaggcttgattgagaacctacccgactatcagaggacctgtccgggaagagaaatggggctacgtccaggtaatgctacgatgcttaacgtcccgatgacgtcataggtcagcgcgcgctgccctggtcgccccccaagcccataaatgaccatttccggggacctcagcgctgggtcccctttctcggttgcagtctccatctctatattgggactcactgggttatccttctgtgcctcagtttcctcctctgtaaactgaagaaacccgtctcatggaatcttttgaaaataaccagatcagccaggcgcggtggctcacgcctgtaattccaggactttgggaggccgaggctggcggatcacgaggtcaggagttcgagaccagcctgaccaacatggtgaaaccccgtttctactaaaaatacaaaaa

SEQ ID NO: 3307 - DNA, 6000 bp, Homo sapiens
cccgactgggaatttatggtttcctatccccttccacacatttttctggccacaaggcaagaaactatctctgcatctcagatttctctatttactctggccttcccttgcctgcattatgtttcatagacgtgggtaagtgagacctgacaggtgtttcaagaataatctcacagacaggaggggattatgggtaactagaacttcacagactgtttttttttccttttatttatttattttaatgaaacaggctcagaaggtattcaaatacttaaaacagatagagatggtgttatagcaatgtgagaatggcaaaaacatttttcctaattaaaaaaaataggctgggcgcagtggctcatgcctgtaatcccagcactttgggaggctgaggtgggtggatcacgaggtcaggagcgcgagaccatcctggctaacatggtgaaaccccgtctctactaaaaatacaaaaattagctgggtgtggtggtgtgcgcctgtaatcccagctatttgggaggctgaggcaggagaattgcttgaacccaggaggcggagattgcagtgggccaaggtcacgccattgcactccagcctgggcaacaagagtgaaactcagtctcaaaaaaaaaaaaaaaaaaaaagatgagggtctttgctgtgttgttcaggctggtcttgaactcctggcttcaagtgatgctcccacccccatctctgaaagcaccgggattacagattacaggcatgagccaccatgcctgccttcaaagactttttgttttgttttgtttgtttttgagacagggtcttgctctgtcgcccaggctgcagtgcagtggtgcaatcttggctcactgcaacctctccttcccgggttcaagcaatcctcatgcctcagcctcctgagtagctgggattacagggggacagcccccacacctggctaatttttgtatttttagtagagacggggttttgcccatgttgcccaggctgtccttgaactcctggcctcaagtgatccactcacctcagcctcccaaagtgctgggactataggcatgagccactgcgcccagccactcaaagactttttattcaccctctgtgggtccaatgtcagcttcaggcgtctgggctgtggccactgaggaaagagatcctgctctggggacttccagtctgagtatcagaggagaagaggctcgggaggttttgcggggggatagaggaggtggggatggagcctttccttcagagctgccagtttcagagtagaagagctggagttctgctttgggtccctcagtctgggttcaaggaaagagggggaggcaggttttttgatccagtgctgtccccacccccacccctgtgctgttgaggatgcagaaagaccctccctagggcccctctggcctcccaggcatggctcaccttctcctctgctctccctgccagctttacctgctgttcctgagccttacgctggccactgtcaacgcccgctggctggaaccccgcaccacagctgccatgtgggccctgcaaaccgtggagaaggagcgaggcctgggtggggaggtaccaggcagccaccagggtcccgatccctaccgccagctgcgagagaaggaccccaagtacagtgctctccgccagaatttcttccgctaccatgggctgtcctctctttgcaatctgggctgcgtcctgagcaatgggctctgtctcgctggccttgccctggaaataaggagcctctagcatgggccctgcatgctaataaatgcttcttcagaaatggctgctgtcttttttttttcccccatgagaagcagggggaggggcaggcaagggtagagccaagagcctcagtttccccattcatgaagcatgatggtttggagtgtcagccattttatcctgtaagcctctcctataatgatgcccatttattgagcacctgctgtataccagacatgttgttaaccactgacatatcatgtattatttgttttgttttgttttgttttgttctgttttgagacggagtttcactcttgttgtccaggctggagtgcagtggtgcgatctcagctccctacaacctctgcctctgggttcaagcgattctcctgcctcagcctcctgagtagatgggattacaggcatccgccaccatgcctggctaattttttgtatttttactagagacagggtttctccatgttggtcaggctggtcttgaactcccgacctcaggtgatccacccgccttggcctctcaaagtgctaggattacaggcatgagccaccatgcctggctgttttgtctttttttttttttttttttttgagacagagtcttgctctgttgcccaggctggagtgcaatggcatgaccttggctcactgcaatctccgcctcccgggttcaagcgattattctgcctcagcttcctgagtagctgggattacagacacctgccaccacgcccatctaatttttgttatttttagtagagacggagtttcactgtgctggccaggctggccttgaattcccgacctgaggccatctgctcgcttcggcctcccaaagtgctgggattacaggcgtgagccaccacgcccagcctgttttgtcttgtttttgacagggtcttgctctgtcacccaagctggagtgaagtggcgtgatgatagctcattgcagcctccaactcctggactcaagcaatcctcccacctcagcctccaaagtagctcggactacgggcgccagccaccaggcccagatggttctgatcctagaggacaatcatatttcccaccctactgacattgggggtggccatgtgacttgctttggccaatgaaatgtgagcagaggtggcatgtgtcccttccaaggagaagtattacaaaacagtacataatttgctgcattttcacttcacaaaacaaccatcatgggaaccaaaccttagctgttggggccgtgaagtctttgggagtgcttgttactaagcataacccagcccttcctaactaatgcacttcatcctcattcatccacgtggcagctcttgaggcagctacttttgttcccacgaggcagtgggggctcagagaagttcagcaaattgagtaaggtggaattgctgggattccaacaccagcaaaacctgggtatttcacaaagggatccaacccactttaactttctttatttagagataaagtcttgccctgtcacctaggctggagtgcagtggcacagtcataacctactgaagcctctctctctcccaggctcaagcaatccccctgcctcagcctccggagtagctaagactacatgtatgtgcccccatggtcagctaatttttttttcttttttctttttttctttttctttttttttttttttttttttttgtggccagctaattttcaaaaaaattttttgtagagttgggatctctatgttgcctaggctggccttgaactcctgagctcaaggaatcctcctgcctcagcctcccaaagggctgggattacaggcatcagacactgtgcccagcctcatttattttttaatttttttttttttttttttgagacagagtctcactccatcgtctaggctggagtgcagtggcgcgatctcggctcactgcaacctccacctcctgggttcaagcgattctcctgcctcagcctcccaagtagttgggattacaggtgtgcaccaccatgctcggctaatttttgtatatttatttatttatttgagacagagtttcgctctttttgcccaggctggagtgcagtggcgtgatctcggctcactgcaacctccgccttccgggttcaagcaattctcctgcctcagcttccagagtaactgggattacaggcatgcgtcaccacgcctggctaattttgtattttttagtagagacagggtttcttcacgttggccaggctagtctcgaactcccgacctcaggtgatctgcccacctcggcctcccaaagtgctgagattacaggtgtgagccaccgtgcccagcccctaatatttgtatttttttttttttttttttagtagagatgaggtttcaccatgttggccaggctggtcttaaattcctgacctcaagtgatccgcctgccttggcctcccaaagtactgggattacaggcataagccaccgcgcccagctctcgtttatttttatttatttgaaacagggtcttgctctgttgcccaggctggagtgctgtggtgcaatcaaggctcactgcagcctcgatgtctccagcaatcctcctgcctcagcctcccaagtagctggggttacagacgcacgccaccacacctggctaatttttgttatttttagtagagatgaggtctccttacgatgcccaagctggtctcaaactcctggcctcaagtgattctcctgcctcggcctcccaaactgctgtaattacaggccaccgcgcctggcctagcctactttaaggccggcactgcacttgacaaacactaactcagatcagaatcctcccacaactctgtgaggttgggtactctcgctatgagctacttgacggatggggaaactgaggctcaaagaggttaagtaacgcgtccaaagccacaagactagaaagtggtggagctgggactcgaaccaggcccaagactctatgcttttaacagccgtgcgtatagtagaagctctttacaagcagctgggaaaatgagatgttgcttggctaggacgggctctagacgcttggtgcagcttccagcccctcccacccgctctctgaaagccccgcccaagactcggcccctcttcgtcctcccccatcccccgctccgggaacggcccttcctccgccttctgggcggagcccgcgcgggatccgggtggctgcaggctgctggcttctgcggctgcggggtcggggtcgcggccagggccaagccgcagcgagttcacaggcggaacccctgcaggcggcgccccctacgcgaggtcacccctgggaaggagcgcagcccacccggcccctccgcatccgagcaggtctgtggggtacgggggtttgggaggaaggtagggggtctggggaacaaaggcggggctgcggggaacgcctctgccctcgcccccacccagctgggcacttgggaagcgctgatggggcgcgggcggggcagagagcccagctggggacaggcgttgggaccatatggtgatgggggaaactcctgagtccacctgcattggctggggcgccccaaatctagtgaaggggaacagaggcgagccctccggggccaggcttgagggagggtcggcagatggttagaaagaggcgggaccgactgacacaggtgagctaaggctgggggaggtgggggccccagccttgcggccctgccctgcgtggggaaaggtttcctgcctcttctcttcccctccttaaactcgttctcctggaacacggggtggggccggttgggtcctggtttaaaatggaaaaaagccccaaaggcagttgagaaatagctgtgccagggctgtctctgcctctgccccgcctgcatccaggccttctgcagcctctccgtgcggttcccgcagcggccatagacagctggggaaactgaggcctgggagaggttatgagggttgagggagcaccttggactcggatgaagcagcatgttggagtgtgggcagattcaaggagcctagccgtgggacagattgcctggaaagaccaagggtgggcggcagtggtcgtggtggtggggttgtgttaattaagtggctgggatcgtttccttgggtataaggactctcactcctgcctccgtggactggggctggagtgagtcagccttgggcagaaggagacaggcctggcccctttgacaaatagaaaatagcagtacccattt

SEQ ID NO: 3308 - DNA, 6000 bp, Homo sapiens
ctcccaccctcctcgtggggccggcctggcgccagtggggcggcttgagggggtggtgcccaggccacaagggtgacactggcagaggcctggaaccggctgtaccagcttggctgggcccccgccctccctgtctggcccaatctccaccccgtgctcaaacacccatgcagagtgtttggaggaaccctactcccacatgctggcctgtccacagagacccgtgcccctctgtctgtgccccaccacatttctcccccaattaaaggagaccctcagtggggtgcggtggctcacacctgtaatcccagcactttgggaggcccaggtgggaggatcccttagggccaggacttccagaccagcctaggcaacagaatgagaccctgtctcaataaaatataaaaaaataaaacttagcagttgtggtgtgcttgtagtcccagttactctggaggctgaggcaggaggatcgcttttacccaggagttcagggctgcagcgagctatgattgtgtagctgaactctagcctgagcaacagagtgagatggtcttgttttgttgcccaggctggagtccagtgtcaagatcatggctcatgtgatcctcctgcctcagccttcggagtagctggaactacaggcacaccctcctgacctcagctaatttttaaatttttttgtagagatgggggtcttgctgtgttccccaggctggtctcaaaaatttctgggctagggctgggcgaggtagatcatgcctgtaatcccagcactttgggaggctgaggcgggcagataacttcaggtcaggagttcgagaccggcttggccaacatggtgaaaccccatctctactaaaaatacaaaaaattagcctggcgtggtggcatgcgcctgtaatcccaactattcgggaggctgaggcagaagaatagcttgaacctgggaggtggaggttgtagtgagctgatattgtgccactgcactccaccctgggcgacagagtgatattttgtctcaaaaaaacaaaacaaaacaaacaataaaaaaaaactcctgggctcaagtgatcctccccctcggcctcccaaagtgctgagattatagacgtgagccactgtgtttggccaaagtgaggttctctttaaaaaaacaaaaaaagggccgggcatggtggcccacgcctgtaatctcagtactttgggagactcaggcgggctgatcacaaggtcaggagttcgagaccagcctgaccaatatggtgaaaccccgtctgtactaaaaatacaaaaattagctgggcatggtggcatgcgcctgtaatcccagctactcaggaggctgaggcaggagaatcgcttgaacccaggaggcggaggttgcagtgagccaacatcatgccattgcactccagcctgggcgacagagcaagactccatctcaaaaaacaaacaaacaaacaaacaaacaaaacaccaaaaaaagaggcccttcatgagacggcctgcagctggtactgcatacatgcttctctggttgtcattattcacaacacagtggctaatgctctgaagccagacagcttggattatatctcaactctagtgcttctagctgttggacaccagacaagttccttaatctcctgtggctcagtttctcatctgttacatggggatacaaataacatgcattttgctggattgttggaagcagtcgatgacttattttatgttaaccacttagaagagtgcctagcccacagtaagagccatgtaagtgttggctattaaaataataattattatttctcagcctatctatcttaagtgtttctgagtctcactgtctgcgtgacactaaccttgaacccatttgtctctctgggcatctctccctgccctgcgcccctgcccccatacacccactgttccttgccctcctcctgggatggactctgtctgggatggcctcacctctctctaggactccctctggcatggccagcctcagccctggccagggctgaattactgtggcctcctggcttttgggacctgcaagttagcttcccaaggtgctgccctctggcctgccctgccctgcccaaccccccaacgctgcccgctgcgcccccgcggggcccagccagatgtcagctgcagttattagcctgggcgggagacacaggcctggcagtgtgcctgccagactcacaggcctccggaatctcccttgagcctggggagggggaggggagccattcaagcaaggggaagaagggagggggcatttaggggtcacagggaccctccaaggacgggacgcccccagcttctgctgggaccttcctccagcaaggccactgcactgctggacttccccctgcccccacatagctcagtttctttttcgcctctttcgttttccttctctttcccacacttggtgagatctaggctgccccggaatggctgtttaacccctatcccttagcctctttctaccctaaagaagagagaggctctcttcatcctccagaagacagaggcctgggaagctgagagagagagagagagacaaagagagagagagagagacagagacagagacagagacactaggcttctcacctcttggtctagtgggttcacacactaactgctcggaagtcccaccttaagtctaactggaagcctgaccgtctgcacctcgccgcagcccttcccgggaaggggctctgggttccctcatattctccccttagattttcaggtcttctctgactcggggagggaagctctcagatgacagagctactctagggaaggaggggggctccctctaggtattctggatgatagtaggatgggacctgcagactaaaacgagagtggggcccctgactcacatgagtgagtggggggtgttggggacggagctccagatctcctggcagaagggaagggcaccccacccgagggaggaggcagccgccgttccagcccgcccaggcgccgggggcgcctcgaggcatcggcccgccctctccgcgccccgtcgggccgggggcgaagtccgacccaggcccgcgggcaggcggggacctgccgggctgggttgggccaggccgggcctggcaggacgcagccccaaagcggcggggtggggcggggccgggccaggcggccgtgggggccccgggggcggcggtcggggctggtcgggactagcagtctgggggcccaggcgcgccctgggacctggcagatagtcgggttccccgcttctggctcggggccccaggacagcgctggtcccacctcttcctgtgccctaatatgggcggcggggagagacttcgggggccggcccgcgctcagtcctgcccgcggactcccgcctgttgccatggcgaccaggccccgctcctcggctgcgtcccccgccgtcgggccaatggaacactccccaagccgcctgcctccgcggtcccctgcaggcaccgcgggcggaaccattgcttgaggggagaggatggtggctggaggctgccgcggctgggcgggctccaagcacccgggcctccgcgggggctcgcacgcccaggttcctcttccgaggcgcaggatgcggcgggacccagggcggggcgcacggtcccgtaggatccgagtgacggagacagggccgggctccttcccccggggctgttgccacacttcctgcctctgcgctctttccccagcctgtttctaaggaagggagtggggttgggcgaccgcgccccagccgtcgggctgggtccaggctctaggagccgacacggtgttgggcaaagcccagggtcaataggggagggttttaggatgggggacagagaatacagatgactaagaggttaccatcgagggggagcagcagtcgtggaagatccagcagtcctggtgcgcgggaccctcaaggccccctcctcacatgtcaactgagtaccctcttattgtcttctctgctccgaagatgtgtccggccccttctaactctctccttcatccgggctagcagatgaccccagtggtccccaatttctggcagacatgtctccatcttctacctggcatattttacctgcctcagtgtaccccaggccgcttactagctttctgcatatctagacttcccctaatgcctccttcccgcttacgggagagcctcagactctggactcagctcccatgagctcctggacccctactcatttcttgcaatttaatgggtcatgcagctccacccactcaccccttttgatctctcccctcctccgtcctgtgaaaattccagtcccgcatccttctgagcccgggacccccagtcaattcctgggtcaggtgtctccttaaccctcccgatttacagtgcttaaccctcatttctgctttttggggtctcccaatggattgtcagtcctcctacccctctcgtattctgggtacctcaggggtttcttcgcacatactgggaccctcaccccacttgctgcgtaccaggtcctggtatttgtcccagtggactccagggaaatcatcctcctccctgaaacccctcactcatgtgcctgggccccccagcacctccttccatgcgtaccccgaggtcctttgagcccctccccctgcagccccgccgagccacccggcccgtggccgctgtttacaaggacacgcgcttcctgacagtgacgcgagccgcctcctccccttccccacgctcgaggaggggggcgcgggggcccggctccggcgacggccaatcggagcgcacttccgtggctgactagcgcggtataaaggcgtgtggctcaggctgagcggctgggaccttgagagcggccaggccagcctcggagccagcagggagctgggagctgggggaaacgacgccaggaaagctatcgcgccagagagggcgacgggggctcgggaagcctgacagggcttttgcgcacagctgccggctggctgctacccgcccgcgccagcccccgagaacgcgcgaccaggcacccagtccggtcaccgcagcggagagctcgccgctcgctgcagcgaggcccggagcggccccgcagggaccctccccagaccgcctgggccgcccggatgtgcactaaaatggaacagcccttctaccacgacgactcatacacagctacgggatacggccgggcccctggtggcctctctctacacgactacaaactcctgaaaccgagcctggcggtcaacctggccgacccctaccggagtctcaaagcgcctggggctcgcggacccggcccagagggcggcggtggcggcagctacttttctggtcagggctcggacaccggcgcgtctctcaagctcgcctcttcggagctggaacgcctgattgtccccaacagcaacggcgtgatcacgacgacgcctacacccccgggacagtacttttacccccgcgggggtggcagcggtggaggtgcagggggcgcagggggcggcgtcaccgaggagcaggagggcttcgccgacggctttgtcaaagccctggacgatctgcacaagatgaaccacgtgacaccccccaacgtgtccctgggcgctaccggggggcccccggctgggcccgggggcgtctacgccggcccggagccacctcccgtttacaccaacctcagcagctactccccagcctctgcgtcctcgggaggcgccggggctgccgtcgggaccgggagctcgtacccgacgaccaccatcagctacctcccacacgcgccgcccttcgccggtggccacccggcgcagctgggcttgggccgcggcgcctccaccttcaaggaggaaccgcagaccgtgccggaggcgcgcagccgggacgccacgccgccggtgtcccccatcaacatggaagaccaagagcgcatcaaagtggagcgcaagcggctgcggaaccgg

SEQ ID NO: 3309 - DNA, 6000 bp, Homo sapiens
tcaaaaaaaaaaaaaaatttagctcacactctgggtgcctgcccagatccactgggttcctactgtttctctccacaccaaggggtacttctagcagcttcatctctctgctagggggagaggcggtcttcctccagctgctgaagtgagtgtgacccatacaagggcagatcagcacaatcaacagcccctaagagcagccttcaatcaacagcagcatggaattggtggataaataccccagctccttcgcccctcagctgggacaactccaaagagcatgctctctgctgcctccagaggccctcagtgggactgcaccctatttgtccatggcagtaactggtttcataatgcatgcttaatggttactttcttttccctatttcacttcccatcctctacttgtatctccttgggtcacttcccaaataaactatttgtccttgcattttttaagagatggggtatctgatgcccaggctgaagtgcagtggtgcaataatagctcacggcaggccaggcacaggggctcatgcctgtaatcccaatagtttgggaggccaaggcaggaagatcacttgaacccaggagttcaagaccagcctgggcaacatagcaagacgccacctctacaaaaacaaaaaagtatccaggcatagtggcacatgcccgtagtcctagctactcagcgggctgaggtgggaggatcaattgaagctgggggatctaggctgtagtgagccacgattgtgccactgcactccagcctgggcaacagagtgagaccttgtctcgagaaagaaagaaaagaaggaaagaaggaaagaaaggaaagaaggaaagaaggaaagaaggaaagaaagaaagaaagaaggaaggaaggaaggaaggaaggaaggaaggaaagaaagaaagaaagaaagaaagaaagaaagaaagaaagaaagaaagaaagaaagaaagagaaagaaagaaagaaagaaagaaagaaagaaagaaagaaagaaagaaagaaagaaggaaggaaggaaaggaagaaaggaagaaagaaagagaaagaaagaaagaaagaaagaaagaaagaaagaaagaaagaaagaaagaaaagaaaagaaagaaagaaaaaaagaagctcactgcagcctcaaactccagggcccaagtgattcaactaccttattctcctgagtagctgggacgacaggcacagaccaccatgcccagctagtttttgtatcttttgtagagatggggtcttgctatgctgcccaggctggcctcaaactcctgacctcaagtgatccttccacctcagcctcccaaagtgctgggattacaggcgtgagccattttgcctgacctccttgaacttttgtatcaaaagacagtcatttgccctattgtaattcattccataattgcagttattggttgtcttgccccactgggatgagtcatgtccaccacagtgttccaaaaacacgcacatggtagtagatgcttgataaatgactctgggtctcatgactgggaggtggctgggatgctgatgggctgttctctttcccccatcctgtccttagaagcccccagttggagaggttgtagtgcaggagggaagctcactcctgagctataaatggcagcctccacctgcctcatgctccagaatacacagcctgaacagctggggcagggcccccagcgtccgggaaccccaaatgaccctcccggccctgaccagggctcctggggtgttccctggagctcatgcccagaggggatgtaagtccattaccaaggctgcagacgacacactaaagatgctgatggggtcatgcagctagtcctagcgccattcctagcctgtgtctcccctcctccgcatcagactccacctctgggagctccctttgcaagaaaccgtaccagggacaagggtcttccctacaaggccatgaagcacgcagatatctcctgcgggaggaatctctttccgaggtcggtggtgtcaggcctggaattagccacaccacctgcggcgaggctggtcccagggtctctggggacacagcgggggacagcaggggtggagaggacatcaggactgacctctgatgactcagcctgagatagtgaagagaatgagaaatggtgggcatggaggcctggttgtggcagagcggggtgggtgagggagtcttaggacttcttgccagctcggtcctagagtcagctgggccactcacaagctgggtgactgtgggtgagtcactctgggcctcagtttccctatttgtaacacagggaggggcttataaccgcagctcattcctggagttcattgtaaaggcaaaggggcctacgttgcagctgcctcacctggctggatggcctctgacatagagggccagcctcaatttcctcctctgtaaaaatgggaataaaaggccaggcacagtggctcatgcctgtaaacccagcactttaggaggcaaaggtgggtggatcacatgaggtcaggagttggagtccagcctgaccaacatagcaaaaccccgtctctgctaaaaatacaaaaatttagccaggggtggtggcaggcacctgtagtcccagctactcgggaggctgagacaggagaatcacttgaacttgggaggcagaggttgcagtgagccaagatcatgccactgcactccagcttgggtgacagagcaagactctgtctcaaaaaaaaagaggggaataaaaacagtgcccccccctccagcttatggctcaaagtgggatctgtgagtcatctgctaggcttagtccatgaacagcatttcttcattatccacccagggtcctttcatcatgactgacgtccctcgagatgcaattattctggtctgcttttgtcacaggacgaaactgtctgtgtagcatgggggaggggtgggataagggaggaggatgaagaacggagttggggaggggtctgggcttggcccccttaactccggaacacagggagaagtcaatgtctttagcgcatgaaagaagttctagaatgttctatttgctaccttttcagcccctgcaccaacaggggtgaagttttcaccatgacaaagagaaggaagctggcttaatgaacagtgaggcagctgggagggggcagagggaagctggacactcttggcccgaacctacagtccccagtggcactgaccactacccatctcttccacgatcctgtttcctctacagccttgggcagaaaacaaggaggcctccctacctccacttcatcccacacaggagtcttgatgctgggtgggagtccaggagtctgtctaggaatccaggaaggcttcctagaggaggagccattgcatctgggccttgaaggatgaatagaagtttcctaggcagcgaagtgtgtgtgtgtgtgtgtgtgtgtgtgtgtgtgtgtttcattttaacaaacactttcctatcttctaggggccaggtactcagaagaccacagacaagacccagccccatggcctgccccaaagagttcacatctcataaatgatgcttgaataataacaataatagtaacagctcccacatgctgagtgtgcgctgctaggacacagcatgtgacaggaattcagtgcctgaatgaatgagccaataaattaaactttctctttaaaaaaaaaaattctttttgttttattcttttagctctactatctaaggaaggaaaaagctttctggagtcagcaaatcctgcccttgattgctggaggggagaacggaggcatagtagggtcaaggagatggacggcacaaaggcctgggggtgggaaaactggagtacaggggtccagtgtggagagagttgggggcagagtcttaagcggggagctaaggcactaaggccgtctcctgttctttgggaactggggagccacaccttgattcccagcacaagagggaggaaaggaagacctgagatctagagaggacagcaggagcctgccctgggctccaagagtttcagagatggcccagatcagttgattgagtggccttctccctgtcatgagccacaagcagtagaagccacaggggggcagaagagatggagagatggagagagacacagcgacagtcaccagaagagagacaggggcatggcagaaagaggtgggagaaatccaggaaggctccctgggggtggtggccggaaatagggtggaggcctaatccctgatactagagaggcaggacctagaggggaggagaaagcttgatgctaggcaggaagtccaaaagtctgtctaggaatccaggacggcttcctgaaggaggggccattggatctgggccttgaaagataaatagacgtttcctacatttcctaggcagagaaaagtgtgtgtgtgggcggtgggggaggggggaaacggggaattgctcattttacttaacaagtactttcccatttttaggggaccaggtactcagtgggccacagacaagaccaaggcagaaaagacaggcgcctccccacattgcagcaccgggaccccgagcccacccacagccctcttcattcctcccaacgatggatggggaaactgaggcagcccagagcagcccccaccctaggtcctgcccgggacacgcccacgcgggacctgtgtcaccaggttaaaaatggaaacagctaggaccttttttttttcttcctttaagaaaatcctaggtccaaataaggcgagggctgccgggagcacggtgagctggccaagtcctcctgagcaagcgagtggcggctggcccggccggcctgggcttgggcctcctccaagactcgcctggcaggagggcggaggcaccccgggaggctataaggccctctcctccaccctgccaggctcactctgccccacagccacagcccctgactgccgcagcccccacagagcccgccgcgcaccccacgtcccccacgccagcgcccagccatggaggccatcaagaagaaaatgcagatgctgaagttggacaaggagaatgccatcgaccgcgcggagcaggcggaggcggataagaaagccgctgaggacaagtgcaagcaggtgaggtgccctccgctgggccgctccgggctgctgggagtcctctctgtgcggaaggccggggtctggagcccagttgggggtcgcagacacctgcgggaggataggaggctgatgctttggcggaggaagagcgaggggaccattgccttccttggatggggtcctgggctggaagaggggtgacgatcggacccacccccagcagggccagtgcgaacaaagtgagtttgacagagagagagttggcgggggagggagagtgagaacgttcgtgagcgaggtgtcgtttgcgctgggaggttgtgtactagatagggcggttggggacatgctgtgtgtgtgtatttgcgtgtgtttgagcgtatgtgtgtgtacgtgtgtgtgtacgtgtgtgcgtgtttgcctctggtgtgtgtgtgcatgtgtgcgtgtgtgtgtgtgtgtgtgtgtgtttgagacagagtctcgctctgtggcccaggctggagtgcagtggcccaatctcggatcactgcaacctccgcctcctgcgttcaggcgattctcctgcctcagcctccgagtagctgggattacaggcacccaccatcacacccggctaattttgtatttttagtagagaccggatttcgccatgttggccggactggtctcaaactcctgacctcaagtgatccgcccgcgtctgcctcccaaagtgctgggattacaggcatgagccactgcgcccggccatttgtgtgtgtttgagcaattctctgtgtgtgtgcgtgagcatttctgtgtgtgtctgtgtgtgtatctgcatgtttgagcatttgtgtctgtgtgtacatgtattgtgtatgtttgagcgtgtgtctgt

SEQ ID NO: 3310 - DNA, 6000 bp, Homo sapiens
cccagaattccgaagcagaagccagcgccccacaggagctaacggccagtcctgctggggaatagaggcacttagagcgcctgacgctgcaggaggccagagagagcagctctcgggccagcctgatcccagcagccaagcactgatttctggccctgcttacccagtgtgggaaaaggacaaagaggcccagcccggccgcttcctgcccactcccctcccagggcagcaacatcctccaccactggcctttgaccccacatcctgcctcagccctgccccaaggccccatttgcagggactaaggtaatcctatgacagatagggaaactgaggctcacagagggacaatgacgggcacgcgccaccaggcccggctaatttttgtatttttagtaaagacggggtttcaccatgttggtctggctggtctcaaactcctgacctcgtgatccgcccgcctcggcctcccgtagtgctggaattacaggcgtgagccactgcgcccagctctcatttattttttatcctcactgcctaccactgaagggtttggggttgtgtcttcgattcatcccaaacacttcctacagtgttctaatgctggggcccatagtggcctcagtcccagaactgaccctcaagaaactccaagctgagggagacagaccatgaatacctccagctcagaggtcagggccggaccagagggagggacagaggctgggacagctgtaggcgtggcgaaagctctgctcagggcagcagagcaggccaccagggttggggagccttgggactgagcatggagggacggtagatgccctcccagtgaaaagtagaaagtcattcttagcagtgggtccagcatggtctagaagtcaagcaaaccagctttggaatcagactaacaaagattcaaatcccccatctgtgtggcatcaggcaagtcccttcccctttcagagactcagtttgcccttctgtagtatggggcttccctgagacaatatttgtaacacgccctggccaggcatagtggctcacacctgtaatcccagcacttcaggaggctgaggtgggggatcacctgaggtcaggagttcgagaccagcctggcaaaaccctgtctctacaaaaaatacaaaaattaactgggcttggtggcatgagcctgtaatcccagctactagggaggttgaggcaggagaagcacttgagccagggaggtggaagttgcagtgagctgagatccagccactacactccagcctaggcaacagagcaagactctgtctcaaaaaatatatcaaaacaaattgtaacacgcccaacacattctaaatgccagatagccccctgtcggccttatccctgtcctcacatgttcttgcccaaacatttcccccaaaaaagtagtcaaaaccccaaaccaaacaaaaaaaccccaaaccagccaggtggggtggctcatgcctgttgtcccagctactcgggaggctgaagtgggaggatcccttgagcccaggagttcgagaccagcctggataacacagcgagatcctatctcaaaaaaacaaaaacaaaaacaaaacaaaacacccaaaccatcttcataccctgatgagtccatgctgtcagatttgctctcactcttcctacatgttaggagagtcctgtgttgggcacacagttggcacccaataaatgctgtgatccacagatctggaaggaagtcaggtggatgctgtaggtcagggttgacctatgaaacgtctttaaggaaactggctcattttctcagtcaaggcagaagttcaaaagcagctgccggaatgctcagagaccagcatgtcaaggtttctgttctgcagatggagaatctgaggccagaaaaggggacgggggtcgcagagcttggatttggagtcaggcttccaggctccccacccggaggtcaaggtcaggccctatagactctgaccctgccctgatcagctggccaccctggattgggccctgtcatctccccatagcttgggatgctcctgaggacttcagacaggatagccctccctgctctctgtcacatctcagctagagacccttgcaggtcacctcagtgacatcagctgaacctccagctgccagcctccaccccatcctccagctgacacccagcaggccgcaagatgggaagcctggagttcacactttccagctactcaggaggctgaggcgggaggatcgcttgagccgaggaggtcaaggctgcagtaagctatgatcacaccactgcactccagcctgggagacacaggaagaccatgtaaaaaaaaaaaaaaaaaaaaaacgcaaaaaaaaaaaataatgcacacacacacacagcaagatcaggttaaaaaaaaaaaaggcaaaaaaaaaacatacacacacacacacatatggggcacctggtacattttgcacatccactcaggggtgagcacgtagcccagacaggattcagagctcagtctagaagccacgggcacagcagcttttttaacataccctcttcaagaaaaaaaagaagagaagcaagtcagagagggaggaagggaagctggcctagtgtgaggaacagggccaagggctttgtctttgtcagctcaggcagttataacaaaacaccatagactgggtagcttcagtaatagacatttattgtttacagtctggaggctagatgtccaagatcaagatgctggcagattaaatgtctggtgagcgctctctagctagcttgcagacagccaccttcttgctgtgtcctcacattggaagaggataaccaagttctggcctcttctcataagggccttaatcccatcatggtgggtcaaccctcatgacctcacccaaacctcatcatcttccaaaggccccatcaccaattaccatcacatggagatgagggcttcaacacatgaattggagagggggcaaaagcaagcattcagttcattataggcttatattccagaagacctgggctcaaaccctgtgctgtgtgacctggggaaagtcatcccacctctctgagcctcctgctgtggggaggaagcaggagaatgaagctgggctcagtgggggctgtctgcccaccctgggagcaggaacaagatcagtgtcaaaccatctaaggcaaaagtcagatccaagccaggtgtggcgactcacgcctgcaatcccagcaatttgggaggccgaggcgggcagatcacttgaggtcaggagtttgagacctgcctggccaatattgcaaaaccctgtctctactgaaaatacaaaaattagtcagtcgtggtggtgtgcacctgtagtaccagctaccggggaggttgaggcaggagaatcacttgaacccaggaggcggaggttgcagtgagctgagatcgtgccactgcactccagccttggtgacagagcgagactctcaaaaaaaaaagtcagatccaggcatgagctggatatgatcaccctaatccagagttgggggcccagggagggagtttcagcctggaggtgacagaaaagtcttcttgagccaactctagaccggtgtggtggggggtgacaaagagaggtgatggggtctgtggtttgtaatccataggcctgagcttctcaaactaggagtgatgggaggataggactcttgggataaacagaggactgaaaatttagggaaagtaggggacatttttattaaaatgaacatggcctatatgcaaaaattttaaagatttaacccgagccttcaaagaaagtgatcctgtaggggcgagtctcttctagccaagctccccaaagcccagaaatgagggactaggtctgagcccttcagcccttcagagtattttggtaagacagtctaagaaccactgccttgggccatagggagccatagcaggttctaggcagaaagagggcaggcgtatttgttagaaagtttctctgaccccgtgttggggtcagaaccagagggagaaaggctggggacagggatgggcggagggatccacgcgcagagaatgagattgcttaactccagatcatggtgaggctgcacctctgaaactggaatgtgtgtatttctggaaaacatttggagtcttcagtttcccaaaagctgccattgatctccctagagtactggggaccccaataagcccaaaacagctggtcctcaggacgagggaaagatgtgaaaatcccactatcaggtagcatggatggcgtggtgcatgctatcgcaacccctgttctacagataaggaaactgatgcccagagagagacggaggactcttgtgaatattgggggggaccgcccctgcacctcggggacgtgaccccccccccaggctgacccgttcctcgctctgtcgtccccaggtggaggaggagctgacgcacctccagaagaaactaaaagggacagaggacgagctggataaatattccgaggacctgaaggacgcgcaggagaagctggagctcacggagaagaaggcctccgacgtacgtgtgcagggatgcgggagcccgcggcggggccaggccggagccccggggccgggaaggcggggagagccgcagggggaggaggaagaggaggaggagaaggcggcgcctcccagcgctttctccaaataagtcccgaaaaggggcactttccagcagctgtggccagcggtgccgacgtcaggccctcccccagcggtgctgacgtcggcggtccggccgggtgacctcatcgccccgacggcagccggcccggggggcggggagaggcgggggcggcccccgcgcaggcaaaggcttggggggccggggcgcggctgtgcagctctcgccggagccgagcccagccgagcgtccgccgctgcccgtgcgcctctgcgcctccgcgccatggccggcctcaactccctggaggcggtgaaacgcaagatccaggccctgcagcagcaggcggacgaggcggaagaccgcgcgcagggcctgcagcgggagctggacggcgagcgcgagcggcgcgagaaagtgagcgccccggcctcgggccccgcacccgcagcctcctcccccgcgcgccctcctttcttcccggcttcccgcgctgcccgcccgcgcgcagtcctcgggccgcctttttacgccctcggacgccgatcgccgacccacatccctgcgcccgcagccaggaccccctacttcctccgccgtcctccttcctgggcctgggacaggggagggggcgccgcctccgggtcgggcggggccggccaagcgggaaatggggggatggggcggagggggtgagcgatctccgggtggagaagtggagcggcgggagggggcgtatcgtgcaggctccgactccggggctggcgccggggtcccgggccgaggggaacccgcgaccggacttgtgggggagaatgaggatgaaaacgtggagcttccattgtctagggtttgaccggccgacagggatttcgacgggggaccggggatctggggagggggtcgcactttctcgcctctttcgcggcttcccggcttctgcttgcttccctgaccgttcccaggggcgcggcggcgacgtgtctgctccaggcggcgggggggatggggggtggaggaagttcagccccaagccgcccgcctttctccagctgattcctgcgggaaccggggcggcgggaccctgcctctctccagaaggccccgggaacgctggcgcggggccctgaacccacgatcgtttgagcgcctgctgtgcgcctccgccgcgagtcgcagggcccgagataaacaatgggtctgaaaaaggagggagtttcaccatcctctctgcatcatcctcctggctgtccctcgggacagatggtggcaccgccagggtctggggacagatttggattctggtcccatatcatgccacccacag

SEQ ID NO: 3311 - DNA, 6000 bp, Homo sapiens
gggattacaggtgcccgccaccatggcaggctaatttttttgtacttttaggaaagacggggtttcaccatgttggccaggctggtctcaaactcccaacctcaggtgatccgtccgccttggcctcccaaagtgctgggattacaggcatgagccaccgtgcctggccacggataaacatctctacccatggagtgatggtttacaaagtgctgtcatgcacttttttgtggacacatgcatgtccttgtgaccttgtttactttcacaccagctctgcgaggtcggcagcatgatccccattttctaaaagcaaacacggatgccaccagattcaaagcgtccttacctctcactctcatctgcagctttttctgcctcctccagcttctgcagggccgtggccagtcgttcctgagccctgtccaactcctcctcaacgagctggatgcgtcggttgagggcggccacatcaccttcagcctggggaggtcggaggtgcagccatgttaagaagtatcaggccagccaccagtgggagcctcccccatgtcctgccctctgttaacctgatcttccccgtcaaagcccacccaggagtccaggccatagggaatttacactcataccaaaatttcagtatgatcttcccggaaaatgtctgggaaaaacatctaccactccatagcaaaagatgagcatcgccaagcgtggtggctcatgcctgtaatcccagcactttgggaggctgaggtgggtgtatcacaaggtcaagagatcgagaccatcctggccaacgtggtgaaaccctgtctctactaaaaatagaaaaattagctgagtgtggtggcacgtgcctgtagttccacatgctcaggaggctgaggcagaagaatcacttgaacccgggaggcggaggttgccgtgagctgagatcgtgccactgcactccagcctggtgacagagcaagactccgtctcaaaaaaaaaaaaaaaaagcgagtgtcccagtacaagatgggtagttgagtcaacataggagtcaaacataccatgtgctttgagatgaatgtcagtgctggtctctccagcaacacaatagacccaacgttaggctaagatctaagataggctcttctctgaaaaaggcacacagtgttaccacgtagagagttctagggctcactgtgagattcttagaaagcaaggccatcagtgacccggctcattgtgtcctgtgagttccgctcccattcacctgaatggcaagataaatgcaagactatggagccctcagttaaatgttggccatgcaattaccaaggtgggacgaggcgggggagcctcgttggaattccatccttcaatccgcctggctgagagatggcaggacaaaaagatatggaaagggaaagaaaacttggttgcaggcatggaagacataccccaatagtgttattggcttttcaaggtgtttttacctacaagaaaggaagtacaatgggaagcattaaaccaggaactccagggccaaaaagtgctgggctggaatccccgctttgtcattttctttttaattttttttttgagatggagtcttgcgccgtcaccaaggctggagtgcaatggcatgatctcggcttgctgcaacttctacctcccgggttcaagcaattctgcctcagcctcctgagtagctgggattacagacggacaccaccacgccttgctatttttttgtatttttagtagagacagggtttcgtcttgttggtcaggctggtctcaaactcctggcctcacgtgatccacccgccttggtctcccaaagtactgggattacaggcgtgagccactgcgcccgaccgtgctttgtcattttcacagccacgtggtgttgggaaggttgcttcctcatcctggccctctccatcccaaagcctgattagttaccggactgccttgaggctgtaactccagagggtggcgccgcttatgcccagcaggtgggatgtgccagagaaaggcatctcttactgccacggttttattttactgcaatttcatcctcacacatcgcacccattttacaggtgaagaaaccgaggggccccactgggggaagtggttttattcagtgactcagaattggtaagaaatgaatggcctcttaagacccacccagggctcttccttgtcagaacctgtcccctaggtcctgccagggctacgaggcaaggcgagttttccagcgatgcctgctctttggaaggaatattgagaacgggtcaaacgggcctcaaccgagaggaaaagggaagccacgctagctttttcctatcagaacaaatgaagaatccctgaactggggaaggctatcaaaattattaggaaggccgggcgcggtggctcacatccgtaatcctaacactttgggaggcggaggtgggtggatcacatgaggtcaggagttcgagaccagcctggccaacatggtgaaaccgcatctctactaaaaatacaaaaaaatcagttgggtgtgggggcaggcgcctgtaatcccagctacttgggaggctgaggcaggagaatcgcttgaacccgggaggtgaaggttgcaatgagccgagatcgcgccactgcactccagcctgggtaacagagcaagattccgtctcaaaaaaaaaaaattattaggaaaccactccctctcctgccctgagttcatactgggggaaaaaaaaatagaatgaggctaacgtggccgaaaaactacacaaatagagtcaggaaggtttctcagcctcagattcctagaagcagaaagagggcactcccacaggtgtttcgtattgcagtgtcctctgaaacaccaaatgcagagaattgtgaaaaccactgatgaaactgtcttaagaaacgtcactgaggccttcccatgaatgggtgcctttcattctttttaattgcctagatcttaactcctcctaccaccttcagtaactgggccaggaactgatgttgcaaaaacactctgcaaccaacaccattatcgaattccaggacattttcataacccgccaaagacaaacaaacaaacaaaaaactgtgtacccattagcagtcgaggaattgattttaaagatcaaacagaggtgcttgattcatgagttgtcttttaagaagtgagtagcccttatgtgggaaattctgaatcctggcaaacaacgcttttggcagattttcagctgtctggagttgggagatacacgcatatctgtacatgcatacatatatatgtatttttgaaaaactgctagtcacggccgagtcattttgggttccaccccttcctgcaatcaaagccttccacacgctacaaaggatttcccttataaggtaaaagaggcttgctagatacatgtggcaaaggaacaggaagatgtcagttaatcacacaaaaatctaaacgaaaccagctgtcgggaaacaggcccagaagtctaccacacgccggctcctggcttattctacaagagtgaaaggtttttttttttttttttttaacccacccctggtcttagttccttttgccctgggagaggttttccctctcccagacggaaagaagcatcctttgctttttcaagaacttttcgaactttttcaagaagtcttcaactctccaaaaacatcttctctcccaactagacggtcttgctcctaaatcttggctccaggctgagggccattttgaagccgagttaattgtcctccagcgagatgacttgggatgagatcagagcaagagctgtgtcggttaagtgtgagaaagaggccagaccggctaccgattgaggcttacaccgggtttctaaggcctcttgggccaaagcagcccttacaggattagaggcttcaaccaaggcccatgctgcagcccccatctgggctctttccagtcctggcaattcacaccaccaattccatctggctgggcatcttttgcctctctagggtccccaccctgagcctcaacactgaactttcagggcttttgggcttcaacctctatccgcacacccccccaccctcatcatacaactttcttgcctctgagtctgtgcacacccatgtctctggtcccagcaaacttatttattctataagacccagctcaacctccattttggagcctcccctgtcatgctcccataactgcacagaaaacccgtggaatgcagacctcgctccatcagtgagtcagctcccctgcctccatttgtctatgagctcttcccagggcagagaaaacacaattgaggctgggcgccgtggctcacgcttgtaatcccagaactttgggaggccaaggtgggcagatcacgaggtcaggagttcgagaccagcctggccagcatggtgagacactgtctctactaaaaatccaaaataaaaaaaaaaaaattagctgggcgtggtggcgggcacctgtaatcccagctactcgggaggctgaagcaggagaatctcttgaactcggggggtggaggttgcagcgagccgagatcgcaccactgcactccagcctgggcgacagagtgagactgcctcaaaaacaaaacaacaaaaaacaacaacacaattgattatttacaaagcgccaggctccacgcctgagatttactcctgggaccctccctgctactctggggggtcgggattcttatcagtcctactcgcagatgggaaaaaagctcctagagagcaaataccaagtcatgaagcctgtgggtggcatgatatgggaccagaatccaaatctgtccccagaccctggcggtgccaccatctgtcccgagggacagccaggaggatgatgcagagaggatggtgaaactccctcctttttcagacccattgtttatctcgggccctgcgactcgcggcggaggcgcacagcaggcgctcaaacgatcgtgggttcagggccccgcgccagcgttcccggggccttctggagagaggcagggtcccgccgccccggttcccgcaggaatcagctggagaaaggcgggcggcttggggctgaacttcctccaccccccatcccccccgccgcctggagcagacacgtcgccgccgcgcccctgggaacggtcagggaagcaagcagaagccgggaagccgcgaaagaggcgagaaagtgcgaccccctccccagatccccggtcccccgtcgaaatccctgtcggccggtcaaaccctagacaatggaagctccacgttttcatcctcattctcccccacaagtccggtcgcgggttcccctcggcccgggaccccggcgccagccccggagtcggagcctgcacgatacgccccctcccgccgctccacttctccacccggagatcgctcaccccctccgccccatccccccatttcccgcttggccggccccgcccgacccggaggcggcgccccctcccctgtcccaggcccaggaaggaggacggcggaggaagtagggggtcctggctgcgggcgcagggatgtgggtcggcgatcggcgtccgagggcgtaaaaaggcggcccgaggactgcgcgcgggcgggcagcgcgggaagccgggaagaaaggagggcgcgcgggggaggaggctgcgggtgcggggcccgaggccggggcgctcactttctcgcgccgctcgcgctcgccgtccagctcccgctgcaggccctgcgcgcggtcttccgcctcgtccgcctgctgctgcagggcctggatcttgcgtttcaccgcctccagggagttgaggccggccatggcgcggaggcgcagaggcgcacgggcagcggcggacgctcggctgggctcggctccggcgagagctgcacagccgcgccccggccccccaagcctttgcctgcgcgggggccgcccccgcctctccccgccccccgggccggctgccgtcggggcgatgaggtcacccg

SEQ ID NO: 3312 - DNA, 6000 bp, Homo sapiens
agctcacggagaagaaggcctccgacgtacgtgtgcagggatgcgggagcccgcggcggggccaggccggagccccggggccgggaaggcggggagagccgcagggggaggaggaagaggaggaggagaaggcggcgcctcccagcgctttctccaaataagtcccgaaaaggggcactttccagcagctgtggccagcggtgccgacgtcaggccctcccccagcggtgctgacgtcggcggtccggccgggtgacctcatcgccccgacggcagccggcccggggggcggggagaggcgggggcggcccccgcgcaggcaaaggcttggggggccggggcgcggctgtgcagctctcgccggagccgagcccagccgagcgtccgccgctgcccgtgcgcctctgcgcctccgcgccatggccggcctcaactccctggaggcggtgaaacgcaagatccaggccctgcagcagcaggcggacgaggcggaagaccgcgcgcagggcctgcagcgggagctggacggcgagcgcgagcggcgcgagaaagtgagcgccccggcctcgggccccgcacccgcagcctcctcccccgcgcgccctcctttcttcccggcttcccgcgctgcccgcccgcgcgcagtcctcgggccgcctttttacgccctcggacgccgatcgccgacccacatccctgcgcccgcagccaggaccccctacttcctccgccgtcctccttcctgggcctgggacaggggagggggcgccgcctccgggtcgggcggggccggccaagcgggaaatggggggatggggcggagggggtgagcgatctccgggtggagaagtggagcggcgggagggggcgtatcgtgcaggctccgactccggggctggcgccggggtcccgggccgaggggaacccgcgaccggacttgtgggggagaatgaggatgaaaacgtggagcttccattgtctagggtttgaccggccgacagggatttcgacgggggaccggggatctggggagggggtcgcactttctcgcctctttcgcggcttcccggcttctgcttgcttccctgaccgttcccaggggcgcggcggcgacgtgtctgctccaggcggcgggggggatggggggtggaggaagttcagccccaagccgcccgcctttctccagctgattcctgcgggaaccggggcggcgggaccctgcctctctccagaaggccccgggaacgctggcgcggggccctgaacccacgatcgtttgagcgcctgctgtgcgcctccgccgcgagtcgcagggcccgagataaacaatgggtctgaaaaaggagggagtttcaccatcctctctgcatcatcctcctggctgtccctcgggacagatggtggcaccgccagggtctggggacagatttggattctggtcccatatcatgccacccacaggcttcatgacttggtatttgctctctaggagcttttttcccatctgcgagtaggactgataagaatcccgaccccccagagtagcagggagggtcccaggagtaaatctcaggcgtggagcctggcgctttgtaaataatcaattgtgttgttgttttttgttgttttgtttttgaggcagtctcactctgtcgcccaggctggagtgcagtggtgcgatctcggctcgctgcaacctccaccccccgagttcaagagattctcctgcttcagcctcccgagtagctgggattacaggtgcccgccaccacgcccagctaatttttttttttttattttggatttttagtagagacagtgtctcaccatgctggccaggctggtctcgaactcctgacctcgtgatctgcccaccttggcctcccaaagttctgggattacaagcgtgagccacggcgcccagcctcaattgtgttttctctgccctgggaagagctcatagacaaatggaggcaggggagctgactcactgatggagcgaggtctgcattccacgggttttctgtgcagttatgggagcatgacaggggaggctccaaaatggaggttgagctgggtcttatagaataaataagtttgctgggaccagagacatgggtgtgcacagactcagaggcaagaaagttgtatgatgagggtgggggggtgtgcggatagaggttgaagcccaaaagccctgaaagttcagtgttgaggctcagggtggggaccctagagaggcaaaagatgcccagccagatggaattggtggtgtgaattgccaggactggaaagagcccagatgggggctgcagcatgggccttggttgaagcctctaatcctgtaagggctgctttggcccaagaggccttagaaacccggtgtaagcctcaatcggtagccggtctggcctctttctcacacttaaccgacacagctcttgctctgatctcatcccaagtcatctcgctggaggacaattaactcggcttcaaaatggccctcagcctggagccaagatttaggagcaagaccgtctagttgggagagaagatgtttttggagagttgaagacttcttgaaaaagttcgaaaagttcttgaaaaagcaaaggatgcttctttccgtctgggagagggaaaacctctcccagggcaaaaggaactaagaccaggggtgggttaaaaaaaaaaaaaaaaaaacctttcactcttgtagaataagccaggagccggcgtgtggtagacttctgggcctgtttcccgacagctggtttcgtttagatttttgtgtgattaactgacatcttcctgttcctttgccacatgtatctagcaagcctcttttaccttataagggaaatcctttgtagcgtgtggaaggctttgattgcaggaaggggtggaacccaaaatgactcggccgtgactagcagtttttcaaaaatacatatatatgtatgcatgtacagatatgcgtgtatctcccaactccagacagctgaaaatctgccaaaagcgttgtttgccaggattcagaatttcccacataagggctactcacttcttaaaagacaactcatgaatcaagcacctctgtttgatctttaaaatcaattcctcgactgctaatgggtacacagttttttgtttgtttgtttgtctttggcgggttatgaaaatgtcctggaattcgataatggtgttggttgcagagtgtttttgcaacatcagttcctggcccagttactgaaggtggtaggaggagttaagatctaggcaattaaaaagaatgaaaggcacccattcatgggaaggcctcagtgacgtttcttaagacagtttcatcagtggttttcacaattctctgcatttggtgtttcagaggacactgcaatacgaaacacctgtgggagtgccctctttctgcttctaggaatctgaggctgagaaaccttcctgactctatttgtgtagtttttcggccacgttagcctcattctatttttttttcccccagtatgaactcagggcaggagagggagtggtttcctaataattttttttttttgagacggaatcttgctctgttacccaggctggagtgcagtggcgcgatctcggctcattgcaaccttcacctcccgggttcaagcgattctcctgcctcagcctcccaagtagctgggattacaggcgcctgcccccacacccaactgatttttttgtatttttagtagagatgcggtttcaccatgttggccaggctggtctcgaactcctgacctcatgtgatccacccacctccgcctcccaaagtgttaggattacggatgtgagccaccgcgcccggccttcctaataattttgatagccttccccagttcagggattcttcatttgttctgataggaaaaagctagcgtggcttcccttttcctctcggttgaggcccgtttgacccgttctcaatattccttccaaagagcaggcatcgctggaaaactcgccttgcctcgtagccctggcaggacctaggggacaggttctgacaaggaagagccctgggtgggtcttaagaggccattcatttcttaccaattctgagtcactgaataaaaccacttcccccagtggggcccctcggtttcttcacctgtaaaatgggtgcgatgtgtgaggatgaaattgcagtaaaataaaaccgtggcagtaagagatgcctttctctggcacatcccacctgctgggcataagcggcgccaccctctggagttacagcctcaaggcagtccggtaactaatcaggctttgggatggagagggccaggatgaggaagcaaccttcccaacaccacgtggctgtgaaaatgacaaagcacggtcgggcgcagtggctcacgcctgtaatcccagtactttgggagaccaaggcgggtggatcacgtgaggccaggagtttgagaccagcctgaccaacaagacgaaaccctgtctctactaaaaatacaaaaaaatagcaaggcgtggtggtgtccgtctgtaatcccagctactcaggaggctgaggcagaattgcttgaacccgggaggtagaagttgcagcaagccgagatcatgccattgcactccagccttggtgacggcgcaagactccatctcaaaaaaaaaattaaaaagaaaatgacaaagcggggattccagcccagcactttttggccctggagttcctggtttaatgcttcccattgtacttcctttcttgtaggtaaaaacaccttgaaaagccaataacactattggggtatgtcttccatgcctgcaaccaagttttctttccctttccatatctttttgtcctgccatctctcagccaggcggattgaaggatggaattccaacgaggctcccccgcctcgtcccaccttggtaattgcatggccaacatttaactgagggctccatagtcttgcatttatcttgccattcaggtgaatgggagcggaactcacaggacacaatgagccgggtcactgatggccttgctttctaagaatctcacagtgagccctagaactctctacgtggtaacactgtgtgcctttttcagagaagagcctatcttagatcttagcctaacgttgggtctattgtgttgctggagagaccagcactgacattcatctcaaagcacatggtatgtttgactcctatgttgactcaactacccatcttgtactgggacactcgctttttttttttttttttgagacggagtcttgctctgtcaccaggctggagtgcagtggcacgatctcagctcacggcaacctccgcctcccgggttcaagtgattcttctgcctcagcctcctgagcatgtggaactacaggcacgtgccaccacactcagctaatttttctatttttagtagagacagggtttcaccacgttggccaggatggtctcgatctcttgaccttgtgatacacccacctcagcctcccaaagtgctgggattacaggcatgagccaccacgcttggcgatgctcatcttttgctatggagtggtagatgtttttcccagacattttccgggaagatcatactgaaattttggtatgagtgtaaattccctatggcctggactcctgggtgggctttgacggggaagatcaggttaacagagggcaggacatgggggaggctcccactggtggctggcctgatacttcttaacatggctgcacctccgacctccccaggctgaaggtgatgtggccgccctcaaccgacgcatccagctcgttgaggaggagttggacagggctcaggaacgactggccacggccctgcagaagctggaggaggcagaaaaagctgcagatgagagtgagaggtaaggacgctttgaatctggtggcatccgtgtttgcttttagaaaatggggatcatgctgccgacctcgcagagctggtgtgaaagtaaacaaggtcac

SEQ ID NO: 3313 - DNA, 6000 bp, Homo sapiens
agagctgtcaggctttaggcttttggacggtgacagctatttcagggacagttgcaaaccagcatggttaatgtacttgcaactgaccatgcaccaggtgccgtggctcacgcctataatcccagcactttgcgatgacgaggcgggtggatcaactgaggtcaggtgtttgagaccagactggccaacatggtgaaaccccgtctctattaaaaatacacaaattagctgggcgtggtggcgggcacctgtaatcccacctactcaggaggctaaggcaagatcccccagcttgaacccaggaggcagagggtgcagtgagccaagatcgcaccactgcactccagcctgggcaacagagtgagactctgtctcaaaaagaaactgaccacgttcctcacccgcccatggtatctgtgctgcaacccagccaccagtagggtgccttctcctcggtagccagatcattctctggcacgccttggcacaggctctctggaagactgagggtagattgtgtaattcacagaagcagcagtctgtgtgtggtggaaaaggagttccttgtgtggcaatggtgtgggcccgaccagtgatcatcgcgtctgcccctcattcacaccggagttctcacttgagccagccaccatgcttttgcagtataaacacctcccaaagattcatttctttttttttttttttttttgagacagggtcttactctatcacccaggctggaatgtagtggtgcgatcacagctcactgcagcctcgacctcctgggctcaagcgatcctcccgccacggcctccagagttccagagtaaagctgggactacaggcgcatgccatcatgcccagctaatttttttttgagacagagtctcgctctgtcgcccaggctggagtgcactggcgtgatctcagctcactacaagcttcacctcctgggttcacgacattctcctgcctcagcctcccaagtagctgggactacaggcacccgccaccacacccggctaatttttttgtatttttagtagagacagggtttcaccgtgttagccacgatgttctcaagctcctgaccttgtaatccacctgccttggcctcccaaagtgctggcacgcctagctaatttaagatgcatttctggttgtgctgctgtgaccactaaccagagattagaaaccagctaaggaatcttggagattgcatgtcacccaagctggaaatttcttcccaagtagtggaacagccagggcagagggaacagacgctactgcagactctgcttcagccactgaatcaagggagagagtggcagctccggcagccacggggcagtggaaggacccagtcacgagagttcctggctgtgcctgtggcctgggttagctgctgttcacagtcagaccagcctggctggatgctgacgttgagggctcccatattggcaaaccaagggaggctgcgaaggccagtctcttgtttgcaccatgtccccagaggcctttggtgacacccctgttaaagactgctgtgtctcagtagaaagaattatatacttgaagcttggggatctagagtcagcttctaccactggcactttctatggagccttaggcaagtcactttgatctcttgggtactacaaggggttttggggcaataaataacccagagagcttgctcacatgctgagggtgagacctcgtacaggtgggggagggtgttttgagacttagctgagaacgggtgacaccccacgtgaacatatttattggacagcaagaagcatatggtctctgtgctgggtgggaatgatacatatcaatgacacattatcccaggctggcctcttcttttcttttcttttcttgttttaaatacacaaggtcttggcagggtgcggtggctcacacctgtaatcccagccctttgggaggcgggcggatcgcttgagcccaggagtttgagaccagcctgcgcaacatagtgagaccccatctctacaaaaaaatattaaaaattagccaggcatggtagtgcatgctggtagtcccagccactcaagggactgaggtgggagaatcacctgatcccaggaaggcaaggttgcagtgagctatgattacaccactacactccagcctgggcaacagagtgagaacctgtctcaagaaaaaaaataaataaatacacaacgtcttgctctgtcacccaggctggagagcagtggtgcaatcacgactcaccgcagccttgaactcctgggctcaagcgatcctcctacctcagcaacattgcaaaacccccacctccacaaaaaatttttttttagtttagctgggtgcagtggtgcacacctatagtcccagctactcaggaggccgaggcaacaggattgcttgagcctgagaggacaaggctgccgtgagctctcagggcaccactgcactccaacctgggcaacagagtgagacaccatctctcaaaataaaagaaaaagaaagggggcacagactctggagtcagactgccaagggctgagcctcagctctaccacttaccagctctgtaaccttaagttacttaccctctctctatgccttagtttcttcatttgtaaaatgtggataatttacctgctccatagggcagttgtgaaagtgaaggcacttagaaaagtgcctggtagtaaagatgaagggaggctgggcgcggtggctcacacctgtaatcccagcactctgggaggtcaaggcgggcagatcacttgaggtcaggagttccagaccagcctggccaacatggcgaaaccccctctctactaaaaatataaaagttagccggtcacggtggtgcatgcctatagtcccggctatgctggaggctgagacaggagaattgcttgaacccaggagatggaggctgcagtgagctgagatcacactactgcactccagcctgggtgacagagcgagactccatctcaaaaaaaaaaaaaaaaaccaagatgaaggaaatgtgtgcacagagttccatctttgcagtgtgttacagtgctcagtagattcagagactcatttagatgagagatgggactaggggtggtgtctcacgcaattagccagacatggtgacgggtgcctgtaattccagctactcaggaggctgaggcaggagaatcgcttgaacccgggaggtggaggttgcagtgagctgagatcgtgccactgcactccagcctggatgacagagcgagactccatctgaaagaaaagatagatgagaggtgggtggaggggtgtgagtgaacggccgtcctgatgagattgctccttgcagaggaatgaaggtgatagaaaaccgggccatgaaggatgaggagaagatggagattcaggagatgcagctcaaagaggccaagcacattgcggaagaggctgaccgcaaatacgaggaggtgagtggggctggcagatggcgcagcagcaggaagtgggaggaaatgcatctgctgagatagggaggacaccggggccaacgaaaggaagctctcggttaggtcagctgtcctcctgcgtgaacatatgtttgtccagagacaaccacttggctaggaaactatctcccacgatgccagaaagtgctgcggacgcttgtctaacgtaatgggaaaaccgaatgatcagctcacttgtgtcgttagctgggagttttggcacagttgggcaaaaatggaggattgtggtcccaagccatggagtttcagaccatgcaagctcaggccctcctttgcctccctcgatggctcggctcttccctcccgcctcttgtctgcctcgctcctcaggcttgaggaagagaatcaggatttcctccaggccccaggatggctctttcagttgaagcgccagcaaaaggccaggcgcggtggctcgtacctgtaaccccagcacttcgaccgaggcgggaggatcacctgaggccaggagtttgagaccagcctgggcaacatagtgagaccccatttctaaaaataataataataataattagctgggtgtggtggcatgcacctgtagtcccagctacttgggaggctgaggcaggaggatcgcttgaacctgggaagtcaaggctgcagtgagctctgaccacgccactgcactccagccttggagacagagcaagaccctctgtcaaaaacataaaagggctgggcatggtggctcacgccggtaatcccagcactttgggaggccaaggcaggcagatcacctgaggtcaggagttcatgaccagcctggccaacgtggtgaaaccctgtctctacaaaaaatacaaaaattagccgggcatggtcgtgcatgcctgtaagcccagctatttggaaggctgagacaggagattcacttgaacccaggaggcagaggttgcagtgagtcaaggttgagccactgcatttcagcctgggtgatggagcgagactctgtctcaaaagaataaaaaaataaaaaagaggccaggtgtggtggctcatgcctataatcccagcactctgggaggccgaggtaggtggatcaggaggtcaggaattcgagaccagcctggccactacggtgaaaccccatctcgactgaaaatacaaaaattagctgggcgtggtggcacgcgcctgtagtcccagctacttggaaggctgaggcaggagaatcgcttgaacccaggaggtggaggttgcagtgagccgagactgtgccactgcactccagcctgggcaacagagggagactccgtccccctgcaaaaaaaagaaacaccagaaaaacccatgttgcagctggtctaggggtctgggtggggcatcattgggggctgtctgcagtggatgggagaggacacggctggtggggatcgggctcagctgggcctttctgtctctgcaggtagctcgtaagctggtcatcctggagggtgagctggagagggcagaggagcgtgcggaggtgtctgaactgtgagtggcagaacaggactgagcgaggctggctcgattcctggggcggagtgggaaggagctggctgtgttgggaattggctctgaccggggtctctgctcaagtggacgggcgtcaggggctcatggctcatcttttctcttggcttctgtgacaaagaggtggtgacttgttcttactgccatgggaagcactgcccacgtgttgaccctttctgcaaagatatgaggaaataggagtgagacaggaggcagcagggaagcccagaagtcccattttcccagagaggatatctcagggggctgtgccatcttaacagaacactgacctgctccagaaggcaggctcccccggtcagtatgtaaatgcttttgctcctgtcagtgtttggccgtgacacattcctggcgggaaggtgagaagcttaaccagaatcccacaagcaagcaccgaaaaacaaaacacctgtcctcttggccccgggtgaggaattcagccccacagagcatccgggagtgctgagagagatctggtttcacaaatccactccgggcttccttcccggagtgtcccctgcaaactcccattgctctctgcccgccttctgccctcagtcccattcttacaccttccggagtcggcctcatcaatcatagatttcacaagtccttgcagccttacccttggcaaaagaccaggagtgttttccaagccctccaaatactcttcgggcgcacctcgcctctgcctggtatgataagcctttgataagcccatagtatcacactgcagaaaaatccattaacattttctccccacattccttctgccccccaccgggggagctgtgtaggtttctcctttggaaaatttattgttggggcgattgctattattgccggctgtaagggaagataagacacaaaaatcctttgtctttgtgcagaaaatgtggtgacctggaagaagaac

SEQ ID NO: 3314 - DNA, 6000 bp, Homo sapiens
tttgagacagagtcttgctctgtcacccaggctggagtgcagtggtgcaatcttggctcattgcaacctccgcctcccggattcaagccattctcctgcatcagcctcctgagtagctggaattacagatgcccaccacacccggctaatttttttaatttttaggaaaaacggggttttaccatgttacccaggctggtctcaaatttctaactcaggtgatccacccacctcggcctcccaaagtgctgggattacaggcatgagccaccgcgcccggccctcaagagctatttagaacctccttaaaaaccagaatgtgacggatgagagatgaaaggcagatgtcaaagacagcttaagtttcactcctaaggaaaatcaggacaagccagtctgggtattggctgatgggttcagttgtgaacatgctgagctaggagtatctgacaaatccaaagggagatgtcctgaacgcaggtggatgtgaagagatggctgggctaaggataaaacactgagaatggtcagcatggattaggagcccccagaaagtgagaacagagacagaacaacgaggaccacaaacactaagggacaggcagaacccacccctcccccacctcaaaaagacttcaatggggtctgaggaaaaaacaaacaaacaaagaaggggaggcagaggcagaggtggtagggagaagaaaccagcaaataaaatagggacagggccgggcacagtggcttatgcctgtgatcccagcactttgaggggatcacttgatgtcaggagttcaagaccagcctggccaacatggtgaaaccctgtctctactaaaaataacaaaaattagccgagcgtggtggcacgtgcctgtaatcccagatactcgggaggctgaggcagaagaatcgcttgaacccggcgggcagaggttgcagtgagccgagatcatgccactttactccggcctgggtgaaagagcgagactccatctcaaaaaaaaaaaaaagggggataggggccaagcgtggtggctcacacctgtaatcccagcactttgggaggccgaagtgggcagatcacctgagctcaggagttcgagaccagcctggccaatgtggtgaaatcccatctctactaaaaatacaaaaattagccagatgtggtggtgggcccctgtaatcccagctacttaggaggctgagacaggagaatcactggaacccgggaggcagaggttgcagtgagctgagatcgtgccactgcactccggcctaggcaacaaagagtgaaactccatctcaaaaaaaaaaataataatggtatagggccaggcatggtggctcatacctgtgatcccagctttttgggaggtggaggctggaggatctcttgagcccaggagtttgagaccagcctgggcaacatagggagaccccatttctacaaaaaataaaaaaattagcctgccatagtagcgtgcagatgtagtcccagctacttgggaggctgaggtgggaggatggcttgagcccaggaattccagaccagcctgggtaacatagcaagaccccatctctacaaaaaataaaaattagccatgcgtggtggtgcatgccagtagttccagctactctggaggctgaggtgggagaatcactggagcctgggaggcggaggttgcagtgagtgaaatcacaccattgctctccagcctgggccacagaacaagaccctgtctcaaaaataagtaaataaatgaggataataccaagaaaaaagaatattcagaggtgatcaagactatcaaataccacagaggctgaggcctgtaggtggtcaatgcctctggttgaagcttttttaaccagagctagattagcagaagaatgagctgaagtggaagggaggaggaaaggctgggccctccttccacagatccttaagtaagcctcaaggccccggaggccccagagtgacctagaacagactggaccatctctaagaagcagggagccctagtgatcaaactgcggcctgggaagcttggcactctgagttcagataccaaattcccacttttaagcaggaagggggaaaagtcacttaacctcctctggcttcagttttctcaccattaaacaggaaaaaaacaataacatcgttttgctgggctggtactgggattaaaattttaagagtcaggggccgggtgcaggggctcacgcctgtaatcccagtactttgggaggtggaggcaggcggatcacgaggtcaggagttcgagaccagcctggccaacacagtgaaaccccatctctactaaaaatacaaaaaaatacaccacaccaggcgtggtggtgggtgcctggaatccaagctacttgggaggctgaggcaggagaatcgcctgaacccgggaggcagaggttgcagtgagccaagatcgcgccattgcactccagccctggtgaccgtgagagactccatctcagaaaaaaaaaaaagtcagggtcttgctccgtcgcccaggctggagtgcaatggtgcgatcacagctcactgctgccttgacctcctgggctcaagggatcctcccaccttagcctcctgagtagctgggactacaagcatacaccaccatacctggctaattttttaaaaaaattttttgttttttgagatggagccttgctctgtcacccaggctggaatgcagtgacacaatctcggctcactgcaacctccgcctcccagattcaagcaattctggtgcctcagccgcctgagtagctgggactacaggcgcacatgaccacacctgcctagtttctgtatttttagcagagatggtgttttaccatgttggccaggctggtctggaactcctgacctcaggtgatccacctgccttggcctcccaaagtgctgggattacaggtgtgaaccacctcgcctggccaaaaaacttttttttttttgcagagatggaggtcttgctatgttgcccaggctggtctccacctcctggcctccaatgaacctccacctcagcctcccaaagtgctgggattacaagcgtgcaccatgacgcccagctaattttatttgttgtagagatggggatctccctatcttgtccgggctggtcttgacctcctaagctcaagcaatcctcctgcctcccaaagtgctgactcccaaagtgctgggattacaggcctgagccaccacacccagctgcaagcccgattttccaaatgtatctctcctctgtttttctctttctttttttttttttttttttttttgagacgtagtctcattctgtcgcccagactggagtgcagtggcgcgatctcggttcactgcaggctccgcctcccgggttcacaccattctcctgcctcagcctcccgagtagctgggactacaggcgcccgccactactcccgggtaattttttgtgtttttagtagagacggggtttcaccgcgttagccaggatggtctcgatctcctgacctcctgatccgcccgcctcggcctcccaaagtgcgggattacaggcctgagccaccgcgcccagcctttttttcttttgatagggtcttgctctgtcgcccaggccgaattgcagtggggcgatcacggcttactgcaccctcaacctcctggcttcccaaagcactgggatcacagacgggagccaacgccccggccagttttttcaacgttgagagccctggcccctagataggacccagcatcctcactgctctaacccctccccccccaccatccccgggctggcccggacaacccctaaggtggccgagggcgggccctgaggaggccggcgcgcgcttccgggcacagcttgtggcggtgaagccgctcagatggcggaggccttgggtatctctaagcagatcgctaggccgcagacctcggagctcgtcttgggtcacttttatttattttttttgagacggagtctctctctgtcgcccacgctgcagtgcaatggcgcgatctcggctcactgcaagctccgcctcccagattcaagcaattctctgcctcagcctcccgagtggctgggattacaggcgcccgccaccacgcccggctaatttttgtatttttagtagaaacggggtttcaccatcttggccaggctggtcttgaactcctgacctcgtgatccacgcgcctcggcttcccaaagtgtgggaattaaaggcgtgaaccaccgcgtccggcttgggtcacttttcgagtatacagctcctcctctctccttcctccctaggcccccactgccccgactcgcaggccgcagacaaggctgagagcgctaccttgctttcccgcgctcgcctcggtgcctactgcgcctgcgcgagctgtgagggcgggacccagagacacccgccccaactactggcgtgcgccctctgctgtcgcctaacggaactccgggcgcgcgtgcgcacgcaccccaagccacgccccgccaggctgccggcgcgcgagcggttggcgccgctccctgccttccctctcctacagtggggcggggccgggccgcccgagtcgggggtggaaggcgggggccacataatgccacgcccccgcctcgtccccatttgaagccccgcgactcttcactgctggtcaatcagagcccgtgctctccctagtgccggccaatgggaggtgcgctcgggctgcttccggctccgcgctccgctcgccccctcccaaggtctccccgcgactggcgggacgcaggggcgggcgtcggccgcggtgacgcgcagcgggcctggagccaataaggggcgggctcggtgctgatggacggtgctggtggccagtggagaggcgctggccgcacttcccgtcggggagagagtgtaatatggcgaagacctacgattacctgttcaagctgctgctgatcggggactcgggggtggggaagacctgtgtcctgttccgcttctccgaggacgccttcaactccacttttatctccaccataggtaacgggaccggggaatggctgggggcgccggaggcccgggctgggcgcgcccctgaggggctggggctgagggatctacagggctggacgggccgagggcgctgagagggtcgagggggcctaaagggagaagagcagtcgcctgcaccgccgttcgggggttcctgggccgtggtgggggagaccaggtgcccattttgcagatagggagactgaggctccgaccctcagcccgctcgttagggcgtgttatgtcttgggctggggtcttcgcgcccgtcctctcgatctgtcctagcagcagccctcgaagcggttcttttgaggctcttgccttacagaagtggaaactgagtcatggggaattggccatgggaaaaagacagtggcatctcaccttaatgagcatttactatgtgccaagtgcttcacgtgcattttcacactcttcagttcttggtgttaagtgctgttatgagcccgtctgacaagatgaggaatctgaggctcagggagggcatggaacttgcccaaggccacacagtctgcacgtggtgagaatgggatttgatggaatttgaacctggctgtgtctcaacccaaaactcgaggcttagctctcctagagagatgccactgcacactcccagctgatgacaagctcagctaatgcaccttggagccgggactctaacccacaccattcctgctcttttctctggagcgttcagaggttgagcccctctccctgaccatgcttcccctcataagcgtattttcctctagaaggaatgataagaagagtcaggaccttttccctgcccacctttcatcctgctccaggaatgacagcaatggcaagtgacagcactgcctgccctgggacctgtcatccccaagaagatgcaagataaaagcctcagcgagaaactaaatcagccac

SEQ ID NO: 3315 - DNA, 6000 bp, Homo sapiens
gtcagagacaaagaactgggcactcctagatccttctggattggtcggttaactgctgggttcctttggacaagtcacttggcctctctgagcctcagtttcctctctggccaactgagtgtcgccccatctcacagggcttaggggaggtggcacatgcgtaaagtcccgtcaatgctaaggtgctctgcggaagtgagagttgatgtcagagagtaagggtgggtgggaggcagagggagccggggaaggatgagctggggccggacaggccagatgaacccactgccagaggcgggcatcaaagggccaaatgggaggcccacgcctgggaagctgtctcaccacacccgctgtacacgggcggctgaggactcagggtcctgccatcccaaggactcacaatgtgcttattccacaggcatttttcactctcgccagagatatcaaagcaaaaatggacaaaaaattggtgagtgtgtgtccttccgagatccccgggtggatctctgggatccagccatcgtcgttagcagcagtgatatgacgtgccctagatcctgctttttagggcccagccagaccccatgggacattgctgggaaagggggaagagtttgcaggtgtggctggggcatcagcatcaggcagtgccagcctggggacgctgcccaagcagacaaggccgtgcccggtgaatccccaggctagcagggagcacacggccttttccattccactcaagggccagaaagacaacatggtgtgcaaggacagagagccatggctcggagaaaagcttcctaggtcgcttgggcagggccagggctggtgtctgataactgctggctcatcgtcttgacaagcatggcagatcaagaacctgcccccgctccaccccagccccagatgctacaagttgtgacagctctgcaaccttcattgtgtcccagggttctctgaggcctccagggaagtctgcatgaatccctacccatctaccctctcattcgtttcttgcttttttttttttaccacgttagcgatttcctagtccgctgcgctcagtatcaatggtgctttcttgatggaatcaaacacttccctgtactttgggggcatttagtgcctaaacaccgtagtgacccttcctccctcgccctggttccagcaactgccctttcccggccatgttacattggttgtccaatcgaggagcacacggcgctctatttgtgggttaagtctggtcacttgagaatgcacataaaatacaaaatgccgttcaagttttacatctgatgtaagcaaatctgttttgtaattctaagatgcggtgtgttgaacagtgaggcatgtgattgatttaatagcagctctttggccattaaattaaaatgggaaacagttcatggaaaccagtgcactgaccaacaataatttgggattttcttgcaattttttttcttcagtataatggtcaaggtctgattcttttttcttttagttttcttattagttaaaaaagagattttttttttagagtctcactttgccacctaggctggagtgcagtggcaccatcacagctcactgcagccttcaactcctgggctcaagcaatcctcccacctccgcctcccaagtagctggggctataagcacacaccaccatgcctggctaattttttttctttttctttttttttgagaaggagtctcgctctgttgcccaggctagagtgcaatggtgcaatccctgctcactgcaacctctgcctcccaggttcaagcggttcttctgactcaacctcccgagtacttgggattacaggcacatgtcaccacgcccagctaatttttgtatttttagtagagacgaggcttcaccatgttggtcaggctggtcttgaactcctgacctcaggtgatccacctgcctcggcctcccaaagtgttgggattacaggtgtgggccaccccgcctggccattttttcttttttaagaggcaggatctcacttgttacccaggctggactcaaactcctgggctcaagcagttcttctgcctcagcctcccaaagtgctgggaagggtatgatggggtgggcagataagtgagagagtggttggaaggggtggtatatagcagatggaaaatagatctgtttctgaaaaacgaattatcagttgtaagagaattggatggatgggtagaagataatggatggatggttggttgaaagggaataaatcgatggttgatttgttggaaggagatggttggatagatagatgattggtttgttggttggttggaaggggatggatgaatggttggttggaaggaggtggttgcttggaaggggatggatggatggttgattggtcagaaggggtggttagaaggagatggttagttggaagagggtggatggggggaaggagatggatgggtggatggatggttggaaagggatggatggatggttggttggatgaggtggttagaaggggatggatggttggttggttggttggaaggggatggatggttggaagaagatggatggttggaaagggatggatgagtggatggttcttggttggaagggatggatggttggttgattggtttgttggttggaagcaggtggatagacggatggaagggaatgggtgagtggatggatggatggttgaaagggtatagatggatggttggttggttggttggttggttggttggttggttggttggttggatggttggaaggggacagctggacggactggcagatgatggatggatggtttgatggctgattggttggttggatggctggaatggtaatggatggatgacctggcagatgatggatggatggttggatggctcgttggttagttggttggtttggctggtttgattggtttggttgtttggttggttggttggttggttggttggatggttggatggatggttaggtggatggttaggtggatggctggttgattgtgagacgtagtgctgattctcagtgataacctcagaaaacctcttgtgatttcaggaaggcaacagcccccaggggagcaaccagggagtcaaaatcacaccggaccagcagaagaggagcagctttttccgatgtgttcttctgtgaggaacaccgccttactctgagcctcgctcagcccagctgactgtgcctgttctgagtgagcccctcactcagccggggccctcccacctccaacgccccgcccacgccgcggccaccgggcccacggccaccagaatgcaattgagaaatcgtttattttagtaactgtctgatctttttcaactttggagatggaataagttaaaaatttgctatttttcctgtaacatctgctgaacgggcccacccacacgttgtatattcagagagagagagggagtcaaggtgtgaccgtcgaccacagccagtgtcaggcctctgcctctgggcctttgctttgtggcctcactgcaacacaaagctccaccaggaggctggttcacgtcccctaccacggaagcgaggtcccagaaggccagcggtggttccaggagcaacagctcccaaaccctgagcaaggcaaccgatcgccaggaccaggaagcatcacccaggagatttggcgcccacttccacctcttctctcagttttggacaagtgacaaaccattttgccccctcactcttcttttttaactgttaaaccaaaggaaagcacaaatgaaggaaatcctgtgtaaagcattgagaaggaaagaagcctggagcagcctctcctgtccacagccaggggttaggtctgcaggcccgtctgcggtccccatcgagcatcaaggggacgctgtgtgtgctgcaagtgaccccgaaaacaaccacagccgtcacatggtcctcctgaagttggggcaccctcctctcagcaccaaaatggcccccactccttcgtgtcctcccgctatctccaaatcggacgttctttctagctgagatttttatttttccacatctgtagtgccatgaagcgattctgtctttgacttccaatggcaaacctgggtgatcgggaacaagcacgttgtacccttggctggacatggccaagacacaaggcattccacggcggcaagctgaccgcacagcagtctggcttgattttcagccgtcatcattgggttctgttttgacagctctgctgtcccatagggactgcgactgggaccaggtcaaccacgccaggggggtgtcaccagccttttctttttttctttctttttttttttttcctccttaagctgctgtcaatccaaaccattggcatcatcgtttcttttgaattaaaaccaacatatcagcaatagtctgctctccccgggaatctctaacatgctctgtttacatcgataaatgcacttaaggaaaacaaacaaattaaagctcatcttaaagtccaaggatttttatgtccacattttccctgtaggccacacggacatggccaggtgctgggggtgggtctggacaagatggtagagcccatggattaccccatcgagcggccacctcagaggagatgccacccatcatcaaaagactaaattgggaaaagaagcctcctggcttggtgcagtggctcacacctgtaatcccagcactctgggaggccaaggcgggctgatcacttgagctcaggtgttcgagaccagcctggccaacatggtgagcctgcgtcacctggcttctggcacacagctcggccactgtgtccctcctgcctccctggcaggtccttctaggggccctctcctggctggctttccagggcattccttccactctatccagggtccttcccaagaccacacccaggtccagtcattccctaggacttggcagagagctgtactcacagccaagatcacagcaaaatcagcaaagggaaaaggcatgcagagtgaagtccagaggcaaccagacagaagcatccagaatcctctcacagtggggtcacacaccccatgcttaactcccccaacaatgagttgtaacaacaggtgtgtaatgtgtcttttgtgaaagctagttggcagttctgtacccaggtgtttatggagccagtcacataggaaccctctacctggcacttatcaggattccagactcctacaaagaaagcaggggtttagcataaaccgcatcacttgtacagaaagtgtatgagccacgcatgtagggaagttttaatatccgtagggaactttaccaactgcaggcccaccttgccagcaggcctttctcaggaagcagcctcagatctattcattcttttctgcacacactatgcttttagataggccagtggctttcaagctgcaaatccaggccagacccaggtcggtttcacctgccactctctattccaatttgaatgtctcatcggcaccgtaagcataacacagccctgaccctggactccatccctgccttccccatcgtgcccacagctgacccctcccgagttgtagccacgaccacctggacctctgtgaccacttcctcatgggtttcaggtcctcacctctgtgtttcaaactattttcagagtgtccttacgaaactgaaatcagtgtcacctccttgcttaaagctctccccaggggctggggtgtgtggcttatgcctataatcccagtgccttgagaggcagaggcaggggaatagcttgaggccagttcaagttaaagaccatcctggacaacatagtgagaccccatctctaaaaaaaaaaaaaaaaaagtacaaaaattggccgggtgcagtggcgcatgcctcatcccagcactttgggaggccgaggtgggtggttcacctgaggtcaggagttcagagttcaagaccagcctggccaatatggcaaaaccccatctttactaaaaatacaaaaattaggc

SEQ ID NO: 3316 - DNA, 6000 bp, Homo sapiens
ccccctgctttctctgtccgcagaactccatactgggtcccctacgtgttcctccttccctaggacagcaacaaaaacacacaattttccctctctagcaggtctctaagtctcctgattcctgaaactgcctcagactccccctagagggagggaggcccctgaggctttcttgccatcatagcctcttctgggcctcagtttcccctctgtaacctgatcctagtacttggataaactccgacgaggtgtggggggttgttgtctgtgacctccctgaaatatcttagacatttggggtactgagcatttatctggggttaaataaaatctttacatcttaagacattcgattgaccaaattgagtgtcctggccatttcactgatgaggaaactgaggcgcagagaggtcctcttgccagctcaaagtcaagcatctgggcgcccaatgttagccagcggcaccccctggtggcgggcgtgggagacacggcggggcgcgcttgtcgggggttggggggtgggtcggaggggtggcatcctccagccctgatggtcccacttaccgcacctcgccgggaagagctcgtcctgctggtcgggcctccgagcggactgggcagcaccatgctcaagcctagggttcgatccccgcctccggaagcctcagtatccatccctcccctctgcctccctcttcgcgtgcctgaatatttatacaagatacaggcgtcatcacagccgccctcggcttccagagcagctggcttcgttcataaatattataaccactcagaattcatcatcatcacagttaatgataaaattccacagtgccagaactaaaagtcatccgggttcacgaacttggtgcatttccttccagacttttaaaaagaagatatttagggaatttttttttcaagatttttccccccagtccgcttacaaagtaataccatgttcgctgtaaaaaatttggaaataatggaaatgtataaagaaggaaataaaattctgctgtatctccacccatggattatctgcagtattttgacttatttccctctagtttttctccatctgttataagatattcatatttttggctgggcgcggtggctcacgcctgtaatcccagcactttgggaggccgaggcgggcggatcacgaggtcaggagatcgagaccgtcctggctaacagtgaaaccccgtctctactaaaaatacaaaaaattagccgggcgtggttgcaggcgcctgtagtcccagctactcgggaggctgaggcaggagaatggcctgaacccgggaggcggagcttgcagtgagccaagatcgagccactgcactctagcctgggtgacagagcgagactgtctcaaaaaaaaaaaaaaaattcatatttttttctttcttttcttttctttctttctctgtctttcttttctttccttttccctttctctttctttctttctttgcgtctcgccttgtcgcccaggcgggagtgcaatggtgtgatcttggctaactgcaacctccgcctcctgggttcaaacgattctcctgcctcagtctcctgagtagctgggattacaggtgcccaccaccatgcccagctaatttttgtatttttagtagagactgggttttcaccatgttggccaggctggtcttgaactcctgacctcatgatccgcctgcctcggcctcccaaagtgctgggattacaggcatgagccactgcacccagccctagaatattcatatttcttataaatgaatattcatatgttctccttcagtttgagccaaaggcatttgtccctctcctcttactgactgcatctgctctggccacactgcaagcctggtcccaccacagggccttcaaacaagctgttcccactacctggaatgcttctctctcagcccccagcctcacccattagatttttgtttttatttttgttttagacaaagtttcgctcttgttgcccaggctggaggacaatggcgtgatcttggctcactgcaacctctgcctcccgggttcaagcgattctcctgcctcagcctcccaagtagcagggattacaggcgaccgccaccatgcccggctaatatttagtagaaatggggtttcaccatgttgaccacgctggtcttgaacttctgacctcaggtgatccacccacctcggcctcccaaagtgctgggattacaggcatgagccaccacacctggcccccacactgggttttaagttagtgtcttcttccccgagaagtcgtccctggacccgtatctgggatacttttttttttttttcttgagacagagtctccctctagcacctaggctggcgtgcagtggtgccggtgatctcagctcactgcaacctccgcctccctggttcatgcgattctcatgcctgggcctcctgagcagcctcctgggacaggcaccaccacaccgggctaatttttgtatttttagcagagatggggtttcaccatgttggccaggctggtctcgaactcctgacctcaaggtcaaggagtgatcctcctgactcggcctcccaaagtgctggtattacaggcataaaccaccgcacctggccacatttttatttttatttgtctagtgtagacgatagggtagggatgcagggaagcctctggactttcctctgagtgggaccggcctggaagcctagcccgttctcccaccagctctgtctcccctgacacaaagaaaataccccaatcccgcagcccctcccccagctcaaccatttctaattccagagcccaatgctgctctggacaatcaagggcttgcattctttttaaatttaaattaagtaattaattttttgagacagcgtctcactctgtcgtccaggctggagtgtagtggcgcgatacggtttcctacagcctcgacctcctgagctcaagtgatcctcctacttcagcctcgggagtatttgggtccacaagcacgcgacaccacatccagctaatttttaaattttttgtagagatggggcctccctatgttactcaggctggtttccaattcctgggctcaagcgatcctcccgccttggtctcccaaagtggtgggattacaggcgtaagcctccgcacccggctatttttactttaaaatactaagtcagtgacggaagcttccgcacattctcgtggctcacttttctcttcctggggaaaaaaggcaggaggtatttccgagagagccacccatgtaggaagcgtgcctttgggcgatcagggagctgagcaaccgaaaaacctcccctccaaggaggcggcaggccagggcctggaccagctgccctggagccccccacagagcacggactaccgcgtgggcgcggagggcagggagaatgggaggtggatttctttttattttttgtttttctgaattttcccaatttctctgcagtggattggtgatacttctatagtccgagtgggggaggagggagcaaacatgttaccctaaaaagaaaaaataaatttcccaaatgtaaacggtgcggggacgtgggggtgggcgtcccagtactcccagggcactgggggcgggctggggactgggttggcggcggctgggcctcgaggcgctaagttattctggtctctcggcgcctccgcagctggcgagctttttataaacaggacgagtcaccccccgccacacacacacgctccagccccgcctactgggaggggtggggggagaatctaggggatcaggactctcctgggggccacacacccctggagggtttgaaagctggagtagggggagcaggagacccaaagtgggggctggggtttcgggctcctcctccctccccaaattctgacttccttccctaaagatttggaggaataaaagatggaccatcttagctcccaaaaggctccatcctctgagttttgctttcccaggatggagggagggggtctcccagcccccgggtctttgaatccgagctttgaagagctggaggcttcggctcgtgccctccctgtttcccggggcatttaccgcaggctttaaggggtttccgggacaggtcgcttctctgtccctgctaaaccttttcttcgaattttcttcttgatgacggggcgcagggaggggagggggttcccagagagtccatcagccccttcctccttttctgggaatggtggggaggggaggctctcttgacctctacttctttcttttcaaacctcagaaacgggggaggggtggagtctttactagcccctccctcagtgggggggtcttacgcctcgggaatgggacaggggtccctcttgactcctgtttattctttggtatttattttgaaccccatatatgtgagggtataaaacatctcttgggcctcgatttttcttttctgcaattgggagtcaggggcatttaacaggggtcacagcaccttggactagacggtggcctcaagagtcccctacctggggtgggtgcgggcgggtaagggaaccgcccctcgaagaccggggctcagccaaggcctcagcctctcggcccttcaatctcccagatgccaccattggacaagaggagggcgtagacaatctctgattggctacttcgcccgtcgctcgagagcttaagccagtgagagaacgctgaggggccccgcctccccgaggcggacaggaggcggacgagaggcggagtcggcccccgcgccgctcccgcccctactggatgcacacgctaggccccgccccatttgcacgtcaatctgctcaggagccctgccccatctggctctgcgtgcgtcaatgggccacatctctacgcgcggctccgcctccggatggcgtcacggacttatctacatgtgaggctccgcccctccctttgcaggacgtcacggaggactgcaggggcctgagccgctgctgccgccgccgccgcgcagccccacatcaacgcaccggggtcctgtcaccgccaccgccaaaaaagtcaccgccgctagggtcgccgttgcatcggtgcagggcaaggtgagctcctgggcggccgggtgtgctcaggctccgagcacctgcataaccttcatttgactgatgggctgatggaggtgggggacgaggttgactagggttgaatggggggaaggatgcggcggtcgcgaggctgggaatgggtagggcccgggcgccccactcctgcctgatcctcaccactaacccccccaacccccctgctctgcggcggagggggaggggagccgagctccttgcgggaagctgtgcgcgcgggaggcttttgcgtgcgcgtgcgcgtggtgtgcacacgcgtgtgcgcgcctgcctgtgtcagcgggtctgtgtgcacccttgcttgtgtacctggatatgctcgtgtgacgccgtgggggtctgggcctaagtgtgtgagcgttgcacgcgcgtggagaaagacgtgtggaccgcctgtgcaggtatggcccgtgcatacaagcacggggatccgtgtccgtgtgggtgatgtgcacacgcctgcatgggtggaggggcctgtgcgcacgggtggtttgcacatttctataggcgagtcggtgtgcaaacaggtgtctgtgtctttgtcctgtgcacctcagtgcgttcacacactcctgtatgtacggatgagcgtgtttgaggctgtgtgcacgtgagcgtgtgcatgcccctcctgtatcatgtgatgcagcggccttggccggagctctccggcctggaggtttgcggggagcgggggctgcagatgcgcgtcctcgagggaccatgcacgcggtgcacgtggggccgcgcggccgggttctgaggaccatgaaagattgatggggggcggagccagccgcagtcaccccctccgggctcagccctgggtttagggttacagccccacctggggcacc

SEQ ID NO: 3317 - DNA, 6000 bp, Homo sapiens
tactaaaaatacaaaaaattagccgggcgtgttggcacatgcctgtaatcccagctatttagggaggctgaggcaggagaatcgcttgaacccaggaggggaaggttgcagtgagccaagatcaagccactgcactccagcctgggcgacagagcgagactccatctcaaaaaaaagaagaaaggagcccttgggggtggcaaaggcagcttcccacacttaggggccaggagaggccttccccatccagtcctgaagacctcccctccccttctatggaggagacagaacaagacacagataagggacagacaggtcttagccagatggagaggattgacgacggtcctaggggacatggtcaggaagggtttcttggagaaggtggtgggttttgaaggatgagtaggagttcgccaagagtgtaagggtattccaagctgagagaactcaaaaccaaagaactgcagttacatttgggcaaataatacaatcatagaaagcatttattgaccccttactatttgttttttctttcttttttttttttttttgagttggagtctcactctgttgcccaggctggagtgcagtggcgcgatctcggctcactgcaacctcctcctcctgggttcaagtgattctcctgcctcagcctcccaagtagctgggactaaaggcgtgcgccaccacaccgggagaatttttgtatttttagtagagacaaggtttcactatgttggccaggctggtctcgaacgcctgacctcgtgatccacctgcctcagcctcccaaagtgctgagattacaggcgtgcgccaccacacccagcctgaccccttactatttcttcaaatccaataaaaatcgcaatgcttttcctttctgcaccatcgtggtgtgttcttgactccacttctcgccatatcttcctacaagactttcaggattaagcgattcctggacaagaaacaaaagcaaaatcgtcccattccccagtggatttggatgaaaactggaaataaaatcaggtacaactccaaaaggacactggagaagaaccaagctgggtctataaggaattgcacatgagatggcacacatatttatgctgtctgaaggtcacgatcacgttagcatatcaaactgaaagtgtcaccactatctggagagttcgacgtgttttcctctctgaatctgttatgaacgtgtgggttggctgggttcagtaataaatatgtgaggcctttcatttcaaaaaaaaaaatcgcgatactccacaaagtaggtaggtttatttgctcaattttcatgaaggaaaagctgaggctcagagaggttgacaggcctctgtatctcacctgcctgcctgcaggaaagtgctccactcagctcaggctgtctcagcctaccattcaccagaccatctccccagctgccaaggctgaggcccaagttcagggcagggcctctgtaggccgcccactcacctcctgcctcagggagaggcatgaccccgtctcctccactctggccccactgcacgggacccagagaggggttcccagggcagggctggctacaggtctgcgggctggatcttgtcccactagggatctctttgtccaggatagaacctgggctagagagcacagagacccatggatctgagtatgtatctgtgtgtacctgcgtctgtctatacaacacgaatacagacagacacaggtgcacacacagacacacactccaataggcagacagacaccttcctaaccaatctagagacaaaacaaacccacacctccagttccctgccctggcaatttgaatcccaggcctgccaggccaggtctttattattattattattattattattattattattattattatttttaagatggagtcttgccctgttgcccaggctggagtgtagtggcatgatttcagctcactgcaacctccatctcctgggttcaagtgattctcctttctccagagcagctgggattaccggtgcgctccccatgcctggctaatttttgtatttttagtagagacagggttttgccatattggccaggctggtctcgaactcctgacctcagatgacttgcccgcctcagcctcccaaagtgcttattacaggtgtgagccacctcgcccagcctattttttttttcttcttttttttttttgagacagtgtctcactctgtagcccaggctggagtgcaatggcgcaatctcggctcactgcaacctccacctcccgggttcaagcgattctcctgcctcagcctcccgactagctgggattacaggcacctgccaccacacctggctaatttttttttcttttcttttttcttttttttttttgagacggagtctcgctctgttgcccaggctggagtgtagtggtgtgatctcggctcactgcaagctctgcctcccgggttcatgccattctcctgcctcagcctcccgagtagctggggactacaggcgcccgccaccatgcccggctaatttttttttttatttttcagtagagacagggtttcaccgtgttaaccaggatggtcttgatctcctgacctcgtgatcagcctgccttggcctcctaaagtgctgggatgacaggcgtgagcctctgcgcccagcctaatttttattttcaatagagatggggtttcaccatgatggtcaggctggtctcaaactcctgacctcaaatgcctgcctcagacttccaaagtgctgggattacaggcaggagtcaccgcgtgtggccgacaggccacctctcttggtgatgaggacagcctcccttatggccttcatgccccagttgggggcagagccaggtgagtaaggaggatagaaaaggagtaacgcatgcccactggccaggcagacaaactgaggctagagaccacccacacaagcaaccttttgttgcattcacctttattttttatttttttttgagactggagtctcactctgtctcccaggctggagtgcagtggcacaatctcagctcactgcaacctctgcctcccgggttcaagcgattctcatgtctcagcctcctgagtagctgggattacaggtgcacaccaccacacccggttaattttcgtatttttttttttttttgtatttttgtatttcggccagtctggtcttgaactgctgacctcaagtgatctgcctgcctcggcctcccaaagtgctgggattacaggcatgagccaccacacccagccccgcattcacctttaatactgagcatccattctatgcgaggccctgtcagcaggctcagcataggcaatgtccctgaccttcagggactatggtccactccatcattctggcagattcagaggctacaataaaggagtaaagtctgagggtggggcacttcctgaagacacatctttgcactgggggaagggagtaccaagcagagagcatagcacgtgcaaaggcccagaggtacgattagtcctgcaactgggaggccaaggatcagagagagtgaggggaaggaggtcagggaaaggagggtgtgggctccattcagacagaggtggggagctggaggggtgcatgcagaggctgtaggtcagatccagatgtcctaaggatcccttgtgagtattggtggggtgggtccatctctcctccctcacacccccttcccagccagtcttaatagtggctcattaagccctaacagccatgatagtggtaacaagcatgtaataattatacccggcattcctgcctcatcagcccagcccctggagttgggcaccctcgcccaggacatcacagccctggcagacctggggttaaaacgtgggcggcggaaggaaggggctgcgcaggggcctggactcccaggttctagggttctaagggtggacaagagctcaggcctagtcacagcccgggccctgctgtgactcctagctaactctcgggggatggtcactccacctctctgagcccagtttcccatctgtaaaggcaggaagtaggactcctggttctagaacgcactcagtgaaaatgatcaggatccaagcgctttcagcaacttctggcgaccctcctctcccctcccgtctcttcctgagcaatcacacgcggggtggagggagggagggaaggaaggagggagggtgaggaacgcagacctccccacacccccggcgagcccccggacacagccccaccaggcctccagccccgtatccgcacaaagcctctccagaaggcgcgctaggggaggccctggcggcacagcagagcaggaggcgccaaggagttatttagccatgcgggaccccatccccctccagtccccggaggccggcaccgcccccgcccccgcccccgcccggccggggccccacgcgcggacacggggcggggcctcggggcgggcgggcgcctggtggcccgggcccatcacgccacccgggacgtgccttggcggaggcggcgccggggagatcggtcgtacacagcggtcccggggcggggtgacccggcccgggcgcgcggccgcccccatgacgtcaacccacaaggcagcgcgctgttgtggcgtttaccgcgcgtcgccggggcaacggcggccgggcgggcgtcggcggcttggccccgcccctccatgcaaatgagcgacgtcacccgcacccaatggcgaacgggggcggtgagctcatcgcgccgagccgaggctataagagggcgcacaagtggcgcggcgcaggagccgccgccagtggagggccgggcgctgcggccgcggccggggcgggcgcagggccgagcggacgggggggcgcgggccccccgggaggccgcggccactcccccccgggccggcgcggcgggggaggcggaggatggaaacacccttctacggcgatgaggcgctgagcggcctgggcggcggcgccagtggcagcggcggcagcttcgcgtccccgggccgcttgttccccggggcgcccccgacggccgcggccggcagcatgatgaagaaggacgcgctgacgctgagcctgagtgagcaggtggcggcagcgctcaagcctgcggccgcgccgcctcctacccccctgcgcgccgacggcgcccccagcgcggcaccccccgacggcctgctcgcctctcccgacctggggctgctgaagctggcctcccccgagctcgagcgcctcatcatccagtccaacgggctggtcaccaccacgccgacgagctcacagttcctctaccccaaggtggcggccagcgaggagcaggagttcgccgagggcttcgtcaaggccctggaggatttacacaagcagaaccagctcggcgcgggcgcggccgctgccgccgccgccgccgccgccggggggccctcgggcacggccacgggctccgcgccccccggcgagctggccccggcggcggccgcgcccgaagcgcctgtctacgcgaacctgagcagctacgcgggcggcgccgggggcgcggggggcgccgcgacggtcgccttcgctgccgaacctgtgcccttcccgccgccgccacccccaggcgcgttggggccgccgcgcctggctgcgctcaaggacgagccacagacggtgcccgacgtgccgagcttcggcgagagcccgccgttgtcgcccatcgacatggacacgcaggagcgcatcaaggcggagcgcaagcggctgcgcaaccgcatcgccgcctccaagtgccgcaagcgcaagctggagcgcatctcgcgcctggaagagaaagtgaagaccctcaagagtcagaacacggagctggcgtccacggcgagcctgctgcgcgagcaggtggcgcagctcaagcagaaagtcctcagccacgtcaacagcggctgccagctgctgccccagcaccaggtgcccgcgtactgagtccgcgcgcggggcgcat

SEQ ID NO: 3318 - DNA, 6000 bp, Homo sapiens
atttatttatttattttttgagctagagtctcgctctgtcacccaggctggagtgcagtggcacagtctcggctcactgcaacctctgcctcctgggttcaagtgattctcatgcctccgcctcccagtagctgggattacaggtgcctgccacctcccgggctaatttttgtatttttagtagagacggggtttcgccatgttggccaggctggtctctaactcctggcctcaagtgatcctcctgcctcggcctcccaaagtgctgggattacaggtgtgagacactgtgtccagcctaatattttaaataaaaaataaaaatggggccgggtacggtggctcacgcctataatcccagcactttgggaggctgaggtgggcggatcacgaggtcaggagattgagaccatcctggctaacatggtgaaaccttgtctctactaaaaatacaaaaatcagccgggcatggttgtgggtgccagtaatcccagctactcgggaggctgaggcagaagaatcacttgaacccaggaggtggaggttgcagtgagccgagatcgcaccactgcactccagcctggtgactgagagagactccatctcaaaaaaaaaaattattttgtgactagtccccacagcttgtccagttgccatcgataaggagactcctctgtgagaagccttggaatggactcctgggcctgatttctactccctgggcacagaagggggctttgaggagatgtcctctccaacccttggggcaagatccctcatcgttttcttttttctgaatcaagagacctttgaacagctttcaataagttaccggccccctctacccagcaaagtgcatgtgcagtccatacttatagttatggggagagagtttatagactagattaagatggaagaaaatggggtgaggttgtagggaattttcttctggttcacactttttttctttcttttttttttttttttgagatagagttttgctcttgttgacaaggctggagtgcaatggtgccacctccgctcactgcaacctccacctcccgggttcaaggaattctcctgcctcagtctcccaagtggctgggattataggcgcctgccaccacgcccggctaaatttttgtatttttagtagaaatggggtctcaccatgttggccaggctgttctcgaactcctgacctcaggtgatccacctgcctctgcctcccaaagtgctgggattacaggtgtgagccaccatgcccagtcgcctcgatcgatcacccttgatgctgaaatggaaagggtctcgctgtgttgccctgccacaagattcaaagtggccctcaagtttcacccttgatgctgaaaatagagaaagagtctcgctatgttgcccaggatggcctttgaggccccccaaagataactaagccatttgcagaagtaacatagggcacaaaagtagggccaatacttttccattttctagcatgagttgagttaagagcacaggctctggtatcaaactgtctgggttcaaatactgtctttgtccttaacttgtcctgggaactcaagcaaggcccttaatgtgctgttacatttaacctccagggttactgtgtagatagcaacaggatagcatcagtgggagtgtgtttacacagaacttggcctgtaacaattgctaaataaattatattattactgtcttaatagaataaagaaaggcaagctcagagaagtgaagtgactttgacaaggacacagaaaagatacgattagaacctgggcctactcatcatcaatgctaaaaagtgttgtttacctcctagactaatgttttacaaactacaaggcacaaccagaaaatcagttcagcagggttgcggaattgaaataaatagtatattaagggctgggcgtggtggctcatgtctgtaatcccagcactttgagaggccaaggtgggcagatcacctgaggtcaggagttcgagaccagcctgaccaacatggagaaacaccatctctactaaaaatacaaaattagccaggcgtggtggtgcatgcctgtaataccagctacttgggaggctgaggcaggagaatcgcttgaacccaggaggcggaggttgtggtgagccgagatcgtgctattgtactccagcctgggcaacaagaacaaaactcagactcaaaaataaataaataaataaaaatacaaaaattagccaggtgtggtggtgcacgcctgtaatccctctactcaggaggctgaggcaggagaatcacttgaacctaggaggcggaggtttcagtgagccgagatggcggatggcaccactgcactccagcctgggagacagagtgagactgtgtcaaaaaaaaaaaaaaaaaaaaagaatattaggccaagtgcggtggctcacatctctaatcccagttctttgggaggctaaggtgggtggatcgcctcagctcaggagtctgagaccagtctgggcaacatggcgaaactccgtctctaccaaaaatacaaaaaaattagctgggcatagtggcgcacatctgtggtcccagtacttgggaggccgaagtgggaggatcgcttgagcatgggaggtgtcggttgcagtgaactgagattgtgccactgcatttcaacctcggtgacggagggggtgaaaccctgtctcaaaaaaacaataaaaaaccaaaaccagaaagagccgggtgcagtggctcacacctgttatcccggcactttgggaggccaaggcaggtggatcacgaggtcaagagatggagactatcctggccaacatggtgaaaccccctctctactaaaaatacaaaaaaattagctgggcgtgttggcgcgtgcctgtaatcccagctactcaggaggccgaggcaggagaatcgcttgaacctgggaggcagagggcagaggttgcagtgagccaagatctcgccactgcactccagcctggcgatgcagtgagtctcaaaaaaaaaaaaaaaaaaaaagagaaagccactgcccttgactaccagtgctgcaaggagtttatacacaagcacatgggtggtttcagtgagatctcagtgtgtcataattaagtgccctaggaggggctaggattcaagttggcccaggggagacttagacgtaggggaatggcctgtgagctgttcagtgtggacaggagtgaagagggttggtcacagtaaccttgagtctagattagggcagaagggctaatgcttgaaacaaacattctgcaagagcccactctgggcaatgttggatacacactgatctctgagacagtcttggtctcttcctttactgtgtttcctgtgcagtgggggaaacagacctgtcaccagacagtaatagatgaaaatggttagggctgtgaagggggaggcattggtcagagttattaacaccgactgatggggaagaccgggaattaggaataccaagcagcaagttccaagctagaaaccaaataagaaagggctagttccagcattaggtttacgtctcagaaaacgaaagccgaaccctcagcaggatttgcctgaaacactctcacagactgaggtggacccaggattcaactctcagtcaggcatttttctcacttaccaatgcatacaattgccaagttatatggcatactggaacccaaattcaggaggcagcacaatcccctatgagagaggaggggctgggagccagatgtctcacagctgtccagtatactagctaatatacggattaggatctgtgcaaagctcttttcttgcagggtcattttttttcttttttctttcttttcttttttttttttttttttgagacggagacttgcactgtcgcccgggccggagtgcaatggcatgatctcggctcactgaaacctctgcctcccgggttcacgcgattctcctgcctcaagcctcccaagtagttgggattacaggcacacaccgacatgcccggcttttttttttttttttgtattttgagtagagacggggtttcactatgttggccaggctgtctcgaactcctgacctcatgatccgtctgccttggcctccccaagtgctaggattacaggagtgagccaccgcgcccggccgcagggtgattttaaggcctttatgggcccaagttgcattataaaatgttatatcccagattcactggaatatgtacgatgagagcaggtggcattaatatcttgcagtaatgaactaattggtaaaaaccgttttgtttacattaaaatggttcaaaagccagcgacacagcgatgattgtttccatttagcagatgtggatactgaggcacagaaaacggtcaagccttctgcccacagtcaccagaaaggaggaaattcaagtctggggttgtgtggcttcagagcctgagctcaaccatgacgagcacactgaaaaggaaacccctcctaactaactcccgctccggggtcctttaagagcgtcagaacccagaactgagtaaaacaagatcaaagcgtatgtaaatacggactaggggctgccgggaaataatcactacggctaggccctagggaaagcagacgtcggagtcctagtgcgcctgcgtagccccatctcgcctttccgccccacggcctagcgaggcccatctctaacccacacaggcccaaagttgtctaatgtgcgcaggcgccctgctgtgagcccgcctccttctctgccctgctcttgcgctctcgctctctcagagttcgtctctggctctttgtacgtcacttcctgtttgtggcgcgagagggcggtatttccgtccagagggtgggagggggcggtaagcgggggctggggggagggggcggggggggccgcgccgtgctagccgttgggcctgcctcggaggaggcgtcgccgccgccgctgccgctgccggcgccgttgccgctgccgggaaacacaaggaaagggaaccagcgcagcgtggcgatgggcgggggtagagccccgccggagaggctgggcggctgccggtgacaggtgagtgcgccagcgcgtgtccccgaacgccccccccacgatggtcgcgtccgggccccccgcggtgccgcgatgggctgtaccacccgtgcccggcggggggaccgcggccctcgagcccctccttcaggagctgagtgggggtggccgagcgggggcggtgggaccagcctcggggggccggggcggtggcggcgggccataccactgaggcggtggggggagcgctgcaagtttgcgggacggggagcgcaggccgcagcgtgcgcgggccgggggctggacctttcgggcgcggcgggcagatcgagcctggcgtgcgcgggctaagctatcgagggggcgcgccgcatcaagtgtagagggctgtacctttttggcgctgtggaagccgttgctgtgctgtatttacaggggtgggggcttctggggaggatgcttccccaactgtggctgggttatatcaccacggcgttgggggagccctgcttagaacgtaggggaacccaaatcagaggactgtgatgtttgtgatctttaagggactgggacggggcgggacaggccctagtgggttttaggggcgtattttgggaggactgtgatgccgattggtgaggaggggtttctgtttcctgtatttgacgtgtgtggcgttgggggtttacactgatctcagcctttattgaacttcttaacgactctggagggaacgtcatggttactggggtgctttggaccatggaggtgctgctctggattccattaccctctcagattatttaccaggcagtaacagttctttccttccataggggagggaggaaagctgtgttagaagtcactgaagttgtctgagccttaacattctgaagaggaagagggattgggcttggatttgaggagccgtgcccct

SEQ ID NO: 3319 - DNA, 6000 bp, Homo sapiens
tgtaatcccagcactttgggaggctgaggtgggcagatcacttgaggtcaggagatcgacaccagcgtggtgaatatggtgaaacccgtcgctactaaatatacaaaaattagccaggcatggtggcacgtgcctgtagtctcagctacttggaggctgaagcagaattgcttgaacccgggaggcggaggttgcagtaagccgagatcatgccactgcactccagcctgggcgacagagtgagattctgtctcaaaattttaaaaaattaaaaaaaaaaattgtgcttctcagtggccctgctcctgtggctgcaatatggaggaagagtacaaagggtgggtacaaagactggcctctgtcttgctgttgggaaatccagctgccacgttgtgagcttgtgtctggaattggttccttctggtgggttcttggcgtcgctgacttcaagaatgaagccatgcaccctcgcagtgagtgtcacagttcttaaagatggtgtgcctggagtttgttccttcagatgttcagatgtatctggaatttcttccttctggtgggtttgtagtctatgctgagttcaggagtgaagccacagaccttcgcggtgagtgttacagctcataaagataatgtggacctatagaatgtgcaacagcaaaatttattgcaaagagcaaaagaacaaggcttccacagcatggaaggcgccctgagccagttgcagctgctggctagggtggcctgcttttatttccttatttggtcccacccacatcctgctgattgatccattttacagatagctgattggtccattttacagagtgctgattggtctgttttacagagtctgattggtccgtttttacagagagctgattggtgcgtttacaaatctttacctagacacagagcgctgattggcgtgcttacaatcctttagctagacacagagcgctgattggtgcatttacaatcctttagctagacagaaaagttctccaagtcccctacctgattagctagacacagagcactgattggtgtgtttacaaacctttagctagacacagagtgctgattggtgcatttacaatcctttaggtagacagaaaagttctccaagtcctcaccggcccagaggcccagccatcttcacctctcaagctgtctgtagaggtccacgtgtcaagaaaactgaggacagaggccctcagtccagttcccacaagcaactgcatctccccaacagctgcctgaatgagtttggaagcagtcctcccaccattcagccttcagatgaaactgcacccctggctgacaggctgattgcagccttatagcagaccttaagcctgagacattcgacccacagaaaaggtgataattttggtctttttttttctaaacaggttcttgctctagagtgcagtggcacgatcatggctcactgcggcctctacatcctgggttcaagtggtcctcccacctcaacctcctgagtggctgggactacaggtttgtaccaccatgcacagctagtttttctctttttttcttctttttgtaggtacaagggtctccctgtgttacttaggctggtctcaaattcttaggctctagcaatcctcctgtctcagcctcccaaagtgttgggattacaggcatgagccactgcactggggcaatgttggtcttaggctaattatgcagcaggagatacatgcactgtgctttgggaattgaagtcacttctatttctttgtggcttcatcagtaatatggggcagggggcacggttcccacagctgattcttgagtgttctttctgagtatccttaatacttcacacactatcatatatctgaactttgttcattgattatctcccctttaattttcattccttgatgaatctccagggtctggattaagtcctaggatactttatgtactcatgaaatcttcaatgaatgaagaaatgattttttttttttttgagacagagtctcactctgtcacccaggctggagtgcagtggcatgatcttggctcattgcaacctccacctcccaggttcaagcaattcttctgcctcagcctcctgagtagctgggactacaggcatgcgccaccatgcctggctcatttttgtatttttcagtagtgacagggtttcaccatattggccaggctggtcttgaactcctgacctcaggtgatccacccacctcagcctcccaaagtgctgggattacaggtgtgagccactgcatccggcggatttttttttttttttttttgagacagggtctcactctctcgttcaggctggagtgcagtggcgtgatcttggctcactgcagcctccacctcccagtttcaagtgattctggttcggcctcccaagtagctgggactacaggtgtgtgccaccatgcctgtctaatttttgtattttcaccacgttggccaggctggtctcaaaactcctgacctcaagtgatccgcctgcctcagcctcccaaagtgctgggattacaagagtgagccaccatgtctggcctgaatgaagaaataattttttaaagagtgttttaaagtggggccgggtgcggtggctcacacctgtaatccccacacttttggaggccaaggtgggtgggtcacttgaggtcaggagtttgacaccagcctgaccaacatggtgaaaccccatctctactaaaaatacaaaattagctgggcatggtggcagatgcctgtaatccccgctacttgggaggctgaggcaggagaatcacttgaacccgggagggggaggtcacagtgagctaagatcgtgccattgcactccagcttgggtgacaagagcgaaacaatgtctcaaaaaaaaaaaaaaaaaaaaagaaattgcatttcaaagccaggtgcagtggctcacacttatagtcacagctacttaggaggctgcggtgggagaatagcttgagcccagttgttcaaggctgagtgagctgtgattgtggcactgcactctagtctgggtgacagagtgagaccctgcctgtaaaaaaaaaaaaatctttcaggccagacgcggtgactcactcctataatcccagcactttggaacgccgaggcgggtggatcacctgaggtggggagttcgagaccagcctggccaacatggacaaaccctgtctctactaaaaatacaaaaatagccgggcatggtggcacatgcctgtaatcccagctactcgggaggctgaggcaggagaattgcttgaactcgggaggtggaggttgcagtgagctgagattgtaccactgcaatatgagactccatctcaaagaaaaaaaagaaaaaaaaaaaaagatagcatagcaatggctgtgggcctggatacaagtcttagcctctccacttctccacttcctggctctgtaagccttagacaagttccttaactccacacttccatttccatgtaacaaggggttataggccaggcattggtggctcatgcctgtaatcccagtgctttgggaggccaaggcgggaggatacttggggacaagagttcaagaccagcccaggcagcacagtaagacattggctctagaaaaataaaaataaaagaaatcatccaagaatggtgacttgcctactattctactcgagaggctgagaggggaggatttcttgagcccaggagtttgaggatgcagtgagctatgatcacatcactgtacttcagcctgagcaacagcaagatcctgtctcaaaaaattaaattaggctgggcttggtggctcatgcctgtaatcccagcactttggaaggccatggtgggcagattgcttgagcccaggagtttgagacgaggctgggcaacatgacgaaaccccggctctaccaaaaaatacaaaaaattaactgggcataatggtacatgtctgtggtcccagctactcggtaggctgaggtgggaggaatgcttgagcccaggaaataggggctacagtgaaccaggatcatgccagtgcactccaacctgggcaacagagcaagactctacctcaaaataattatttaaaaaaatggattaattgggcataggtggcttgtgcctgtagtcccagttactcaggaggctgaggtgggaggattgcctgagtctaggaggttgaggctgcagtgagccgggatggcaccattgcactccacctgggcaacagggtgagaccctgtctcaaaaaagaaaaaaaagggaggggttataatcactcctcctgacatgatacagagtatccatttgagttcataacataaatatgtacttggtgaatgctctgtaactattggcttttttattgttcccattttacatataaggaagctgaggctttgtgaggagaaatagcttagcccaggtcatccagtgggaagcgtctggtgcagaggaatagtgatcatggtgggactttgcctagcctaaggttcagcatacaatattcagtcagtactcaagggctgggctgtttctggtaatcaaagggctgccttgttctcctgccccacagcacaggaaattccaaggtggttttctttacaggctcctccgcttctgtggccagaggggacagcggaggagcccaggtacctaagccaactcaagagaagatggaattgaatatttcaaccaccttatctaggcctctgtgattgttgaggagggggctgtcactgggaaagttgtgagctgctttggaccttatctgggaatttccttgggcttacagcctttaccctatccttgaaatggttctggtttcatagcaacttctaggtggtgtgggcgaagtttgggactggtttagggcggggacaagaccaagaacacaagtttccttgtactacgggagagagggaggggaggaaattggagaccccagcacccccttgctcactctcttgctcacagtccacgatggcccggtccctggtgtgccttggtgtcatcatcttgctgtctgccttctccggacctggtgtcaggggtggtcctatgcccaagctggctgaccggaagctgtgtgcggaccaggagtgcagccgtaagaatggggaggggagaattgggggcttgggcgttagcctgtgtggagggtgctgcattcccttctattccttccctagaccctatctccatggctgtggcccttcaggactacatggcccccgactgccgattcctgaccattcaccggggccaagtggtgtatgtcttctccaagctgaagggccgtgggcggctcttctggggaggcagcgtgagtcttgggagagtgaaagagggaagggtacagagctggggtagactcattatccccatgaagggaagatttgaggggggtgaactgaaatagacattgtggggggatattgttacttactttattttatttgcttattattttttaattttttccgagacagagtcttgctctgtcacccaggctggagtgcaatggcacgatctcggctcactgtaacctccacctcttgggtttaagcgattctcctgcctcagcctcccaagtacctgggattacaggcatgcaccaccacacctggctaatttttgtatttttagtagagacagggttttaccatattggccaggctggtcttgaactcctgacctcatgatctgcccgccttggcctcccggagtgctgggattacaggtgtgagccactgccccccagcctattttcactttatttaccaattttaggacctgatatggtcccacgttctgttctagacaccaagatacaacaacaaatgatcctttttattctaatggagggaaatgaacaaaaagcaaggcataaaaaatagcagcagccgggcacagtagctcacacctgtaatcccaagtaaggccaagttgggaggatagcttgagcccaggagttcgagac

SEQ ID NO: 3320 - DNA, 6000 bp, Homo sapiens
ggccctgctcctgtggctgcaatatggaggaagagtacaaagggtgggtacaaagactggcctctgtcttgctgttgggaaatccagctgccacgttgtgagcttgtgtctggaattggttccttctggtgggttcttggcgtcgctgacttcaagaatgaagccatgcaccctcgcagtgagtgtcacagttcttaaagatggtgtgcctggagtttgttccttcagatgttcagatgtatctggaatttcttccttctggtgggtttgtagtctatgctgagttcaggagtgaagccacagaccttcgcggtgagtgttacagctcataaagataatgtggacctatagaatgtgcaacagcaaaatttattgcaaagagcaaaagaacaaggcttccacagcatggaaggcgccctgagccagttgcagctgctggctagggtggcctgcttttatttccttatttggtcccacccacatcctgctgattgatccattttacagatagctgattggtccattttacagagtgctgattggtctgttttacagagtctgattggtccgtttttacagagagctgattggtgcgtttacaaatctttacctagacacagagcgctgattggcgtgcttacaatcctttagctagacacagagcgctgattggtgcatttacaatcctttagctagacagaaaagttctccaagtcccctacctgattagctagacacagagcactgattggtgtgtttacaaacctttagctagacacagagtgctgattggtgcatttacaatcctttaggtagacagaaaagttctccaagtcctcaccggcccagaggcccagccatcttcacctctcaagctgtctgtagaggtccacgtgtcaagaaaactgaggacagaggccctcagtccagttcccacaagcaactgcatctccccaacagctgcctgaatgagtttggaagcagtcctcccaccattcagccttcagatgaaactgcacccctggctgacaggctgattgcagccttatagcagaccttaagcctgagacattcgacccacagaaaaggtgataattttggtctttttttttctaaacaggttcttgctctagagtgcagtggcacgatcatggctcactgcggcctctacatcctgggttcaagtggtcctcccacctcaacctcctgagtggctgggactacaggtttgtaccaccatgcacagctagtttttctctttttttcttctttttgtaggtacaagggtctccctgtgttacttaggctggtctcaaattcttaggctctagcaatcctcctgtctcagcctcccaaagtgttgggattacaggcatgagccactgcactggggcaatgttggtcttaggctaattatgcagcaggagatacatgcactgtgctttgggaattgaagtcacttctatttctttgtggcttcatcagtaatatggggcagggggcacggttcccacagctgattcttgagtgttctttctgagtatccttaatacttcacacactatcatatatctgaactttgttcattgattatctcccctttaattttcattccttgatgaatctccagggtctggattaagtcctaggatactttatgtactcatgaaatcttcaatgaatgaagaaatgattttttttttttttgagacagagtctcactctgtcacccaggctggagtgcagtggcatgatcttggctcattgcaacctccacctcccaggttcaagcaattcttctgcctcagcctcctgagtagctgggactacaggcatgcgccaccatgcctggctcatttttgtatttttcagtagtgacagggtttcaccatattggccaggctggtcttgaactcctgacctcaggtgatccacccacctcagcctcccaaagtgctgggattacaggtgtgagccactgcatccggcggatttttttttttttttttttgagacagggtctcactctctcgttcaggctggagtgcagtggcgtgatcttggctcactgcagcctccacctcccagtttcaagtgattctggttcggcctcccaagtagctgggactacaggtgtgtgccaccatgcctgtctaatttttgtattttcaccacgttggccaggctggtctcaaaactcctgacctcaagtgatccgcctgcctcagcctcccaaagtgctgggattacaagagtgagccaccatgtctggcctgaatgaagaaataattttttaaagagtgttttaaagtggggccgggtgcggtggctcacacctgtaatccccacacttttggaggccaaggtgggtgggtcacttgaggtcaggagtttgacaccagcctgaccaacatggtgaaaccccatctctactaaaaatacaaaattagctgggcatggtggcagatgcctgtaatccccgctacttgggaggctgaggcaggagaatcacttgaacccgggagggggaggtcacagtgagctaagatcgtgccattgcactccagcttgggtgacaagagcgaaacaatgtctcaaaaaaaaaaaaaaaaaaaaagaaattgcatttcaaagccaggtgcagtggctcacacttatagtcacagctacttaggaggctgcggtgggagaatagcttgagcccagttgttcaaggctgagtgagctgtgattgtggcactgcactctagtctgggtgacagagtgagaccctgcctgtaaaaaaaaaaaaatctttcaggccagacgcggtgactcactcctataatcccagcactttggaacgccgaggcgggtggatcacctgaggtggggagttcgagaccagcctggccaacatggacaaaccctgtctctactaaaaatacaaaaatagccgggcatggtggcacatgcctgtaatcccagctactcgggaggctgaggcaggagaattgcttgaactcgggaggtggaggttgcagtgagctgagattgtaccactgcaatatgagactccatctcaaagaaaaaaaagaaaaaaaaaaaaagatagcatagcaatggctgtgggcctggatacaagtcttagcctctccacttctccacttcctggctctgtaagccttagacaagttccttaactccacacttccatttccatgtaacaaggggttataggccaggcattggtggctcatgcctgtaatcccagtgctttgggaggccaaggcgggaggatacttggggacaagagttcaagaccagcccaggcagcacagtaagacattggctctagaaaaataaaaataaaagaaatcatccaagaatggtgacttgcctactattctactcgagaggctgagaggggaggatttcttgagcccaggagtttgaggatgcagtgagctatgatcacatcactgtacttcagcctgagcaacagcaagatcctgtctcaaaaaattaaattaggctgggcttggtggctcatgcctgtaatcccagcactttggaaggccatggtgggcagattgcttgagcccaggagtttgagacgaggctgggcaacatgacgaaaccccggctctaccaaaaaatacaaaaaattaactgggcataatggtacatgtctgtggtcccagctactcggtaggctgaggtgggaggaatgcttgagcccaggaaataggggctacagtgaaccaggatcatgccagtgcactccaacctgggcaacagagcaagactctacctcaaaataattatttaaaaaaatggattaattgggcataggtggcttgtgcctgtagtcccagttactcaggaggctgaggtgggaggattgcctgagtctaggaggttgaggctgcagtgagccgggatggcaccattgcactccacctgggcaacagggtgagaccctgtctcaaaaaagaaaaaaaagggaggggttataatcactcctcctgacatgatacagagtatccatttgagttcataacataaatatgtacttggtgaatgctctgtaactattggcttttttattgttcccattttacatataaggaagctgaggctttgtgaggagaaatagcttagcccaggtcatccagtgggaagcgtctggtgcagaggaatagtgatcatggtgggactttgcctagcctaaggttcagcatacaatattcagtcagtactcaagggctgggctgtttctggtaatcaaagggctgccttgttctcctgccccacagcacaggaaattccaaggtggttttctttacaggctcctccgcttctgtggccagaggggacagcggaggagcccaggtacctaagccaactcaagagaagatggaattgaatatttcaaccaccttatctaggcctctgtgattgttgaggagggggctgtcactgggaaagttgtgagctgctttggaccttatctgggaatttccttgggcttacagcctttaccctatccttgaaatggttctggtttcatagcaacttctaggtggtgtgggcgaagtttgggactggtttagggcggggacaagaccaagaacacaagtttccttgtactacgggagagagggaggggaggaaattggagaccccagcacccccttgctcactctcttgctcacagtccacgatggcccggtccctggtgtgccttggtgtcatcatcttgctgtctgccttctccggacctggtgtcaggggtggtcctatgcccaagctggctgaccggaagctgtgtgcggaccaggagtgcagccgtaagaatggggaggggagaattgggggcttgggcgttagcctgtgtggagggtgctgcattcccttctattccttccctagaccctatctccatggctgtggcccttcaggactacatggcccccgactgccgattcctgaccattcaccggggccaagtggtgtatgtcttctccaagctgaagggccgtgggcggctcttctggggaggcagcgtgagtcttgggagagtgaaagagggaagggtacagagctggggtagactcattatccccatgaagggaagatttgaggggggtgaactgaaatagacattgtggggggatattgttacttactttattttatttgcttattattttttaattttttccgagacagagtcttgctctgtcacccaggctggagtgcaatggcacgatctcggctcactgtaacctccacctcttgggtttaagcgattctcctgcctcagcctcccaagtacctgggattacaggcatgcaccaccacacctggctaatttttgtatttttagtagagacagggttttaccatattggccaggctggtcttgaactcctgacctcatgatctgcccgccttggcctcccggagtgctgggattacaggtgtgagccactgccccccagcctattttcactttatttaccaattttaggacctgatatggtcccacgttctgttctagacaccaagatacaacaacaaatgatcctttttattctaatggagggaaatgaacaaaaagcaaggcataaaaaatagcagcagccgggcacagtagctcacacctgtaatcccaagtaaggccaagttgggaggatagcttgagcccaggagttcgagaccagcctgggcaacatagcaagacccccatctctataaaaaaaaatttaaaattaactgggcttcatggcatgtgtctgtggtcccggctactcgggaggctgaggtgggaggattgcttgatcccagaagttgaggctgcagtgagccgtgatcatgctactgcacctcaacctgggcgacacaatgagaccctgtttccaaaataataataataataaaagcaaatatgcgctgctgtgagaattaacagagacttacttgggtgttcagaaagggcctctgaacaggtggcat

SEQ ID NO: 3321 - DNA, 6000 bp, Homo sapiens
agatgcctgtaatccccgctacttgggaggctgaggcaggagaatcacttgaacccgggagggggaggtcacagtgagctaagatcgtgccattgcactccagcttgggtgacaagagcgaaacaatgtctcaaaaaaaaaaaaaaaaaaaaagaaattgcatttcaaagccaggtgcagtggctcacacttatagtcacagctacttaggaggctgcggtgggagaatagcttgagcccagttgttcaaggctgagtgagctgtgattgtggcactgcactctagtctgggtgacagagtgagaccctgcctgtaaaaaaaaaaaaatctttcaggccagacgcggtgactcactcctataatcccagcactttggaacgccgaggcgggtggatcacctgaggtggggagttcgagaccagcctggccaacatggacaaaccctgtctctactaaaaatacaaaaatagccgggcatggtggcacatgcctgtaatcccagctactcgggaggctgaggcaggagaattgcttgaactcgggaggtggaggttgcagtgagctgagattgtaccactgcaatatgagactccatctcaaagaaaaaaaagaaaaaaaaaaaaagatagcatagcaatggctgtgggcctggatacaagtcttagcctctccacttctccacttcctggctctgtaagccttagacaagttccttaactccacacttccatttccatgtaacaaggggttataggccaggcattggtggctcatgcctgtaatcccagtgctttgggaggccaaggcgggaggatacttggggacaagagttcaagaccagcccaggcagcacagtaagacattggctctagaaaaataaaaataaaagaaatcatccaagaatggtgacttgcctactattctactcgagaggctgagaggggaggatttcttgagcccaggagtttgaggatgcagtgagctatgatcacatcactgtacttcagcctgagcaacagcaagatcctgtctcaaaaaattaaattaggctgggcttggtggctcatgcctgtaatcccagcactttggaaggccatggtgggcagattgcttgagcccaggagtttgagacgaggctgggcaacatgacgaaaccccggctctaccaaaaaatacaaaaaattaactgggcataatggtacatgtctgtggtcccagctactcggtaggctgaggtgggaggaatgcttgagcccaggaaataggggctacagtgaaccaggatcatgccagtgcactccaacctgggcaacagagcaagactctacctcaaaataattatttaaaaaaatggattaattgggcataggtggcttgtgcctgtagtcccagttactcaggaggctgaggtgggaggattgcctgagtctaggaggttgaggctgcagtgagccgggatggcaccattgcactccacctgggcaacagggtgagaccctgtctcaaaaaagaaaaaaaagggaggggttataatcactcctcctgacatgatacagagtatccatttgagttcataacataaatatgtacttggtgaatgctctgtaactattggcttttttattgttcccattttacatataaggaagctgaggctttgtgaggagaaatagcttagcccaggtcatccagtgggaagcgtctggtgcagaggaatagtgatcatggtgggactttgcctagcctaaggttcagcatacaatattcagtcagtactcaagggctgggctgtttctggtaatcaaagggctgccttgttctcctgccccacagcacaggaaattccaaggtggttttctttacaggctcctccgcttctgtggccagaggggacagcggaggagcccaggtacctaagccaactcaagagaagatggaattgaatatttcaaccaccttatctaggcctctgtgattgttgaggagggggctgtcactgggaaagttgtgagctgctttggaccttatctgggaatttccttgggcttacagcctttaccctatccttgaaatggttctggtttcatagcaacttctaggtggtgtgggcgaagtttgggactggtttagggcggggacaagaccaagaacacaagtttccttgtactacgggagagagggaggggaggaaattggagaccccagcacccccttgctcactctcttgctcacagtccacgatggcccggtccctggtgtgccttggtgtcatcatcttgctgtctgccttctccggacctggtgtcaggggtggtcctatgcccaagctggctgaccggaagctgtgtgcggaccaggagtgcagccgtaagaatggggaggggagaattgggggcttgggcgttagcctgtgtggagggtgctgcattcccttctattccttccctagaccctatctccatggctgtggcccttcaggactacatggcccccgactgccgattcctgaccattcaccggggccaagtggtgtatgtcttctccaagctgaagggccgtgggcggctcttctggggaggcagcgtgagtcttgggagagtgaaagagggaagggtacagagctggggtagactcattatccccatgaagggaagatttgaggggggtgaactgaaatagacattgtggggggatattgttacttactttattttatttgcttattattttttaattttttccgagacagagtcttgctctgtcacccaggctggagtgcaatggcacgatctcggctcactgtaacctccacctcttgggtttaagcgattctcctgcctcagcctcccaagtacctgggattacaggcatgcaccaccacacctggctaatttttgtatttttagtagagacagggttttaccatattggccaggctggtcttgaactcctgacctcatgatctgcccgccttggcctcccggagtgctgggattacaggtgtgagccactgccccccagcctattttcactttatttaccaattttaggacctgatatggtcccacgttctgttctagacaccaagatacaacaacaaatgatcctttttattctaatggagggaaatgaacaaaaagcaaggcataaaaaatagcagcagccgggcacagtagctcacacctgtaatcccaagtaaggccaagttgggaggatagcttgagcccaggagttcgagaccagcctgggcaacatagcaagacccccatctctataaaaaaaaatttaaaattaactgggcttcatggcatgtgtctgtggtcccggctactcgggaggctgaggtgggaggattgcttgatcccagaagttgaggctgcagtgagccgtgatcatgctactgcacctcaacctgggcgacacaatgagaccctgtttccaaaataataataataataaaagcaaatatgcgctgctgtgagaattaacagagacttacttgggtgttcagaaagggcctctgaacaggtggcatttaagctgagattcatatgacaaggatggagcagttatgtggagatcagggagaagggagaatgcaaaggccttcagcaggcacaagcttgccatcttcccagaccctagcttttaactcctcttccccaggttcagggagattactatggagatctggctgctcgcctgggctatttccccagtagcattgtccgagaggaccagaccctgaaacctggcaaagtcgatgtgaagacagacgtgagtgtcatgggggctggcaagaaatgtggggggaggacccttaggttgtggggatgggcaaaaatgctcccacacttggctccctggcagcctaggtatgtgcgctgggagaaattctttccctgcctcaattttctcaccagtaaaatgggtccagttgggaggtgcaaagattagagggctctaggctaatttgcatagcacttgtgtggccagacctgggccctgcagctgcagcctttgctaaaaccactagatcctttgtggtgtgaccgctggttttctttccactgtttcccctttctctttttcagaaatgggatttctactgccagtgagctcagcctaccgctggccctgccgtttcccctccttggctttatgcaaatacaatcagcccagtgcaaacggctcgtctccgtggtctttggggtggggtagggtagggtggggactgtacaaatgaaatgtttctctaggttgctgaatctaaccaattaacccgctgcctgtggtaacgtcagtggttgctaggcagagtttcactgatgaaagccctgtgcagtaggagcgctcctaagcttaggtttcggacacaagcaaaggaaaacctaagcagcccaactaggggattgtagtgtcctctctagaccagtgggagggagccaatcggactacgcggaggatataaatcgcacagtaaaggttttcttggaagattatctggaaagggaggtgggaagtaacctgcgcctatctgcccagttttcctccttttcgcctttgagaacagtaatcgctcccgccagctcaagatcagctcctcttccagcctctttctgtcaatcctgcccgtgcccccttctttgcatttgtatcccctcccccaagtccgctccgatccaatccggagactcgactctgccccccgtactccagactaaatccgttcctcggctcagctaagcagctctgcacgtcccttcccacttgctcagccaatcgctgggctcggccccgcccctttgggcttggtccttctcacgccaccaatccgcgcctcttgtcccgccccctgcccgcgagtccgccaatcccgcccttcggaaagcgtcgcctggtatccagctgccggagcgggtcgcgccggaggggggcggaggcggaagtggcggtgccgggcccggggagtaggaaggagccggggctgtagccggagtggagcggctgccagccgaggagcaggcgcggccgcggcgccatattgcggccctcagcggccgcgaccgagtcatggctgagacctacggtgagggtggtggacgaagctggggtcctgggtctgggcccagggaggatgcggcctgtgggaatgggcggggctttgtagatcagggggcggggtctggtgtgatggaggcaggacctaagtggatgctgggaggggtttagtgggtctgaggctgagcttaatcgatttaggtggagcctgagggtctggtgcgtgggttaaatagatctggggcgggatttgagggagctggtcctgaggggttcagggaggccctgagggaagaggtgggccttaatggatctgggcggagcctgagtgaaggggcggggctgactgcatgaatggcaggagtcgggcttatgggctagagggaacactgaatggaagctcgggaccctggggctgatctggctggagagagctctggaatgggtttggggatgggctgtccttgagttaggggcaggacttagtggcaaagggtgggacttatgcatgagaatggagccgggttctgggcagagggagggaaggagaggtcgggaagtggaaaatcagtagggatgcaccataggaggtggtgattggaggcaggggaagtgcaggtttaggagtcagagggagccgcattcactcaacaaatatagaagagaagggagaagagtgcaaagaccctgaggtgagaaccagcttgtcattttcagggaatagactgaaggtcaggagctatagtggagtgaatgagtcagagggtggtaggaggtgaagaggaacaagggctatatcgtagtccttgtttaaatagctttcaagagactttagcgacaaaatagctaagatctgggactctggagcccttggcctaggtttgaatctcacttctgcccagctgtgtcactttgggcaagtcagttaacctttctgg

SEQ ID NO: 3322 - DNA, 6000 bp, Homo sapiens
tgaaccctgcccctgggtagtgccgtgtgctggggtgttttgtgtatacagccaggaccaagacagacccagacctgccgtcatggggctcacagcccagcagaaatcctgagcactgaggatatctgacatgtcctttttaatttttatttttatttatttacttttttttttttttttgagatggagtctcgctctgttgctcaggctggagtgcagtggcacgatctcggctcactgcagccttcgcctgtcgagttcaagcaattctcctgtctcagcctcctgagtagctgggactacaggcacctgctaccaagcccagctaacttttgtatttttagtagagacagagtttcacatttcaccatattggtcaggctggtctcgaactcctgacctcaagtgatctgcctgcctcggcctcccacagtgctgagattacaggcatgagccacggcgcctggctatcctttatttatttatttatttatttattgagacaaagtcttgctctgtcgcccaggctggagtgcagtggcgcgatctcggctcactgtaagctctgcctcccaggttcaagcaattcttctacctcagcctcctgaatagctgggattacaggagtgcgccaccacgtccagctaatttttgtatttttagtagagatggtattttaccatgttgatcaggctggtctcaaactcctgacctcatgatccacccgcctcagcctcacaaagtgctgggattacagacgtgagccactgtgcctggcccctttttatttatttgtgttctttttgagatggagtcactgtcacccaggctggagtgagtgcagtggcacgatctcacttcactgcaacctccgcctcctgggttcaagtgattctcctgcctcagcctcctgaatagctgggattataggtgcccgccaccacaccagctaatttttgtatttttagtagacatggggtttcaccatgttggccaggctggtcttgaactcctgacctcaggtgatctgcctgcctcagcctcccaaagtgttgggattacaggcatgagccaccgtgcctggccctgacatgtccttttagtcattcagcaaactttttttttttttttttttttttgagacagtctcactctgtcacctaggctggagtgcagtggcgtgatctcagctcactgcagcctccacttcctgggttcaagtgatcgtcctgcctcagcctccctagtagctgggactacaggcacatgccaccacacccagttagttttgtatttttagtagagacggggtttcaccacgttggccaggctggtcttgaactcctgacctcaggtgatccgcctgccttggcctcccaaagtgctgggattacaggcatgagccactgcacccagcctcaacaaacatttttgaggcctggcattggcaagaggcagagaggaatcaggagagcttctggtcctataacaattggagctgctatttgtcatccttatcataagccaagcactagtgtaagtgctgcatgtggttggcttcatccattacatttaatattattcagtgtcctcgtcaccttactggtccatcactctgccctcatctctacccctttcctgtcagtcactctgcaccagccttcttgctattccttaagcatgccatgcatgttcctaccacagggcctttgcacgtgctagcccctgtgctttgaacactctcccccagatatccacatgaatccctcacctcctttgactccctgttcaaatggcacctctcagaccctgatcttcctaacccaaactatcttccgaactccttctcgttatcctgctctatcctgtaatactgccatcaccatcagacataatatttgcttatctgttttccatctgtctcctcacttggatttccttgatggcaagggctttttgtctgctgtgtgccttgctatgtccctagcttttagagcagtgcctgacactgttacgctgtgtgtaataactgtaaattgaagagccaggcacagtggctcacgcctgtaatcccagcgctttgggaggttcgggcagaaggatcacttgaggctaggaggtcaagatcagcctgggcaacagcaaaatcccatgtcttaaataaaagaaagaagaccgggtgtggtggctcacgcctgtaatcccagcactttgggaggccaaggcaggcggatcacgaggtcaggagattgagaccatcctggctaacacggtgaaaccctgtctctactaaaactacaaaaaattagccaggcatggtggcgggcgcctgtagtcccagctactcgggaggctgaggagcagaatggcgtgaacccgggagtaggagcttgcagtgagccgagatcgcgccactgcactccagcctgggtggcagaggaagactccatctcaacaaaaaaaaaaaaagaaagaaatagggctgggcacagtggctcacgactgtaatcccagcactttgggaggccaagacaggcggatcacctgaggtcaggagttcaagaccagcctggacaacatggtgaaaccccatctctactaaaaaaaaaaaaaaaaaaagaaagaaagaaatgtagtcccagcactttgggaggctgaggtaggcagctcgcttgaatccaggagtttgagaccagcttgggcaacatggtgaaacctcatctctgctaaaaacacaaaaattaggccaggcatggtggcgcacacctgtggtcccagctcaccagctgtgtggcctcaggcaactgacttcatctctctgagcttcagtttcccgtctgtaaagtgggtctaataataggacggtcatgagtattaaataaaatgatgttaatagttagttgccctttggccaggtgcactggctcagcctaagcaacagatcctctctctacaaaaatagaaaacaggctgggcgcagtggctcatgcctgtagtcccagctacttgggaagctgaggcaggagaatcgcttgaacccgggaggcagagattgcagtgagctgagatcgcaccactgcactgcagcctgggtgacagagcgagactccatctctcaaaaaaaaaaagaaagaaaagaaaagaaaacattagccggatgcggtggtgtgtgcctgtagtcccagctactctggaggctgaggtgagaggatccccttagtccaggaggttgaggctgtggtgaaccatgttcctgccactgcactccaacctcggtgacagagtgacaccctgcctcaaaaaaaaaaaaaaagttcacatttgtatatagcacccacatgtgccaggccctgttctaagaattttgtgttttaaatatttgtgtctattaatttgtgtgaccttggagaaattaattttgccgggtttcagttttctcatctgctatgtggggatcaataacaccatatacttcacacaattgttgtgaacattcaacttacagagttatttctttttctttttgagacaaggtctcactctgtcacccaggctggagtgcaatagcgtcatcacagctcactgcagcctcaacctcccaggctcaagcaatcctcctgcctcggcctcccaaagtattggggttacaggtgtgagccaccgtgcctagccagaacacccaaattttatacaagcaaaggaaagacaacaaaccctgcatctgtggtctgagagcgcctggcatccaacttagaacctaatagatcacctagtcgttctcaggaatatgagaggcttaggaatgtgatctagccaaatggctgcccctctttcagcctgagtcccttctgcaataatcctatcatatgcttctggcgctggtgatagggatgagctcagggtttaggcacacagctcaggatgtatacggaggctacactgctgccattcgcagactgaataactgagcttttgagctcaaagtggtctgggctatttatgggtaactttcaggggctgcagggaggaacaaaccaataaataaaacatccatgcattcatccaataaacttttttttttttgagatgggagtctcgctctgttgcccaggctggagtgcagtggcacgatctcagctcactgcaacctccgcctcccaggttcaagctattctcctgcctcagcctccggagtagctggcattacaggcgcacaccaacacgcccagctaatttttgtatttttagtagagatgggatttcaccatgtcggtcaggctggtctcgaaatcctgacctcgtgatgtgcctgcctcggcctcccaaagtgctgagattacaggcatgaaccaccgcgcccggcctccaataaacatttattgggcacctacggtgttccaggcgctggtctaggcgttggggttacaacaacgcacaaaacataaattctgaagctgacacgctagctttaaacgttccttaaatatcttcatcctcaatttacggttgaggaaactgaggtgtagcgagaccttggaggtttccgaaatattattatggatggcaggtgtagagccctgccaacctctcgatcctgaagctccccttccagcctgagaaacggcaggttcaagtcccactgggagaccaaagcggggagcggctcagtttgccggcttgctcaatgggtaaggcgtgatggctctaagcaggcctcagttgtctcgtccagagcaatgggcagcgacgcctgcccaacccctcctgagcgcccagcctccctttcccggccggccccgcccccgcgatcacgtgacgcgtgggggttttcccgttccccaggcgtgacgtcacggcggggtgcagaccaatgggcgcgcaggccggcggcgccggggaattccgccgccccgcccccgcccgccgcccgcccggcccggccccgcgccccgcgcagccccgggcgccgcgcgtcctgcccggcctgcggccccagcccttgcgccgctcgtccgacccgcgatcgtccaccagaccgtgcctcccggccgcccggccggcccgcgtgcatgcttcggtctgggccagcctctgggccgtccgtccccactggccgggccatgccgagtcgccgcgtcgccagaccgccggctgcgccggagctgggggccttaggtaagcggggctggggttcaggagaggggtctggggcggggctggagatgcggggattctggcggtcccggagtagtctgggggttcctatgggagtctaagggtttcgcgggggcagagtgagggttcctgagacactgtattagggcgtaggaagaaggcagagggtgatgagggggtacggcccgaggttcgagcgaggcgtcccgctgtagagtgagagggggcggggcctgaccctgaggcaaagaagggggcgtggcctgactcagagaaggcggagcgaaagctgctcttgggcggtatcggggcggggccgggcccagagagggagaagaggggcgggatccgacccggactatgagaagagggccgggcctgactcaaaaaaggaagcagggccctacgctgaggggtgagggggcggggcctggccgtgagggcaggaagggggcggggcctgagttggccgaaagaaggggaaggggcggggcctgactctggccgagtggaggggaagggcctgttacccaaaaaagcagggcggggcccgacacagagaatgaggagggggtggggcttgcctccagacggagaagcggagccttgacattgaaaaaattaaaagtggtctgaccctgacaggaggatgtttttttttgtttgttttttgtttttttcttttgagatggagtctcgctctgtcgcccaggctggagtgcagtggcacgatctaggctcactgcaacctctgcctcccgggctcaagcagttctcctgcctcagccccccgagtagctggaattacaggtgcccgccaccaca

SEQ ID NO: 3323 - DNA, 6000 bp, Homo sapiens
agatgctgaaaggtgtgatgctgccttgagttgtgacggtctctaagtgaaagaaaggcagatgggccacggttttcttggagtgaatcaccattggatggtggatggtgaaaagggaaaatgacatacacttatataataataatgatgatgatgatgatgatagcgactgtttactgagcacttaccatctaccagccttacgctatgtgcttcacatatgcaatctcatctaatgcacaaaacccagagaggtagatcttcctgcctccatgtttcagacaagcaggctgaggctcagagtagtgaaataactcgcctgaggattccacaccaagcacatgacggtggcaagatatgaatcctgaaagagctcattctaggaggggctcttaacctggtgatgttgacttcgtgataaagaatgtggccgggcgtgctggctcacgcctgtaatcccagcactttaggaggcctaggtgggtagatcacctgaggtcaggggttcgagatcagcctggtcaacatgatgaaaccccatctctactaaaaatacagaagttagccaggcgtggtggcacatgcctgtaatcccagctacttgggaggctgaggtacgagaattgcttgaactcaggaggtggaggttgcagtgagctgagatggcaccactgcactccagcccgggcgatacagcgagactctgtctcagaaaaacagaacaaaacaaaacaaaataaacaacaacaacaaaaaacaaagaatgagggatgtggctgggaatggtggctcacacctgtaatcccagcaccttgagaggatgaagtgggtggatcacctgagatcaagaatttgagaccagcctgggcaacatagcaagaccctgtctctacaaaaaaattcaaagaattagtcaggcttggtggtgcacacctgtagttccagctactggggaaactgagatgggagcatcacctgatcctgagaggtcaaggttgcagtgagccatgactgcaccactacactccaagcctgggtgacagagtgagaccctgtctcagaaaaaaaaaaaaaaaaaaaaaaaaaaaagagggatgttaggagcaagatctggctggtgtaagctacgttgagggtgtgagatatgtatgtatgtctgtatatgggtttttattttgggggggttgacagaggtgggaatatagtcaggagtacaggggtcattattgttgcagcttaagagttacgatctgtatcaagggggccactgtttgttattgtcctgccagactggggtcatttatttctgcaaggagtccctgactagagtttccgtccaacctcttcacccaagtcttcctgcccttagtgccttgttttcctcccagcggcatctgccagccactcacagtgcccagaagcaagtgtgaactgccaccatctcctccacttctcccatctgctcccagaagcgggcaggagtggggcaagaatctcatctgtccagtaggccactgcttgctgggacacccaggaaaagccctctgagcctcagtttccccatctaaaaatagggtccattctagtgtctccccacacaatggagccagccgcctaagttcacatcatggttctgctgcttatcagctgagtgacgttgggcaagtgacttaacctctctgtgcctcagtttttcatctgtaacatgggttaacatgatagaattgttgtaaggattaaggaattgatccatgtcaagcacttcccatgatagttcctggcatactgcagtatcgtaagtctagccattattataactgattattattattccatcatagcatgttgggagagtgatatgaaattgcacgtaagacattaaacaataatataggtagctattgttagtattatccttgtgttttttgttggtttttttttttttgagatggcgtttcgctctgttgcccaggctggagtgtggtggtgcgatctcggctcactaaaacctccacctcctggattcaagcgattctcctgcctcaacctcctgagtagctcggactataggcgcccaccaccatgccccgataatttgtgtatttttagtagagatggggtctcaccatgttggccaagctgttcttgaactcctgacctcaaatgatccacccgcctcagcctatcaaagtgctgggattacaggcatgagctactgtgcccagccccttatggtcatttttatgtgcccacttggcagatgaggacactgaggctcagaaaaggggatgggttggcccagcatcccccagctatgaatgtatattattgaaagaagccctcaattttgggatcaaagtcctggacccttgcccagccctgcccctgagtgtgtttctgtcaatggaggcctgtccctctgcatctcccggcctcagtttccccatgagtaaacagaagcggggtgggagacagtctggaggagatggtccctaaaggctcatcctagtttccccgctgtggagggaggcaggatagcacagaggttacgtccaggagctccggaaccaggcagcctagggttgggtaaattctagctccatcacttagaaaccgtgtgaccttgggcaagcggtttcattttgctgagcctcagttttcctcatctgtaaagatgctcaaatcatgtctcccaggggttgtactgagatattaacccatgtctcagagtagtaggtgccaagtaggcagatgtgactgttattagcagcagtggcatcagtgttaagttgtgctgagaagtgatcagattctaagcatctcagtccctgtagagaaaggtgggaaccccctaccctctggaggacggtggtggagggctagacagtctggctgggctcagggacctcctgggtccctgacctctccaggactgggaacagcagtggggcaggaaggagggaaggaagtcggggacatattcatgtgtgtgctgggggtgggggagcaggaagaaggacaggaaactccctcccatcccctcccccaacttccctttcctccaatttctgctggacaccctcacaggcatccagggggtccctgattcctgtcccacctggatggaggtgggggagggctaggatgggaggaagaaagtcggcttgtattcatctgtagggaggaggtaggaggcccccaccccacccactgccaggcctggcggagaggaaagggtgcactctgcctgaagccatccctctcccatccggaggaaaaggccagaggaagtggagattttggcaaggtgaccgcggggaggggcttgtccgctgcggggtctccctcctaccagggagctagaggacagggctctgaggaccccaaaaaaccccacctcttccctgagccccccacggcagggcatgcacctagagttcccagctcggcttttcttctctggtacacacacctccttgggtcacacacccagggagagcccctctcttccctcacactgccttccgtggtgtcaaacattcggcaatctccaatacacacggacacacacacagcctcccttgtcaaacacatgcagaatcatccccatatctctggtgtcacacactcagccatttcacacacacacctctccttgttacacccatacacacagctgggtgtcatatgcacacgtgccctgtcacatggggacccatccttccttctcctttttacacaccctcgtgcgtttcacccacaagccccagcctctccctcgtcatacacccaccttccctgttgcacacaccccctctgatgtcactgttgcacacctccatgtgtcacacccagccacagcctctctggagtcacacccacacccttttcttgtcacatcccctcaccagccacgcctgtgtcacacacactggacccctttcctctgatctacacggcctcttctggctgacacccagagccagcccattcggtgtcccccacacacctccttgcatgtcacacacaccctctcatgtgtcacactctgccacagcccccttgggggtgacaagcacacacctttccttgtcacacgtacccgctggagggtctcaaacatggagcccagcccctgtcccctgtctttctcatacacccccctatgctgtcatattcctgatccctaatgtcacacatccaggctgtagagggcacacatacacacacacgcacacacatacacacctgtcctagcctcacattctcccacctagctttacacacccaccatttcctccatttcaccccacacacctacccagcctgtccccacgcacgatccggccagggccacacaagcctccatctgggacaacccttgttcaggacatccccagggagggaggctgggaagctcccggtccacaggcctctactccttcccctcccccagccaggacacgcgagctcggggaacacccctgctccgaaagggtcacatcacacacccctcaaggacacacagacacctgccctgaggctcccacgccccccatcttctgcgccccccaaggacacttatcaccccctcccccccacccctctcctcgcagacaaagctcccagccccgggcctcagcgagaggaggagggggtccagccccctcctcaactccccgctctgtcccccgcctcggggaggggtgtctctcccctccccagagcccttgcacctgccacgggagggggggaaaggatggagaaaggcgaggccccctgcccgctcccccgccccgagccgcagccctttctcacctcccgtgttgctgcgcttggtgcagaccacctcggggggcgtttcgaggggcctcttgcgggaatccggggcctcgggctccatggggggggcctggggcggcggctgctgctgctgcggcggctgcggcggcggcggcggcggctgctgtggcggcggcgacggctgctggggaggctggggttgcggcggcggcggcggcgggggcggcggcggctgcggggccgcggaggccgtgaagaggccgtgcaccgcgccggcggccatcatcctcatggtgggggggggcggggggcggggggcgggggagggggaggggaggggaggtgggagggggagggggcggtggagggatgggggagggggagccccggagagggaaggcgggggtaggggggagccggttctcggggggctgacagagcctggagagcggccgtgagcaggatggcagggccgaggggggtctccgatagggccgggaaagaactgagaggtggggtctctcctgggaccacagaggctggggactggacgcgccactggggggacgggactccccgcttcttcttggctccctggggcaagagggccgagccccccagaccctgctcggggtggggggccggaggagcgtggccggagtgggaggcggaggcggccgctagtgggggcccggggggcggcgggcgcgggcggcggcggcgacggggctggcggtggctgctggcccgagcatcttcttcccggaggctcccacagcgcctggcccctcccacccaacgaggtcacgcccatgccgggtagggccacgcccttcggcgcccccattggtccagccttgaagcctggaccacgtccctctgggttggccacgcccctcccggcggcagagagctggacccgactcccccaggctgctgggaggaccccgggctcctccaagccgtccccactcctcaccttgaatgaacgtttattgagcacttactgtgtgccaggtccggttccaagcaagcacgtcacagacgttatcgcatttactccccagagcgaccagctctgtgagttacgcttattatccctattttacagatgaggaaacagccttaggagcttactttgacttcacttggtcaagacaagaaatttcgactaggcgcggtggttcatgcctgtca

SEQ ID NO: 3324 - DNA, 6000 bp, Homo sapiens
gaattttgcaccaacctaatatatgcattgcatcatgatgtgtgtttctcactgtgagtcaacaaagtttgcaaaaaccctgcaaaaaaagtttgcagtcctgcctctcctaaatcctgtgcgctgagtagatggatgatattaatagcagctcagatttatctctttgttgagatccgtgccaagtggttttgcctgctttggctcatggactccttgtcacaccccgagtatggtcatgattcccatttgacagatggtaagactgaggcttaggctggagacatctcatgcctaagatcaccaggctgggaaagctgaggcttgagccccagtgagtttctctcctgagcctgcacaggtaatccttgcccatttgcccactcgcccagcctctcctgatctgctccacacctgcaagagcactcaggggtgccagcctgtcctcagagcccaacaggtacaaactgccttatcgatcctcctgacactccagccagcagtatcatttcaacctccattctgtaggctgaaagactgaggcctttcatttcatcccagaaaacaaagctagaaagcctttccaaggatgcaccattctgtcacccttctccaaactgccctctttgagaggcaggagagagaaatggctaaagatgtgtctttgactgcccaggctcaaatcccatcccattcattcttctccttcttcttcttttttttttttttttttttgagacagagtctctctctgtcacctaggctggagtgcagtggcacgatctcagctcactgcaacctctgcctcctgggttcatgcgattcctgtgcatcaacctcccaagtagctggaaatacaggtgtgcacaaccacccgtggctaatttttgtattttttagtagagatggggtttcaccatgttgtccaggctggtcctgaactcctggactcaagtgatcttcccatctcgccctcccaaagtgctgggattacagacgtgaggcactgcacccggcccaaatcccatccttctaaactttgtagctatgtgacaccaggcaagctctctggatctcagtttccttttccgcaagatgggtataagaatagtaatccacccataagaccatgtttaagactgataagttagaatacatgcaaagttcttaggacagttgccatacccctttgctagggaatcttcccagcagccctatgtaattggactatttacccctgagacttgtcatagagaggagaaggcccttgcctgagttcacatggctaagaagtgggaaagccagaatctggatgtagatctgtctgggcttttaaccaccaaatcataacagtcatttaaaggggatattggccagacacggtggctcacgcctgtaatcctaacactttgggaggtcgaggcgggcagatcacctgaggtcaagagttcaagacccacctggtcaacgtggtgaaaccttgtctctactaaaaataccaaaaaattaaaaaataaaaaataaaataaaaataaagggggtattaacagcagcagcaacattttccaaattaaagaatgagagactcagaaagggtaagggcatgcccaagtcacacagcatgtaaatggcagggccagaactcaaacccaggcttctgtaagctgaccttcactccaacgagcccctccatatagctctgccaggttggaaggaaaaggcaggttcggggatcccctgccccagcttggtgggggtctctgatgtccctgactctggcccctgcccagactagggtgactgctcccctgaaagctctggggtgggggcacaagggtggcatggatgatggcaaagggtgcagcagccccctccgccagcctctgattggggccctgcagtcccccaggatttggtgcttggaaagctgacgttgggttgctatggtgatgggtttggggcggttgccatggcagcagaactagcccgggtttaaaaatatctagcaggaggtttgtgtttgtgtgtgagtgtgagtgcgtgaccgaccgtgctgttgtgtgtgtccaaacgggagggctcgatggggggagcgcagggttggggctgcaggcatgcctcgggggtgggggctgagcggcacacagctttccatgtgtgttgtgcgtgtcactgagtggcccgtgaagtccagttattgtgtgcgttagcctatgtgggccgtgtatctaaatgtgtgtgttgtgtgtgtttacccaatttgtgtgcaaggaaagacttagtctgttcgtcagtctatacatcacatgtcgctgatatgtcttatgtaacataggccatggatgtcctgtggctttgatcatggatttgtaacttttccgagtgtgtggggccaagtgtggagctgtcgtggctctgaatgtgtgtacctgggacatacctgcatattagatgtgtgtctgtctatttgtgtatgagagcctgtgttgtggccttgcgtctgcatgactgaatgtgcattacagatgagtgtgtatgtgtgtgtacgtgtgcctatcccctataagtgtgtctgtgtgactgtgttgagaccgtgcacctgcagcagggccagtgtgactctgtgtgtgtcacacagagggggaaacttcacagctaatttcatggatgttgggatatgtacctgtgtggtgtgaggctatttgactcaaagggtctaaggtgtggtactcagcctgacccccgtatctccctatatccgtcttgcctcttccccatctccatggcaaccagctcctcagctccctccaggaagatggagggggaggatccagactgcagtggaccacagccccctcccatcccccttggctctggggacaatgggggggaggggacagatgggtagccaccccatccaccccaggccatctgctaccctcccccatcctggggacctgagagcatggcaagggaggagcaggggggggttggagccgatccccctgccgcagatcacgcagtggccacaattacctgcatccagaccccttctgagcctaatcttgcctctgaccaacccaggaaggaaagattccttggaggttaagaacccagggagaaggaaattcttgcatcaaggaacacagaataatagcaatgatccattccaaagaaaggcaccctagttccaatgactttgggctctgaaattggacttgtcctgcgttctcatcccagtttctctctctcaagctgtgtgcccttgaagaagccaccctcaatgttcccaggcctccactttgtcatctgaaaacaaatttttcttaatgacatgagtagtaatactgtacaagggccaaggctgttttgttctctattgtatcgcagcatcagggacagtgcctggcacttagtaggtaggccctgagtgctgttgtttgaatggagagccagttgtgccccagggcaggtgctgcaggctgcaactccagctcagtgaattcaatcctctgagccctttcagcatcacggtgttgattcttcaaaggatggatgaaagatttgaaggggaatttcccagctgaaaggattgaaaaagagtgaagtgaaatttctttctctttctttctttcttttttttttttttttttgagacaaggttttgctctgtctcccaggctcgaatctagttgcttgatcatggctgactgcagcctcaaactcctgtgctcaagagatcctcccacctcagactccagagtacctggggctacaagcatgtgctaccacgcctggctaattaaaaaaaaaattttttttttgtagagatggggtctcacaatattgttgcccagctcgtctcaaactcctgggctcaagtgattcttccgcctcggcctcccaaagtgctgggatgacaggcatgaaccaccgcgcctagtcgaaatttcttgtcttgaccaagtgaagtcaaagtaagctcctaaggctgtttcctcatctgtaaaatagggataataagcgtaactcacagagctggtcgctctggggagtaaatgcgataacgtctgtgacgtgcttgcttggaaccggacctggcacacagtaagtgctcaataaacgttcattcaaggtgaggagtggggacggcttggaggagcccggggtcctcccagcagcctgggggagtcgggtccagctctctgccgccgggaggggcgtggccaacccagagggacgtggtccaggcttcaaggctggaccaatgggggcgccgaagggcgtggccctacccggcatgggcgtgacctcgttgggtgggaggggccaggcgctgtgggagcctccgggaagaagatgctcgggccagcagccaccgccagccccgtcgccgccgccgcccgcgcccgccgccccccgggcccccactagcggccgcctccgcctcccactccggccacgctcctccggccccccaccccgagcagggtctggggggctcggccctcttgccccagggagccaagaagaagcggggagtcccgtccccccagtggcgcgtccagtccccagcctctgtggtcccaggagagaccccacctctcagttctttcccggccctatcggagacccccctcggccctgccatcctgctcacggccgctctccaggctctgtcagccccccgagaaccggctcccccctacccccgccttccctctccggggctccccctcccccatccctccaccgccccctccccctcccacctcccctcccctccccctcccccgccccccgccccccgcccccccccaccatgaggatgatggccgccggcgcggtgcacggcctcttcacggcctccgcggccccgcagccgccgccgcccccgccgccgccgccgccgcaaccccagcctccccagcagccgtcgccgccgccacagcagccgccgccgccgccgccgcagccgccgcagcagcagcagccgccgccccaggccccccccatggagcccgaggccccggattcccgcaagaggcccctcgaaacgccccccgaggtggtctgcaccaagcgcagcaacacgggaggtgagaaagggctgcggctcggggcgggggagcgggcagggggcctcgcctttctccatcctttccccccctcccgtggcaggtgcaagggctctggggaggggagagacacccctccccgaggcgggggacagagcggggagttgaggagggggctggaccccctcctcctctcgctgaggcccggggctgggagctttgtctgcgaggagaggggtgggggggagggggtgataagtgtccttggggggcgcagaagatggggggcgtgggagcctcagggcaggtgtctgtgtgtccttgaggggtgtgtgatgtgaccctttcggagcaggggtgttccccgagctcgcgtgtcctggctgggggaggggaaggagtagaggcctgtggaccgggagcttcccagcctccctccctggggatgtcctgaacaagggttgtcccagatggaggcttgtgtggccctggccggatcgtgcgtggggacaggctgggtaggtgtgtggggtgaaatggaggaaatggtgggtgtgtaaagctaggtgggagaatgtgaggctaggacaggtgtgtatgtgtgtgcgtgtgtgtgtatgtgtgccctctacagcctggatgtgtgacattagggatcaggaatatgacagcataggggggtgtatgagaaagacaggggacaggggctgggctccatgtttgagaccctccagcgggtacgtgtgacaaggaaaggtgtgtgcttgtcacccccaagggggctgtggcagagtgtgacacatgagagggtgtgtgtgacatgcaaggaggtgtgtgggggacaccgaatgggctggctctgggtgtcagccagaagaggccgtgtagatcagaggaaaggggtccagtgtgtgtgacacag

SEQ ID NO: 3325 - DNA, 6000 bp, Homo sapiens
gtctggcggaccatcgccccgatcctcccccgactcctctgtcttccctcgagactcatcttcttcctccatggtcacctgggggtccaggggggagagtttggagtggaggtcccgggagaaaggatggaagtagaggatagacatgaagacctcaagggccccacactatctccctcagcatcccctctggcacccctcctctcctccacctcctcccactccaccctgtgcttgggtgggcgctggacccagcacagacaccccagggactaggagcaattctcttccttttttctgggtctcaggtgcctcttatgtcaaagggaggcctccctggcctccgcttttaacatctcactcctcaattcccgcagcttccccaacaacctatccaaacttcaagacctcattccctggcctcctaagaggcaaagccaacaccaaggttttttgtgtgtgctgcactgtgatttcaaagggtgtgttccacagtcctataaacccacctttcccaaggccaatgtgctgggcaatattcaacaccatgccttaaacaccacacggcttcctagagcatcaactgtcctcgatggtgaggaccacccccaaattgtatttatacacctaagttggaaacttcattgagtgatctgcaaaaccagtatgccatttttaaaatgaaaacgctaaacttcagaaagacatgccgaaggaaaacttcacaggaggcatttacctatcgccatctgcacaaagcctttgcaatgtcatggaaattctttgatatgattccccagtcaggcagttgaaagatcatccatcaaacaggtggatgtcttgattagggcttcagaaaaatatgaatatttcagctgtaagcttccccatgactgtcaaatctgctactcataagacaatatccaatctcaaaattcctagaaagcttcaaaatccctaacccacaactcagtatgcttaattgtaaatgcacgaaataggagcatctatctcagagaatggctgtgaatactcaaagcctgacttctgccacacatttagagcacctcaagtgctcaatacggatgaagaggaatgacactattagcccttaacgcccaggtttcccctacatctgtctcctcgcttcccccacagcatgcctgcaaagacaaggccctggtcctgttctagatcccatatagattttcaaaccatgccaagcctccatattcagcctcccagctccacctaattcctaacttcctaagacacacccaaccctgatagtctattacatcccagcctctttcaccaatactcaataagctcagccccagttcctggccctggaactgctctccagcacctcccggggaagcacatgctacctacaacagtgactgtcacatatcagaagcttaatcaacatctgctgactacaggctgagggatccccaaaccctctgcagtatacaaagatgcttgcttgctcatttagaaagcaccaggcttcgcagacacaccctcagctactgagatcttctgaacagaagaatgctctgcagatactgctaggtcctatctggatcagtggtttccccaacaacagggtcatataccagtttagtgcttcacaaatagcttgttttaaaaagtaaatagaacaaaatagttcttcacagcacagcacaagtagtaagtggaaatgtcaattcgtggaaggtgagttaatgttaatacattatgttatataatgttaaatacattatgactgtctgtaccaggtctcaatgaaaaaatgtatcttaatgcagatcacggtcaacatggcccaggtttccccttgaaaagcactgtaatagtgggtctagatgaccctccagactcttccagactaatgtagattaattctaactctctcaataacccccagggtaatgcagaatcttaaaacatttttcatttgaattactgtctgaagggcaagtatatctaagctgggcaaaatttcctcattctctttccgtattattattcgccacaagctgctctgaccccaaaggcattcgaatttgctccaggcatcaaaactgcattcctgcagtcacattaaagccatctagatggttccaggtccttctaactgcccccagcctcctgtcacccattattagacactacccataccttggagaccccagaccctcagtacatctcaatatttggcgcccttccctggtgggcataacccaaccccctagggggccctaaatgacttcttagcccttgaacactccttctaggcctgataaatggccccagacttatgcagaccagttgcatcctcaggccagcccatgcagacactttccagccctaaaagacataccccaggcctctagatggctctgaagatactcttcaggtcttgcagaccctccttcacccctgggacatatctcaagatctcaagatggccccagaaccctctaaccagaccctagcctccggtcagcccaaaaagacaatctacagtgtctacagacacgatccaggccagctgtgtgatggagggcaggccttaggctcggtctaggcccagagacgccccaagtcctctcggagacgccccatagacgcccccaggaacccacggatgcgtcccggggccctgagaaggcccccctctcggcgccaggtttcgccgcagctgccgggcccgagaccgccccgagaagccctctaggacccgtggcttgtggggaggaccccgggacaactagcgacccaactccgccccgcccaccccaataggcccgagccccgcggcccggactgccgccgccatcttaccccgccgctcgggctgcggctccggccccggcgcggggcggggcgggctggggcggggttcgtgagcaaaggaggagagaggcggagctaaagcgccgccgagcttgccgggatttcaagtaccgagcacggcgacgtgaaggccggcgggaaggcaaccgcactcggtttcccagaagccaatgggacacatggggcggggtccgcgcgatgcacgccgggaggcgtagtccgcgcaccgcctctgtcgcgcggggacagctaatggggtgagaggtgaagtgggcggggccgcggtagcccgcgatgacgccccacagtgccctgcgcgcgcgcggaaagggtggcggaacaggaggtgacgtaagaggcgccaggcagaacagacgcaagggaattgtagtccggcggagtgagcacgacttgctggatgttgtgctgcccacattctggggctctcagaatccagatcctctaggcccccctaaatttagaaccagacgggatgcagtggcgcacaccgtagtcccactcgggagactgaggcggaaggatggcttgagcctagaagttagaagccagcctaggcaatatagggagaccccgcctctaaaaaaataaaaataggccaggcgcggtggctcacgtctgtaatcccagcactttgggaggccgaagcaggcggatcatctgatatcaggagttcaagaccagcctgaccaacatggtgaaacccagtctctactaaaaatacaaaaattagcctggcgtggtggctaacgcctgtaatcccagctactcgggaggctgaggtaggagaatcgcttgaacccgggaagcggaggttgcagtgggccaagatcgcgccattgcactccagcatgggctacaagacggaaactccgtctcaaaaataaacaaataaaaataaacttagaacctagaagcccgaccccatagccgcctcgttcagtacagagaagtctgaattccgaatcctctcactcagagcagtgtccagactcctatttccctcctccctccgactcaggagtctgattcttccttcctcggatccaagagtcggtctcccagactagtcctggtctcaagctctcacatacgaattcgggtccccccaagccagtgccctcgctcggatccagaatcctgggtccccagcctctccaattcctggacctaagagtccaggcccccggctccctcctttaccgaacctagtacgaaggaacctgtctaccttcctccctgacaccctcctccccaggacccaggagtccacatctccagccccattttctcctaaggacccaggagtctgggccctctgcttccttctccttcaagacccagaaatcctggccccaggctcttcatgacccaggcatccctacttgggcgagctggctcatggattaggaatgcagtgatctcacggcccctccctgccccgttaccctgctgtccccctctagggccccactctcctcccagtctgtcttccgcttggctgggacagcgggaaccggaagcctgggtcccttagcgggcggagactctagcttctaacccagacgccggggtcgaaagcttggctaggatcccaggagggaggtggagctactcctcaaaacctgctgcttcctcggagcgccctatatacggccgcgcgcgcgagtcgacgagctccgcctaccatactaaggcctcggagacgatgccccaagcagcagtgtcacaggggtccttatttgcatagcccctcccctgaggaactttccgccccgtctgctgaaagaataaattcttattagcatagccacgcccacagaccgccctcccgctgagagcgcgtggcgccgctcagggcaaagcacaggtctctcattagcatagccccgcctcattcggaattccccttcgcagcgaacgccgttccctttcccttattaacatagctcctccctttctttggcccgtccccctccttaagtgtccggagacgcgagccctccttgccagagctcatgattatgcagtagcctcattagcgtagcccgcccccccgggtcccgcccggctcccccgcaggcggtagcgaaggcagcagcagcggtggcgacatgagcagcggggcggcgtccgggacagggcgggggcggccccggggcgggggacctgggcccggggaccccccgcccagcgagacacacaagctggtggtcgtgggcggcggcggcgtgggcaagagcgcgctgaccatccagttcatccaggtagtgggccctcacccgggagggtgtcccccgggacccagaactgagcccttggggggatccccgagaccccttttcccccttgacccatcactgagaccctcctataaggccctctaatcttaaaagatccccacagattgtaacctaaactcttggagagcctccatcccctgcacgggggacccttccttctgcactcgcatcccgagacccactattccctctcccagtgcctaagaccccgcttacctgctgacctggctttgagcacctcctgggagcatgctaaatacaaaatactcaccccattcggaccctaagcactcccaggacccccaccacgcccttggtgccaccttccaccaccctgagccctatctcccccaaatcccagtccccaacttcccctctaagccattgagagccttcctgggagaatgccagtgcccagcacctttgagattccaccacgttcgattcttttttttctttttttttttttttgagacagagtctcactcactctgtcacccaggctggagtgcggtggagtgcagtggtgcgatgttggctcactgcaacctctgcctcctggattcaagcaattctcctgcctcagcctcccaagtagctgagactacaggcgagtgccaccatgcctggctaatttttgtattttttagtagagacggggtttcaccatattggactggtctcgaactcctgacctcgtgatcggcctgccttggactcccaaagtgctgggattacaggcatgagccaccgtgcccggccccacgtttgattcttagccccttccatgactgcccccagaatctagaaa

SEQ ID NO: 3326 - DNA, 6000 bp, Homo sapiens
ggagctcttgttcctggtatttcctgtgggaaaacgccagtgagtttggagtggaagggctggggacaaggacgacaggaaggggacttggctcaccggacagcccgcaccagctgctcaaaagcctcgtccacgttgagacgcagtttggccgaggcctcaaagtaggccacgtggtgggaggcgccgaaggcagaggcttctgatcgggggacctgggggtaggggggacacgggggagtcaggtccctgcactcagggtgaccgcagccagagagacagacaggcaggctggatactctaggagaggtgacccactgtgagaactcaaagaggaagagctcctgagagattatggagggagatgccgcaggggcttggtgtcttctaagtaagggatgggggcaggcttcgtgggcacttgccctgctatgccttagataaccaggagtgggcaggcagggaagtcagggtgttcccggcagaggcaggcggaaccccaaagcctggaaatccccagagcctttgccagatggatgagttctgtgtggaaatcgttgtgggggaagtgatgggagcagggaaaggaggggcgcaactgtgcggggcatctggcacctggggaggaactggggagccatggagggggccggccatgagcaggggaggtgctggggctggtgggaggttggctggaagggaggaatgcgaggaaggggcaaagagagctggcggacggggggtgaatgtcctttgttccgtccagcagcctctcctgaggacacttgcatgctaggccctctgctcggtgatgccggggaccctgaaggtccagtttgggggtaacccatctaggtgagctgtgtgacagtggcagtcgcagcactgcaggaacagaggaggatgctgatgggggacaggtgtgctggaaggagcctcccagactgagatggggtccccagaaagaggggtgtcccgaacctggcgctgtgactccagatctgccttgttcccgaccaacacaacggggaagtcgtcgcggtccttgacccgcagaatctgcgtgaagagcttgcccacctcgttgaaactgcgagtgaagccggaggcatgaggtccagccagctgcagagcccaggtcctccccacacccacccactgctccgccaccagcaacccctgtcacctctgccggtcgttaatggcgaacaccagcaggaagccgtggccagcacgcatgtactgctctctcatggccccgaactcttcctggcccgcggtgtccaggactgcagagacagggagaggggccatcgtggggaccaggctccccgcagtcacccccaagagccctcagcccccactgacaccacccccatccatcatccatccttgccgccctcactgtccagccgggctgggatgccatccacactgcagatcttcgtgtaggagtcctcaatagtggggtcgtagtcagacacgaagtaggactggcggggtggggagaggatagttactgcagtgccccggcagacaggacgaagccctgcccttgggatgcctctctcagtctctgtccctctctctctaaatgtctgtccctgttgctgggtctctgcccccttttctctgggtctctgtcccgtctgtctctctgagtcttttttttttttttttttttttgagacggagtttcgctcttgttgcacaggctggagtgcaatggcgagatctcggctcactgcaacctccgcctcctgggttcaagagattctcctgcctcagcctcccaagtagctgggattacaggcatgcgccaccacacctggctaattttgtatttttagtagagatgtgttggtcaggctgtgttggtcaggctggtctcgaactcctgacctcaggtgatccgcccgcctgggtctcccaaagtgctgggattacagatgtgagccactgcgccctgccctgtccttctctctctctccagatgtctgtccttgttgctgggtctctgcccccttttctctgggtctctgtcccctctgtctctctgagtctctattactctctctctctgggtctctgtccccttctctttgggtagctgctcccctgcccccctttccctgccccccacccctcctaccagtcttcttctctctgagtcactcctggtcctctctttctggtataaggtacatgtcccacatcgtgattacatcctagctgtgtgacactgaacaaatcacttcccctctctgagcctcagtttcctcatttgaaaaaggaggctaagaacagcactacactccatccagcactggcaagattcggagcaaaaccccattaaatattgaatgtatcagttatcggaggcgttgttgtccagactgcctgtttatatctctccctcctcttctgcttcctccctctcttcctcctcccccgtctcctcctcccccgtctccttctcctgctcaggcggcctccagcgtctcctcccaggggaaggtcccggttccaatccggctgcggagaggctgccccaccctcgggccccagcccctcccttcctgcctgggtcctgcccgctgccagccaagcctttggccagctctgggactgcctctgggtgcaaggggcccagggctggggcctttctctacacaagcagggcttcctcccaggcccttgaaggggtctcttggtgggggtgaggggggtgtcctggggccccggggcctctgcggtagcatgtcaggccaagacacttttctaggatttctttgaagctgggaggacctccctcaggaatggggaggaggtttcctgggctggggtggaatttcaggaaagggggtgatgtggaggctaggggtctgaaggctgcatctgtcggttagaggggtgcttggtgaggggcttgtcctggagggaggctgtaaggatcaagccctgggagggattgtggctctgggggtagttaggggcgtgacctcagagcacagcgtgagaagctcagggctgagaactgggagccagcccggaggtggctcaggggttttgggaggttatagtatatacagtcttagaaacattgagttcatttatggggtcagagaaactcccaaggaatagatctttctgggggtgccaagaatctgggggcttcttccatggagatgatttgagagctattcagggtttctgagaggggctcagggagttgcagcggagaaagcatgggatggaggaggggctggttttccttgggggtggggtgggagagtggaggtttgggcctccgggaatgggggattgtcaggacttggggtcttggagatttctggaatggccaaggggcaggatgtctttttaaatctcgggtcggagagcaggactctcttaggactgggtagtcccagaagagtctcagggccagggtctgggtagaatttctagattctgggggcagtcatggaaggggctaagaatcaaacgtggggccgggcacggtggctcatgcctgtaatcccagcactttgggagtccaaggcaggccgatcacgaggtcaggagttcgagaccagtccaatatggtgaaaccccgtctctactaaaaaatacaaaaattagccaggcatggtggcactcgcctgtagtctcagctacttgggaggctgaggcaggagaattgcttgaatccaggaggcagaggttgcagtgagccaacatcgcaccactgcactccaccgcactccagcctgggtgacagagtgagtgagactctgtctcaaaaaaaaaaaaaaagaaaaaaaagaatcgaacgtggtggaatctcaaaggtgctgggcactggcattctcccaggaaggctctcaatggcttagaggggaagttggggactgggatttgggggagatagggctcagggtggtggaaggtggcaccaagggcgtggtgggggtcctgggagtgcttagggtccgaatggggtgagtattttgtatttagcatgctcccaggaggtgctcaaagccaggtcagcaggtaagcggggtcttaggcactgggagagggaatagtgggtctcgggatgcgagtgcagaaggaagggtcccccgtgcaggggatggaggctctccaagagtttaggttacaatctgtggggatcttttaagattagagggccttataggagggtctcagtgatgggtcaagggggaaaaggggtctcggggatccccccaagggctcagttctgggtcccgggggacaccctcccgggtgagggcccactacctggatgaactggatggtcagcgcgctcttgcccacgccgccgccgcccacgaccaccagcttgtgtgtctcgctgggcggggggtccccgggcccaggtcccccgccccggggccgcccccgccctgtcccggacgccgccccgctgctcatgtcgccaccgctgctgctgccttcgctaccgcctgcgggggagccgggcgggacccgggggggcgggctacgctaatgaggctactgcataatcatgagctctggcaaggagggctcgcgtctccggacacttaaggagggggacgggccaaagaaagggaggagctatgttaataagggaaagggaacggcgttcgctgcgaaggggaattccgaatgaggcggggctatgctaatgagagacctgtgctttgccctgagcggcgccacgcgctctcagcgggagggcggtctgtgggcgtggctatgctaataagaatttattctttcagcagacggggcggaaagttcctcaggggaggggctatgcaaataaggacccctgtgacactgctgcttggggcatcgtctccgaggccttagtatggtaggcggagctcgtcgactcgcgcgcgcggccgtatatagggcgctccgaggaagcagcaggttttgaggagtagctccacctccctcctgggatcctagccaagctttcgaccccggcgtctgggttagaagctagagtctccgcccgctaagggacccaggcttccggttcccgctgtcccagccaagcggaagacagactgggaggagagtggggccctagagggggacagcagggtaacggggcagggaggggccgtgagatcactgcattcctaatccatgagccagctcgcccaagtagggatgcctgggtcatgaagagcctggggccaggatttctgggtcttgaaggagaaggaagcagagggcccagactcctgggtccttaggagaaaatggggctggagatgtggactcctgggtcctggggaggagggtgtcagggaggaaggtagacaggttccttcgtactaggttcggtaaaggagggagccgggggcctggactcttaggtccaggaattggagaggctggggacccaggattctggatccgagcgagggcactggcttggggggacccgaattcgtatgtgagagcttgagaccaggactagtctgggagaccgactcttggatccgaggaaggaagaatcagactcctgagtcggagggaggagggaaataggagtctggacactgctctgagtgagaggattcggaattcagacttctctgtactgaacgaggcggctatggggtcgggcttctaggttctaagtttatttttatttgtttatttttgagacggagtttccgtcttgtagcccatgctggagtgcaatggcgcgatcttggcccactgcaacctccgcttcccgggttcaagcgattctcctacctcagcctcccgagtagctgggattacaggcgttagccaccacgccaggctaatttttgtatttttagtagagactgggtttcaccatgttggtcaggctggtcttgaactcctgatatcagatgatccgcctgcttcggcctcccaaagtgctgggattacagacgtgagccaccgcgcctggcctatttttatttttttagaggc

SEQ ID NO: 3327 - DNA, 6000 bp, Homo sapiens
tctctattttaattgggataatggttacagatgtgtatgtatttgtcaaaactgaccaaattgttcacttaaaatatatgcattttattgtttgcaaattatactgtaataaaagtcaaacaatgctctagtttctcttcagatcatataaatcttttgccttttactaaagagtcccatggagaggaacacctcagactttttaaactaattttttgaggtctcgctttagcagggctaatgattaaaaaaaaaagtcaaacacattattgaaagaagcaagttaaaattgaagttaaaaactgaatatgtgggctgggcatggtggctcacacctgtaatcccagcgctttgggaggccaaggagggcagaccacttgaggttaggagttcgagaccagcctggccaacatgctgaaaccccctctctactaaaattacaaaaattagctgggcatggtggctcacacttgcaatcccagctactctggaggctgaggcatgcgaatctcttgaacctgggaggcggaggttgcagtgagccagtatggtgccactgcactccagcctgggcgacagagtgactctgtctcaaaaaaaagaaaaagaaaagaaatcagccaggcatagtcccagctaccagggaggttgaggcaagagaattgcttgaacccaggaggcggaggttgcggtgagctgagactctgtctcaaaacacacacatacacacatacatatacacacacacacacacacacacacacacacacacacacacacacaccctgaatgggtgggtttaaatgaagattaaatccaagagggaaaataggtaaattggaatatcaagaaatgatctagagtgcagcacagaaacaaagaaagaaaggctaaaagatgtgaaaaagtgggtgagaaggactaaaacatgctcagactggagttccgttaggacaggagtgagaaaatgccctaactgacgccacaggagcagcagagacgcatcctcactggacctcacccaaatcgcaaattcatgagcaaaacaaatcattgttgttttaggccactaagtttaggtagttttttatgaagcagtagataactggaataagttgtgataccaggagtgtgatgtcgccatattaaaacacacacacacacacactcacacacatacaacctaaaaatgtaacattggctttgggaccagatggtgagtggaagccaaaagggcttgcagaggctgctggtgaggacttaaaagaaatgcaagagaggcttattggaatctagaaaaaagactcttgggtccagtaacataaagtttaacaacattatcacctgtaataacatataaatagaaaatataccatgagtttggtttaattctgcacattgtactcataaatcataacactactctgtaccccataagtatatacaattataaactgacaatttacattaaaaaaaaaattagaactaagtaaaatggtatgaataaaaaaataaaataaaatgtacctatttacctaatcaactgattatctagctaagaaaatttccaggcagagtgctgctgcctggtttctccaagtagtctataaaaaatgagagagcagagagataaagtaatgaataactttaaaatataaaaaaggctactcaagtgaattaaaacatccatgcaaaaacctgcacacgcatgtttatagcagctttattcataattgccaaaacttgaaagcaactgagatgtcctttaaaaggtaaatggataaataaaccagtacatagataaaatagctattattcaacaataaaaagaaatgagccatcaagccatgaaaagatatgatggaatcttaaatgcatattgctaattgaaagaagcaaacttgaaaaggctacatactgtatgattccaactatatgtcattctgcaaaaggcaaaactgtggagacagtaaaaagatgaatggttgccaggggtttgggaggaggaagagatgaataggtggactacaggggagtcttcgggcagtgaaactattctctggtactataataatgaatggatgctattctacacttaaaacccagagaatgtataacacaaagagtgaaccctaatgtaaaacacgaactttggttgataatgtgtcaatgctggctcattaactgtagcaaatgcaccacactgattgggatgttgatggtgggaaggttgtgtatatgtggtcagggaggagtatgtgggaactctctgtattttccatttaattttgctctgaatccaaaactgctctaaaaaaataaattctagtttaaaaaaaatcggggggcaggacttactatgtttggaaataaaaatgtttctcattccagcctctctattataaatgatataaatgattctctaattaagaatggctttcaggcaaacagcaaattcagagcaccgtcacaagaatatggtgtaaagatgaagccaaggatttaactctaaaacctttgttaaaacctcagttagatttaaggtggtgcaccatagaccctttcaaacacaccaaaggcccttttaagggtcttcatactgtgcctcactggccttctctgttaaacaactgggcttctgaaaatttcacaaggagctcaaagtagagatgatctctatgaaatctgtgggcatggcttttgtctaaaggagtgaatttataaactgattcataagaagtccacaaagttttaaaggaatttcatcagtttggactaaaagagacagcgagagtacaaaatacaaagaaatctttgaacttctgaactgctattcttagaaaacaggcagagaaaaccactcaacatcaacatctgtttgctggccctgagccatcctagctattctttcctgagctgcctctgtgcctctgaggcacgctgtcccctcagacacctatccaaactgcagacttgtttggatgacaaaatagatggtgctattgttttcagccactaagtttgggggcagtttgttatgcagtagtagaaaactgatattggggccaggtgcggtggctcacacctttaatcctaacactttgggagcccagagtggacggagcacacaaggtcaggagttcaatggagaccatcctggccaacatggcaaaaccccgtctctactgaaaatgcaaaaattagccaggtgtggtggcggatgcctgtaatcctaactactcgggaggctgaggcaagagaatcacttgaacccaggaggcaggggttgaagtgagctgagatcatgccactgcactccagcctgggccacagagagagactccatctgaaaaaaaaaaaaaaaaaaaaagaataaataaaaagaaaactcatattggttttccagaattgatgaaagatatcaatccagaagattccagaagcccagtgaatcccaagcaggaaaactaaatgaaataaataacaaaatacatgataattaaactagagaacatcaaagaaaaagagatcttaagatacagtcaggaaaaattgttaacaatggctaaaccttgggataagtgtcatcatgttcactgttctgttcttttaactttttttagtgtttgaaaatattcatacatacatacatacagccaaaatgttgtagtaggtgaaccaaaaagaaaagagatgacttcacaagagagaaaatgaaattggcacctgacctcacaacaggaacaacgaaagccaaagggcagaggaataaaattgtgctaagataaagaattaatgtgttaagaagtttacataaataaaaatgaaatgggtgaatgtctttatagcttctgggtagggaaagatttctcaatgagattaaaaaagcattatctgtaatgaaaaaatgatcaatatgaaagtattaaaacacttcagttcaaaaggcatcattaataggaaaatcccctgcctgggtggcatggtgaaaccatgtctccacaaaaaatacaaaaaaattagctggtcctggtggctatagttcccaactacccggaggctgaggtgggagaatcacatgagcccgaggaggttgaggctgcagtgagccatgatcatgccactacactccagcctgggcaacagagtgagattgtatcaaaaaataaaaataaaaaggaaaatataagccaagaaatgagagaaaattgcagtatatataaccaacaaagggcttttatccaaaatattagaaaaagagaacttcatatcaatgagatagacaacctagtgtattagtccattttcatactgctataaggaactgcccaagactgggtaatttataaaagaaagaggtttaattgactcacagttcagcatggctggggaggcctcaggaaacttacaatcatgacggaaggcgaaggggaagcaaggcaccttcttcgcaaggtggaaggaaggagaagtgccaagtgaagggggaagccctttataaaaatatcagctcttctgaaaacttactatcatgagagcagcatgggggaaactgccaccatgattcaattaccttcacttggtctctcccttgacatgtggggattatggggattatcattcaaaatgagattgggtgaggacacaatgcctaaccatatcacctagttaaaaaaaaaataggcaaagaccataacagatattacatagaaggaaaaacacaaatgtagagattttcaatctcattcatcatcaagattttgcgaccattccaatttaatattttcccattaaactggaaaaaaaaaaagtctgacaagaacaagtattagagagggcatgtggcaagaaaaacactcacacattgctggtgggaacgtaaacacatacaacactttggaaaacaatttggcattaccaacgacagctgaaaacacatatcttatgtaagaccctgcaaatccattcctggatgtatactctaaaaaaaattcttgcctttcctcagctgccatcaaggtgctcagtccttccgaggaagctaaagccgtgttagggtgaggtcctcacttcatccggcgactagcaccgtgttcagcagcaccagccccacactcgcccccaccatggcctccatctcccggcttacctgcatctcctcggacctcattctgcacaacgatgaagtgaccgtcacggaggataagatcgatgccctcattaaagcaggcggtgtaaatgttgaactgttttggcctagcttgttggcaaaggccctggccagcgtcaacattgggagcctcatctgcaatgtaggagctggtggacctgctccagtagctggtgctgctccagctgaggaagaaagtggaagcaaagaaagaagaatccgaggatctgatgatgacatgggctttgggtttttgactaaacctctttcataatgtggtcaataaaaagctgaacttaaaataaatttaatttaaaaattaaaaaaatcttgcatatatacacaagacccagtgtaagaatgttcataggtacactgtttgtgattaaaaaaccgagaacaacaaaaatatccataaacaatggaatggattaaagatgtcatacattcatacaatgcacttccatgtaacaatgaaaattaatgaaaccctgtgaaatgcaatagaacagatgaattttaaaagcatactgagtgaaaaaaaaagacttgaagtgcatagatagtatgattgctttaatacaatgtttagtcaggcaaaacaaagctacattgtgtatacacacacacacacacacacacacacacaggtggtagaactataaagaaacaaggaactgtttaccataaaaagtaaccatggatatggttacttttaggcgttagggaagggggtgtaaccagggagagagcacccagggggctgctagggccatcccgatgttctagctcttgcctgggtgatgggcacacaggtgcgcactgcaaat

SEQ ID NO: 3328 - DNA, 6000 bp, Homo sapiens
tttcccgtctgtaactatagacctaacacattatttttagtgggtgtatgtaattccactgcatggatgtattacataccattctcctgtttaatttgttttagttatggatatttagattgcttatagtatttttgttattgagaatgatgcagccacacacattcttgtttatatgcttttatgtgtttgtcttattatttctcgtaggatggatcatgaagagtggaattgcttttcctcttggggcaggcacaccaacagtgtatgtgaggcccctgctcccactccccaggctggccagtactttgggccaatctgctagacccaaaaatgttaatctcactgagatttaatttgcattcccctgactaccggtgaagttgagcatcttttcatatgtttattgacaatttgcatttcttattcagtaaattacctgctcgtatcctagagtcatatttctgtctgcccgtttttttctattcaatttgtgggagctctttgtatacctgggatctaatctttgactcatatatatggcaagtattttctattactgttgtcaactttttatcatagtaaaattcttacatccagcacccccacccctcccctgccctttttttttttttttttgcatttgggttaggcagagagctagctttactgttttccaaatgaagtcaatcgatcccaaggatttttaaattatttaatcagtaaaaatgtacacattttgagggaggtgtgaagatcctaggagaaactgtgctcttgtccctgaagacagactcagtagatctttttttttttcttttgagacaaggtctcactctgtcatccaggctggagtgcagtggtgtgatgatggcacactgcagccttgatctccctgggctcaggtgatcttcctgcctcagcctcccaagtagctgggaccacaggcacgcacccaccacgcccagctaatttttatattttttgtagagacagggtttcaccatgttgcccaggccggtctcaaaatcctgggctcaagccatctgccctcctcagactcttgaagtgccaggattacaggcgtgagccaccatgcctggccaacccagcagatctttaattcacaatctggaaaaaccatctagaggctgttgctctcctagccagtcatgatttgggcccttctcaacatgtgtatgtgtgtgttgtttctttgtgtgtgtgtgtcttagtaaagaggagatttgtaaactaaaatattctcctctctcaaaaatcaccttaattataaaccaaatgctgtgtataactctatcctagcagttggtgattagattgaggcatccatttcagatgtgggtctccttccctggtccacagtgagctccttgcggctgtaccttaacttacctctgttccaaacccacccaggggctcagacacagtaatagatgggtacttgtctcagttcattttgtgttgctataacctaatagcacagactgggtaatttataaagaaaagaaatgtatttctcatgtttctggaggctgagaagtccaatatcaaggtgccagcaattgctgagggccttcatggcgtaccatcccctggcaggaaaaaggaagagagggcaagagatcaaactcctagcctcaagcccttttataattagcattaatccattcacaagagtggagccctcatgacctaaacacctcacattaggtcctgagacaggaataatataaggtggctgcagaataatagaagattttgggcagcaatttcacatgactagcaaaaggaaactgttgaaatggctgcagaggccatgggctaagaccgtgaaaaacagagtgtagaccaagctggctaagacccactgaacccagcatggcactggatttgacctaggtttctcctaggacctcattatacgctcattaacatactaaatcacacaccccactagcatcatgacacttccgagaacacccatatttggtttaaaaataggtggtgtcacagttctgagaaatctccttctttttctaggaatgatcatgaatattctgcctcttggttaaagaaacccgtaaaggtagcaaccccaaaccccctttcgtgtgagtctctcgagtacacccatattcccttttcttgagtgtgtacttttccctttgcaataaatcgtactttcactattttccaactggtctttgaattcattctcttgatggtgtcaagagcctggacactggctggggtctaggtcccactggcatttggggacctcccctccaacactgttgcactgggggttaaacttccaacgtgtttttttttggaggacacattcaaaccatggcagtactgaacaaaaccttggctttgaaaccatatgaagatttgttttgtgtgtgttcacatagttgaagtatttcaacatttttaagagggattttcaggcttctctataagcagactaagaatcagcattagcatgttttctccatgtacaaagtcttttatctttctacttacaaatgaaggtaaccaataaatatttgttgaattttatcattctgttaaccttcagattcagacttgtcagtaattactggcttgcattaaaagcaggagattagagattgaggtccaggaagtataaatgatttgctcaaaggcatgtagagtaaccaggtctcctgtccctctgtcccccttttctgctacaccttgtccctcgacaaagggtgaatgacctagtgatggtcattcatctgaggagaaaggacaaaggtaggactttgaatcggagcaactgaacccatcctggcctattttcacagtcttgccacagaagatctggccaccttagaaggactcattcagtgatcttggtcttgaataataccatgagtacttactatatacaggtacactgctgtgccgtaaggattccctctggagcaaaactgacccaggtcacaggttagtgagggagactgagcctgtcttccacagtgtcacggaagtgagcactaaacaaatactcccaggcatggatcattacaaatggaggtgagtgctggacaggaaaggacaggatgctaggcgagaattcagcaggagggcttggtggcgattagggggctagggaaaagcagaagtggggctgtaaaaggcttttgcaaagatgaaggcttttacatttgtgagggaaataacaataataaaggtgcttggaagggctgctcatccgcattcatgggcctcttcctagaactctgggaatctttctccctagagctctgtaggcgtccagggtcagggctggaaaggccttcacaaatgctaatctgtgagcattttatgggttgccccctgaccctcagcatcctcctccttaactagatccaatggtgaggtgaagaggtgggggcgatggagaatggcatttccagtttggagaaaaaagtagggagaggcggggaagccttcccaccccaatcccagggccaggttcccctctctccaaacaagcctaaggaatgtttttcaaggcaaaatcccacctcactgtgtatttggttgtgaagggggctgtccaggagatcagggttgtttttggagagtttggagggcaggggcaataatgtctgaccccctgcaaacaaatacacctgtaagaaaagctagaccagagtgaagtaaagccaggatttgatggtggcgggaagggaaggggccaatgctgctgctggacagaggggtgttattttccccagaagaatagcatgtcgtggtcatcatcataataatagctgacacaactattatgggctggggacttataagagctttcataactctcaggtaggaggcactacgaactccatttcacaattgaggaaactgaggcacaaagaaacgaagtagtgacagcagctttcctttttcccttcaacagtttggaatcaagctgtttgagccgaggctgggtctcaggaggtgtggacagcacttccatctcggtaaatcagattcgcctgcccataactggggagaatggtggctttgaaaaggttaacttgggagccctggggacggctgcagggaacgtacgcccattccccctaggaagcagagccaggccgcctcctcctccgcagtggtgaggacgcgtggacagtcccgcgggggcggcgggagacctgcggagtggccgcactccaggtccgcgccaaggccgggcagctccgctttctgctcagtctccgcgaggtgtcgccttcggccgaagaaaccaccgcggcgccaccctcgtagctcgcacttatttatttatttattttcaaacaaggggggcgcccctcttctttcaatttgaaactggaaacatccagaggtcttgttcctaagggggcgcgtcctctccctgctattttgcaccttcggactacccttctttcgtaattacacaggagcaacctccctgcaaggccttgctcaacgttggcctcgcgctcagctgcacaacacgcagtcaaagcgggggctgggttagaagcatcggtctcccctccccaacacacacccccggagccctccgtaatttttttttcttttaatgacaagcaattgccaggctcgcagggtgggtgctgcattgcaccgctccgcgcgcagctggttctcagagtgcagccggtgcaagcccgggggtccaaaagggcgggaggagcacaccctgggcttcccagctttgcagccttctctctgcaaagaaaagcaagtggcttttggcgcgaaagccttggcgcctcccctgatttttatggaaatcaggagggcggggtaaagccgctttcctctcctttctccctcccccttgtctgcgccacagcccccttctctccccgccccccgggtgtgtcagatttttcagttaataatatcccccgagcttcaaagcgcaggctgtgacagtcatctgtctggacgcgctgggtggatgcggggggctcctgggaactgtgttggagccgagcaagcgctagccaggcgcaagcgcgcacagactgtagccatccgaggacacccccgcccccccggcccacccggagacacccgcgcagaatcgcctccggatcccctgcagtcggcgggaggtaaggagcagggcttgcaaaccgcccggcgcccagggaagcgacgagcgccggggcaaggcaagccctggacgggattgcgacgtgcgcaccgggcgccctaatatgcccgggggactgtttctgcttccgaaacaaaaccatctctgggttttcccagaaaagccagttccagccccgaaggcatcctggctagaggagacccgccctaatccttttgcagcccttaccggggggagtaatggcttctgcgaaaagaaattccctcggctctagaagatctgtctgtgtttgagctgtcggagagccggtgcgtccccaccccaggctggggttcttctccaaagggtgcccctggaggaagaagagggggggattaggcagggcgaggccgccgcggtcgcaatctgggtcacggctgctccagcttggaggagaggcggctctcccggcgaccctcctcgcgcgggcgcccctgccattcccgggaacaggggctcagcctctccctccctggaagaggacgttgtcgtgggtttggaagagcaggggtgggcttagagagcttccaattaagctattggcaggagtatccctgcagcgggtgaatgccgaggggcgtttgctcaaatttggggaggggaaggatttgtggatatgggtgtctgttgttggtctctgtctagagaaaggcttttttttatttgcaaagttttctaaatcccctgctatcatttgcactcctgaggttgcatttttacaaagggggtagaaggtactccaaataccattcccggtagctgggtcggagagcctgggg

SEQ ID NO: 3329 - DNA, 6000 bp, Homo sapiens
gaacttccagtctaatactggccgcaaaagccacctctcattacccaggatgtatacaaaaggcggatgtgtcaatggtatttacagaaatgttccccaggggtatcaaatggcaaaccccttatgtggcatctgctggaacttaagcaccattttaaaaagaaggaatgactttctgttgtttggaaacttggaacacacaaggtgacttcaacagccccagaggctcccaaccgtcaccaacgtttagcgctgtcatggaggtgaggtggaggaggctgcagggccacccagcatcctgggatgcaggctctccaaggtcccagcagaaccccacactggtggtcctactgcccacccagagccgaactcgacaggggaccgatttgaaagtaaaccaacattcttaatgtcaacacaatgtttgtttaaaaaaaaaatcaaaatgtgcaaagtggcagtgactgtccagttttgagaagcgtctagcaagtccgagcgtgttcaattttctttagcaactgctgctgtcttgcctgcaatttttccttttccagcaaaagctggtgctcctcggcctggagggagtggacatactcagtggcctttttcaaaatgaccaccttggcggccttctcattctttaccaactccggcacgtggtccctgagcgtgagaaagctggaccgaaggtcgttgcggcgctggcgctccaggatgttgtggtttctgcgacgctcactgtcctccgagtcagagtttcgggggctcaagctcttagcctttggggggatgacactcttgagcggacgtggggacgcctcgctctttatcttcttctgtgggggtgcatcctcactctccacgtagggagagggggcggcatagttgtgctgctggtggatgggaaggcatcgtttgaggatcagctcgctggactgagccctcccgggacccagggctgcgttcttgggacgcacagtgatggtgaatgtggtgacagccttggtgttggaggaggaacgccgcttctccacagtgaccacgtcgatttcttcctcttcatcttcctcttcatcatcttcatcatctgagagaaagatgctagttactctcatgtgagaaccatttgaatgaaattcacatatatatccatgttaatatgtatgcttatctgtctcttccggcagaccctggcagactgctatttttatgggtccatcaacatagatgtggacagttttgtatttgttttagatctctttaaattaaatatatctgtaggccggacgcggtgactcacacctgtaatcccagcactttgggaagcggaggcgggcagatcacctgagatgaggagttcaagatcagcctggccaacatggtgaaaccctgtctctactaaaaatacaaaactttgctgggtgtggtggcatgctccggtaatcccagctactcgggaggctgaggcaggagaatgacttgaacccgggaggcggaggttgcagtgagcccagatcataccactgcactccagcctgggcaacaagagcaaaactccttatcaaaaacaaaaacaaaacaaccccccatacatacatacatacatatacatatatgtatgtatatatatttttcttccccataccccaactgtgctttcagcctccattcaagactttagcaggtggtagaaataaatataaagaacttggcctttagggtcagacagaatcctggctccaccgcagactagttgcatgaccctggtcaagttacccagcctttctaagcctctgtttcctcagctattaaatggggatgataccactttgacagataacatgtagacttagcatagagctgagcctagtagacagatgctcagtaaatggtagcttttatcataatcaccagtctgccctgtggacttatttacatttctagctccacacttaaagagttgaggcctctcattttaggagcctcatttagcagtttacacatggttgtgtttgattttaagtccttaaacaaacttgaggaacaatttaattaactgaagaaaaaaaacaacttttcgtccacaaacctgagttttatacaataaacagtttttcatttaacaaagatcaaatcttaatgacaaagccataatccacagttggtataaacccccaaatgggagcagctctcctcaaagccaccaataataacagcaacaacagaaacgtgtagcatcatgtgcgcattcttcccctctctcctcattgactaccacgctggggtagaaaattattgtttaaaatacaagcatgaaaatcaaaacatatcttctgcttgatctgaaggggaccggaaagctgaacaattgtgggatttgttctaaagccgaaatgtgaggctgttccagtctgtgggtccctttaagccaatgttttggttttctgccaagaagacagctgttggaaggaagtgcttcctcaccaaaagctgtcaaggcacagacattaaagggacagagccgtttcaaactggaggcttatcaccaagtttccttccaggagcctcaaagatctctcctcagcccagaagtaaatttaggcttgttatccacctgcattctgaaaacactggttttcaaagtccaaggggggtcccagctccctgctccaaggacaaggcaatgccactctttgggttgagttctgttcatccagacccccagggaaaggcttggttttaactcttcccttcagcttaagacacagacaaatgaacacaatagaactaatcagtgagtcctcccaggatgtgagccttcctggagaggctgctgagtgcctgccctcaccttcaagggcactgggttacagatacaactcacatctcaaattaggcctggaattcaggctggaagacaaaactacagccagtttccactgcacactggaaagaggaggccccctgagaatgtacacaactgctgttgcacttgcagccagctgctgaatggagggagggagggtgcccccaccacccccagcctttcagatcccgggcccgcctgctggcctcgcatatcgccgcctgctggccacgcaccaggagcaaatagcccaccacccaccgaggatgggggaagggaaaggtaccgacatttgaaaaaaaaaaaaaaagaaaaagaaaaagaatagaaaatcggctctagccatctgtgcaaccctcctataagttcctgcgccttaaacagggctttgcacagcccttgaatcttctcgggatgtctttccctcccctgacctgggccagagagtccctttcacccctgcgctaacaggtttctgtccaggcagtgcacccagcaaccccctaaacccccacccggtttagccaccaactttctccaattttattcctcagactgcgctgcaaaagagaggtgggggaccgggtgagggcccgtgatggcctagaggagggctccccaggagagggtggaaggaactttagtgaaggcgagaattggagagcaccccttttgcaacggcattctctcagccccttctctttaccccgaggagagacttgggggaaacaggacctctctgcccctagcactgcctccaaaatgctccccaggccaagacatacgagcactaacaaaggggacgcgacccggggtccagtgccccagggaggcagccggacccgagttcggtctttacctgaatcgctcagggtgtcctctccggaggtactgagggccttgtggtcgccgccgctggtctggcggccgcctgggcgcggaggggcgacccccggggccccggctggggcggcaatacccgcccccgaggcgaccgcagggcccgccgccggggcactggccggggctgcgggcacgggcgctggctcgcgcttgttcacgggaaaggggaagaccacggcgggatccacgcactcggcggccgggtgggcgagctcggcgggcagggcggccccggcgcggccggctcccgcagccccgccgtgcccgcgacccgcagggctggcggcgccggctcccggggactgggcggtggaaccggcggttggcggcccgcggccgtgctgcagcttctcgctcacggcgcgctccagcttctcgcgggcggagaagccgctccacatgcagtcctggaggatgaccgggttgggggtgaggccacccagtccccccaggccgaacgcgtcctcctcggccgggctgccccacagctcgttctcaagcagcatctccgtgacccagctcgggggctcggagctgtgctccgcgaagccacggctgggcgacagcgggggcgtgggcagcagctcaaacttcttccagatgtcctcccccgggggggtcgagtcggggccgccgaagtagaagtcatcttcgtccgggtagaagcagggctgtagcgagtcaaactcgaggtctgggttcttgcagatcatgcccggcatggtggacgtggagcagctcggcatcggctcgcctcccggccggcgactgagggcttctttccgccccgttcgttttaataccgggggtgcttccttcccgtggggggcgcggaaggcgggggccggcgccgacctccaacactgcaaccgacagacacaccggagagggtgggcaaacggggcagaccgaggggataggcaatgggcgccccctctaaccaggttccccaatcttccctccaagccccccactctgcccactgctcccgaaggtggaggaagttgtgcctctcgctccctccctcccgccctccttttgtgtacaagctgtctacgacagggggtgggagggggcatgcagatgcagggggtggtggcgaggctccgcaactttggaaactgccatttcattcacacaaggcactgcctgggggagggggctgttcctggctgcagaattctagctctcacgagcacgcagacaaccgcactcgcagcggtgtggggccggctgctcaggggaagccccaggctctccgacccagctaccgggaatggtatttggagtaccttctaccccctttgtaaaaatgcaacctcaggagtgcaaatgatagcaggggatttagaaaactttgcaaataaaaaaaagcctttctctagacagagaccaacaacagacacccatatccacaaatccttcccctccccaaatttgagcaaacgcccctcggcattcacccgctgcagggatactcctgccaatagcttaattggaagctctctaagcccacccctgctcttccaaacccacgacaacgtcctcttccagggagggagaggctgagcccctgttcccgggaatggcaggggcgcccgcgcgaggagggtcgccgggagagccgcctctcctccaagctggagcagccgtgacccagattgcgaccgcggcggcctcgccctgcctaatccccccctcttcttcctccaggggcaccctttggagaagaaccccagcctggggtggggacgcaccggctctccgacagctcaaacacagacagatcttctagagccgagggaatttcttttcgcagaagccattactccccccggtaagggctgcaaaaggattagggcgggtctcctctagccaggatgccttcggggctggaactggcttttctgggaaaacccagagatggttttgtttcggaagcagaaacagtcccccgggcatattagggcgcccggtgcgcacgtcgcaatcccgtccagggcttgccttgccccggcgctcgtcgcttccctgggcgccgggcggtttgcaagccctgctccttacctcccgccgactgcaggggatccggaggcgattctgcgcgggtgtctccgggtgggccgggggggcgggggtgtcctcggatggctacagtctgtgcgcgcttgcgcctggctagcgcttgctcggctccaacacagttcccaggagccccccgcatccac

SEQ ID NO: 3330 - DNA, 6000 bp, Homo sapiens
cagactgggtaatttataaagaaaagaaatgtatttctcatgtttctggaggctgagaagtccaatatcaaggtgccagcaattgctgagggccttcatggcgtaccatcccctggcaggaaaaaggaagagagggcaagagatcaaactcctagcctcaagcccttttataattagcattaatccattcacaagagtggagccctcatgacctaaacacctcacattaggtcctgagacaggaataatataaggtggctgcagaataatagaagattttgggcagcaatttcacatgactagcaaaaggaaactgttgaaatggctgcagaggccatgggctaagaccgtgaaaaacagagtgtagaccaagctggctaagacccactgaacccagcatggcactggatttgacctaggtttctcctaggacctcattatacgctcattaacatactaaatcacacaccccactagcatcatgacacttccgagaacacccatatttggtttaaaaataggtggtgtcacagttctgagaaatctccttctttttctaggaatgatcatgaatattctgcctcttggttaaagaaacccgtaaaggtagcaaccccaaaccccctttcgtgtgagtctctcgagtacacccatattcccttttcttgagtgtgtacttttccctttgcaataaatcgtactttcactattttccaactggtctttgaattcattctcttgatggtgtcaagagcctggacactggctggggtctaggtcccactggcatttggggacctcccctccaacactgttgcactgggggttaaacttccaacgtgtttttttttggaggacacattcaaaccatggcagtactgaacaaaaccttggctttgaaaccatatgaagatttgttttgtgtgtgttcacatagttgaagtatttcaacatttttaagagggattttcaggcttctctataagcagactaagaatcagcattagcatgttttctccatgtacaaagtcttttatctttctacttacaaatgaaggtaaccaataaatatttgttgaattttatcattctgttaaccttcagattcagacttgtcagtaattactggcttgcattaaaagcaggagattagagattgaggtccaggaagtataaatgatttgctcaaaggcatgtagagtaaccaggtctcctgtccctctgtcccccttttctgctacaccttgtccctcgacaaagggtgaatgacctagtgatggtcattcatctgaggagaaaggacaaaggtaggactttgaatcggagcaactgaacccatcctggcctattttcacagtcttgccacagaagatctggccaccttagaaggactcattcagtgatcttggtcttgaataataccatgagtacttactatatacaggtacactgctgtgccgtaaggattccctctggagcaaaactgacccaggtcacaggttagtgagggagactgagcctgtcttccacagtgtcacggaagtgagcactaaacaaatactcccaggcatggatcattacaaatggaggtgagtgctggacaggaaaggacaggatgctaggcgagaattcagcaggagggcttggtggcgattagggggctagggaaaagcagaagtggggctgtaaaaggcttttgcaaagatgaaggcttttacatttgtgagggaaataacaataataaaggtgcttggaagggctgctcatccgcattcatgggcctcttcctagaactctgggaatctttctccctagagctctgtaggcgtccagggtcagggctggaaaggccttcacaaatgctaatctgtgagcattttatgggttgccccctgaccctcagcatcctcctccttaactagatccaatggtgaggtgaagaggtgggggcgatggagaatggcatttccagtttggagaaaaaagtagggagaggcggggaagccttcccaccccaatcccagggccaggttcccctctctccaaacaagcctaaggaatgtttttcaaggcaaaatcccacctcactgtgtatttggttgtgaagggggctgtccaggagatcagggttgtttttggagagtttggagggcaggggcaataatgtctgaccccctgcaaacaaatacacctgtaagaaaagctagaccagagtgaagtaaagccaggatttgatggtggcgggaagggaaggggccaatgctgctgctggacagaggggtgttattttccccagaagaatagcatgtcgtggtcatcatcataataatagctgacacaactattatgggctggggacttataagagctttcataactctcaggtaggaggcactacgaactccatttcacaattgaggaaactgaggcacaaagaaacgaagtagtgacagcagctttcctttttcccttcaacagtttggaatcaagctgtttgagccgaggctgggtctcaggaggtgtggacagcacttccatctcggtaaatcagattcgcctgcccataactggggagaatggtggctttgaaaaggttaacttgggagccctggggacggctgcagggaacgtacgcccattccccctaggaagcagagccaggccgcctcctcctccgcagtggtgaggacgcgtggacagtcccgcgggggcggcgggagacctgcggagtggccgcactccaggtccgcgccaaggccgggcagctccgctttctgctcagtctccgcgaggtgtcgccttcggccgaagaaaccaccgcggcgccaccctcgtagctcgcacttatttatttatttattttcaaacaaggggggcgcccctcttctttcaatttgaaactggaaacatccagaggtcttgttcctaagggggcgcgtcctctccctgctattttgcaccttcggactacccttctttcgtaattacacaggagcaacctccctgcaaggccttgctcaacgttggcctcgcgctcagctgcacaacacgcagtcaaagcgggggctgggttagaagcatcggtctcccctccccaacacacacccccggagccctccgtaatttttttttcttttaatgacaagcaattgccaggctcgcagggtgggtgctgcattgcaccgctccgcgcgcagctggttctcagagtgcagccggtgcaagcccgggggtccaaaagggcgggaggagcacaccctgggcttcccagctttgcagccttctctctgcaaagaaaagcaagtggcttttggcgcgaaagccttggcgcctcccctgatttttatggaaatcaggagggcggggtaaagccgctttcctctcctttctccctcccccttgtctgcgccacagcccccttctctccccgccccccgggtgtgtcagatttttcagttaataatatcccccgagcttcaaagcgcaggctgtgacagtcatctgtctggacgcgctgggtggatgcggggggctcctgggaactgtgttggagccgagcaagcgctagccaggcgcaagcgcgcacagactgtagccatccgaggacacccccgcccccccggcccacccggagacacccgcgcagaatcgcctccggatcccctgcagtcggcgggaggtaaggagcagggcttgcaaaccgcccggcgcccagggaagcgacgagcgccggggcaaggcaagccctggacgggattgcgacgtgcgcaccgggcgccctaatatgcccgggggactgtttctgcttccgaaacaaaaccatctctgggttttcccagaaaagccagttccagccccgaaggcatcctggctagaggagacccgccctaatccttttgcagcccttaccggggggagtaatggcttctgcgaaaagaaattccctcggctctagaagatctgtctgtgtttgagctgtcggagagccggtgcgtccccaccccaggctggggttcttctccaaagggtgcccctggaggaagaagagggggggattaggcagggcgaggccgccgcggtcgcaatctgggtcacggctgctccagcttggaggagaggcggctctcccggcgaccctcctcgcgcgggcgcccctgccattcccgggaacaggggctcagcctctccctccctggaagaggacgttgtcgtgggtttggaagagcaggggtgggcttagagagcttccaattaagctattggcaggagtatccctgcagcgggtgaatgccgaggggcgtttgctcaaatttggggaggggaaggatttgtggatatgggtgtctgttgttggtctctgtctagagaaaggcttttttttatttgcaaagttttctaaatcccctgctatcatttgcactcctgaggttgcatttttacaaagggggtagaaggtactccaaataccattcccggtagctgggtcggagagcctggggcttcccctgagcagccggccccacaccgctgcgagtgcggttgtctgcgtgctcgtgagagctagaattctgcagccaggaacagccccctcccccaggcagtgccttgtgtgaatgaaatggcagtttccaaagttgcggagcctcgccaccaccccctgcatctgcatgccccctcccaccccctgtcgtagacagcttgtacacaaaaggagggcgggagggagggagcgagaggcacaacttcctccaccttcgggagcagtgggcagagtggggggcttggagggaagattggggaacctggttagagggggcgcccattgcctatcccctcggtctgccccgtttgcccaccctctccggtgtgtctgtcggttgcagtgttggaggtcggcgccggcccccgccttccgcgccccccacgggaaggaagcacccccggtattaaaacgaacggggcggaaagaagccctcagtcgccggccgggaggcgagccgatgccgagctgctccacgtccaccatgccgggcatgatctgcaagaacccagacctcgagtttgactcgctacagccctgcttctacccggacgaagatgacttctacttcggcggccccgactcgacccccccgggggaggacatctggaagaagtttgagctgctgcccacgcccccgctgtcgcccagccgtggcttcgcggagcacagctccgagcccccgagctgggtcacggagatgctgcttgagaacgagctgtggggcagcccggccgaggaggacgcgttcggcctggggggactgggtggcctcacccccaacccggtcatcctccaggactgcatgtggagcggcttctccgcccgcgagaagctggagcgcgccgtgagcgagaagctgcagcacggccgcgggccgccaaccgccggttccaccgcccagtccccgggagccggcgccgccagccctgcgggtcgcgggcacggcggggctgcgggagccggccgcgccggggccgccctgcccgccgagctcgcccacccggccgccgagtgcgtggatcccgccgtggtcttcccctttcccgtgaacaagcgcgagccagcgcccgtgcccgcagccccggccagtgccccggcggcgggccctgcggtcgcctcgggggcgggtattgccgccccagccggggccccgggggtcgcccctccgcgcccaggcggccgccagaccagcggcggcgaccacaaggccctcagtacctccggagaggacaccctgagcgattcaggtaaagaccgaactcgggtccggctgcctccctggggcactggaccccgggtcgcgtcccctttgttagtgctcgtatgtcttggcctggggagcattttggaggcagtgctaggggcagagaggtcctgtttcccccaagtctctcctcggggtaaagagaaggggctgagagaatgccgttgcaaaaggggtgctctccaattctcgc

SEQ ID NO: 3331 - DNA, 6000 bp, Homo sapiens
tctcctgcctcagcctcccaagtagctggaattataggtacctgccaccatgcctggctaatttttgtgtttttagtagagatggggtttcaccaagttggccaggctggtctcaaactcctaatcaagtgatccacccgcctgggcctctcaaagtgctgggattacaggcatgagccactgcacctggcctctggactacattctttatagagcaattttgaaaaaagcataacccctaaactagcagtagattggcatttttttcactgtttccacttttatgaaatatttcttcataactctaggtttatcctttaggcctgtgtagatccccattttactcttcttttctagagtcagagatcttccataccttgatcacttctgcttgcttcactggcagatatagcttgatgcttaggcctcactccagcaaaacctttaattaactttagagaatccaaatgctaagtactggccgagcctctcaatcctcgcaattctcaccttgaggtaatacggtgtcctgtggaggttttcttctcttttcccttgcccgtatagtccaggctctgcactaacagtgtgacctctgggaaggccctaacttctctgaatctcagactcctcatctgtgagttacgtgcaggggtcaaattatgatttaaaatatatggtggggcatgttggctcgcacttgtaatcccagcattttgggaggccaaggctggcagattgtttgagcctaggagttcaagaccagcctgggcaacatggcaaaaccccatctccacaaaaaatataaaaattagctgggcgtaatggtgcacatccatagtctcagggacttgggaggctgaagtgggaggactgcttgagcccaagaggctgaggctgcagtgagccatgatcgttccactgcactgcagcttgggcgacagagtgagaacctgcctcaaaaaaaaaaaaaaaaaaaaaaaaggtatcctggcggggcacagtggctcacgcctataattccagcactttgggaggccaaggagggcaaatcacttgaggttaggagttcaagactatcctggtcagggatggtggctcacgccctagttaaaggcttatgcttttttcagaattgctctataaagaatgtagtccaggggctgggcgcggtggctcattcctgtaatcccagcactttgggaggctgaggagggcggatcacttgaggtcaggggtctaagagcagccttgccaacatgatgaaaccccatctctactaaaaatacaaaactcaagacaggcgtggtggcggtgcctgtaataccagctacttgggaggctgaggcaggagtttcacttgaaccaggaggcagaagttgcagtgaaccaagactgtgccactgcactccagtctgggtgaaagagtgagattctatctcaaaaaaaaaaaagtctatgatcgataatttgttaataaatgtaataattcctaaagtttcagaatatgagttcatggggaaaggtttctaagtgataaaattgttggttacaggataaaaaataaagtgaaaaaatcttttttacttatatttgtacatattaatggaagtacatgtgatttttgatacatgcatactgtgtgtaatgatcaaatcattacaaatgaggttacccatcacctcaaacatttatcatttgtgttgggtttttcagatttttcaactgtccattatccccaaaatttacgtagtggtattactctccaaattaggcttttttttttgagatggagtcttgctctgtcaccaggctagaatgcagtggtgcaatcttggctcactgcaacctccgactccctggtttaagcaattctcctgcctcagcctcctgagtagctgggactacaggtgcatgccaccatgctcagctaattaatgtatttttagtagagatggggtctcaccatgttggccaagatggtctcgatctcttgacctcaaacgatccacccacctcggtctcccaaagtgctgggattacaggtgagagccactaggcccggcccaaattaggccttctacaggaaaaagtcttggctgggcctgttggctcacacctgtaatcccagcaccttaggaagccaaggtgggaggatcgcttgaggccaggagtttgaggttgcagtgaggcctccacactccagtgtgggaaacaagcaagaccctgtcttaaaaacaaacaaaacctttaacacttcattttttcacagatggagtccactctgttgtccaggctggtctcaatctcctggggtcaagcaatcctccctcctcagcctcctgaatagctgggactacaggttcagtcactgtgcccagcttaaaaactttcaagacttttaaaatactttgtaacattgaggcttgagttaatctaacttattttgaaaggaataatcaaggtaacaagattttccttctgacgctgaattgacgacacacctgtgctgcactgaccatcactcactttgtgatttgcatagctagtctattttagaattgttattatcataaggcattcccgactacagtcagaatgattcatagaggataagaaggtttaagtgaggccaggcgcagtggctctcacctgtaatcccagcactttgggaggctgaggcggatggatcatctgaggtcaggagttcaagaccagcctggccaacatggtgaaaccccgtctctactaaaaatataaaaattagccaggcttggtggcacacgcctgtaatcccagctactaaggaggctgaggcaggagaatcacttgaacccggaagggctgcagtaagccgagattgtgccactgcactccagcatgggtggtagagtgagagtctgtctcaaaaaaaaaaaatgtttaagtgacaagactaggagcaattggagaaaacaactgaagagaaagctgtattagtgaagacaagtatcttcggtaaggacgctttaggggtggttgagaagaaaggaaaaatgtaagacagaaatataagacagaaatgtaagacggaattgcctgaaagtctaactttaattacatatcaaatacacattttggtgatttggcgatcttggggtggtgtgtgtgaaaatgtagtttttacttctctatccctgtttcttgttttccacatacttcagcgttttccactttatcaggttgaaccagctcaccaggttcaactcctgtgccatcacacctaggtgtgctttgagggatggatgtccctgagaatggaaggtcagcagcatgcatactgcaactacagaagggtaggagagaaaaagggtggcgtaaacaggactgatggggagagagaacagaaggtaaagcaaatgcaaagaaaatgcgagggcccgggcgcgggggctaacgcctgtaatcccagcactttgggaggccggggcgggcgggtcacctgtcaggtgttcgacaccagcctgactaacagggtgaaaccccgtctctactaaatacaaaaaattagccgggcgtggtagcacatgcctgtaatcccagctacttgggaggccgaggcaggagaatcacttgaacccaggtggtggaggttgcagtgagcagagattgtgccattgcactctagcctgggcaacaagagcgaaactccatctcaaaaaaaaaaaaaaaaagaaagaaaagaaaaaaagaaaaagaaaatgcgaggaaacgagcgaaactccatctcaaaaaaaaaaaaaaaaaaaagaaagaaaagaaaaaaagaaaaagaaaatgcgaggaagcaggctgtgtcggactgggagtaggcttgaccacctttcaattttcaacccagtggtacgacgctggcggcaggcagaggccccacctcctctgcagagcgctctcgggttctcccggattcctgaaggacggcaaaggcctgaagcaggttctctgagcaccgcacagaaccctccacttcgcagggaggttcttcctgcgcccaggtgttcctcaaccttcctctcctcgcccaggaagaggttgtgaggattacctcatcccaacccgagcggcgtggccagcttttccatctcaaactcttgctcttgaagtcaatccggatggagcgctcatgtttccccgtcagggctggccctggagagggggcacgccgggaggcgtctcgttctagcaaagaggctattaaatgacccagggcgcggctttttctcgcgtttacgagctccacctacacgggaacacatggccacccaagcccgtcgctgcgccaagacctccagctcaacacacccgacaagcgctgtgcagagaaaccgcagcgcagtccagcgggagaccccgggaggggaaggaggtgctgggctctgtaagggtgtcccggggagcggggagcgggaggcgggaggcgggggtcggagggggggcgctgcgcctgcgcagtcgctaggtagcgtctcccccggggcgtgctcgtaacgccgcgcaccctatcaggcggccacagggagcgcgcccgcggcctcgccctttctcgcccctcccttctcccctctgggtccagcctcagactgaggcttggagacaggagcattccactcgccacttcggcgcgcccccatgccctcttgtgcgcgtgcgcagaggcggaccgcaaggctagggcgtgagggaagggcgggcgtacgcccttgcgtgcgtctcaggcagcgcgcacgccggcgtgagagggcacggggaaaaggtggctctggccggggtggctcggtttcctggggctatgtaactgagctcgtcgacttaggggtccttcttcgctgccctcgccgcgtgctagcagggagtttccgctcgggagagagactgtcctcacgcccgctgcgcctcctcgacggcagagcaggcttgctcgcccgtgggagcgtcccggccgagaagccctgaggggggaggggaggccattttgtcccgaccgactccccggaaccgggcggacgggctgggagaggctgcggagccgcggtcgccgccctcggaggcactggacgccgccactgtcggggcttcctcaaagctgttcgtaggtcgcccgcgccgtctcgagcctttttcccacgcttccccggtcctccggcctgagaacgcccgagtgaggagttggccgtagtgagagggaccgatcccttggggccgccggcggcgagagcccgagccgctcctcccaatggcgaagaagacgtacgacctgcttttcaagctgctcctgatcggggattccggagtggggaagacctgcgtcctttttcgtttttcggatgatgccttcaatactacctttatttccaccataggtaagacctgtgggaggacggtgtacggtctcggtagctgcataccgtttattttactccagacatcttgcttcccgtaatatacgcctttgtttcagtgattccgattccaaacgacacatccaagttactgtttgaatcggcatcgagcttactggggcggggtcttcccatgatttccatccggtcttttgctttcgagtctcccactatgctcagtgccttctgttacaaaatatgcatcatttaaccatgttccagaaccttatttcttcaggcgactggactggctttttccacatttgcgtggaattagtagatgtgtgatatttttaaggtatttatttcagtggttgcgattgaagcagtactagctatttgggaaaggcctgaatttatactttggggcaaagaaaagattccatatggtgataacttagagtaaacttgagggtttctgagaagaataattaaggtaaattagaagggaagagtgagttgccctcattcactaatccattgatgtgtcaaacaatcggaggctcttcgcgcttggggtgggactctggcatatttgcctcagtgcttttcgagacatcaa

SEQ ID NO: 3332 - DNA, 6000 bp, Homo sapiens
tcctcctgcttcagctttctgagtagctaggaccacgaggacacatcaccatccctcactaattttcagattttttggtagagattgggggtgtctcactgttttgtccaggcaggtcttgaactcatggcctcaagtgatcctctcaccctggcctcctgaattgttggaattacaggtgtgagccacgtgccaaaaattgtatttttaattaaatgaagggaataaaagaaatagaaaaatgcttgttttaaacttggtggaaggtactttgtatttcagacattaatgggtcaggatgaaacattatccagtattcacaatcgagttaaagaccaggataagactggcaggagttactgcaagacctagtgaaacgctcttgtctctgtgtcctttctctttctgggctttttggtcttcgtggtttctgcttactttctgtctatactatgtcctttgatcttctcatcagtcttggcttttttttttttttttgaatagtgctatatagccattatatatataattttgtgccccagtgagatagagctttccttattatcattattaaaggttaaagtatgagtatactattaaataaagatctcagtctagacttgcaggggtgtccaatcttttggcttccctgggccacagtggagaagaagaattgtcttggaccacatataaaatacactaatactaaccatagcttgtacgctaaagaaaaaaaaatcacacacaacaaatctcatcatgttttaacaaagtttacgaatttgttgtattgggctgtgtgcaggctgcaggttggacaaacttggtctagagttttccccaagtaagcaggcccaaatactaggtagcaattttttttcatacacatccatacacttagatgtggtgaagttgtgagttaaaacagcaaatgtaaacttccttcacattagaattaacttaaaatgaaagcaatttaaaacatcttttaatttaattatttggctacatgattcattctcttgcttcaaacattttaaaaggagaaaaaaaaaggatacagaaatttcccaccttgttccctttaattccctcaatgttaccaattcctcatttcccccttactccccaggtaactgatgtaattaatttatcagttattactctgagtaaatatgaatatatatttttgtcccaccccacccccacaaccttttctttttaacagatgaggtaacatactccactgattgtcactttgcttatttcacttactataagcaaaataattttactttttaaataattacatgctattcctttgattgtttatatcataattgaacaagtctcccagtgagggacatttagattattttcaaacttatgtgcacattaactgtgtgtgtagtacataatcttgtatttaaattattttccacacgcacatacatttgaaggacagattctgagaactggccaaagagcgtacatgtatgtacatttgcaattttgataaatacagccaaagtctgtcctgagggttatacccatttacacacccacttgcagtatatgagaatatgtgttattcacaccctggtcagcacagtggatttacaagactcagatctttcccagtctaacaggttaaaaaatgtagatttaattcgcaggtaatttctgagtaaggctgagcatttaaaaacatttgtttgttttgagacggaattttgcccttgttgcccaggttggagtgcagtggcatgatctcggctcactgcagcctctgcctcccaggttcaagagattctcctgcctcagcctcccaagtagcggggattacaggagcccgccaccacgcctggcgaatttttatatttttactagagacagggtttcaacatattggccagactggtctcgaagtcctgacctcagggatctgcccaccttggcctcccaaagtgctgggattacaggcgtgagccaccacgcgtgacctgaaaacatatgtttaagaatcacttttacatttccttttctgtagtatttttgtttgtttattcctttgcccaatttttctatttggttattggccttttcttattcttagctaggagccagcctaaaacttttaataaacttaattaaaactcaacttcaacttaataaatattttggctgtaaaagattttgctccgcaagagataccccccccccttttttttaaatctgtttcaaggatctaagttaaattctaaaaagataagaaaatcagttgtaggagcctccctggttgtctttaacctgactcatacctggaagttcccagagagagagtattttcagtgcaactgtacttttttttcttgctggatgctggtctgcccctttttcttctttacatttttctcaaagatctgtattaggagcaaagtcacttgtactggaaaccccacagaggtctttttaatgcataatttgctgctttaacatacatggaggagaagaatcccaattaggcagtgggagtaagtaggagagctctaagggcaagtagcagtgtcacttcagtatgagttaactaggcttgtcttaggctacttgaggttttaaaatatttttaaaatattttaattttttccctcttgggctacaaaagcccttaactttatattgtttccatgagagaataagttctcaggtacgtcctagctttcaaaatgttgtgatgaactactgttctatacaatagcatcgataaatctcaaagactgatactgagtgaaagaagccacagagaagaatatattcaactatggttccatgtatatgaaggttaggaatagaaaaaaactaatcttagatgatagaaatcagaatattgggtaacttgaagagagcagtactggcaggaaaggggcacaagggagccttcttgggagtattatgttctatatcctgatctggtagtttgacaatatatactaaaaatatatcaggcttacacttaagctttatgtacttttctgtatgtaaggtatcactttaaaaatatttttaatatataaaaatgggcctacccttttaaaatactgtattctgatttttttttctttttctttttctttttattttttgagatggagtctcactccgtcgcccaggctggagtgctgtggcgggatcttgactcactgcaacctctgcctcccgagttcaagcgattctcctgcctcagcctcccgagtagctgggattacagacgtgcaacaccacacccagctagttttagtaattttagtagagacagggttttggcatgttggccaggctggtctcgaactcctgacctcaggtgatccacccgcctcggcctcccaaagtgctgggattacaggcctcagccacgacacccggcccttctgattttcaaagtaatatttagtgttgggaaaaagcagaattatactaagaataaaattaaatcaaccataattttaccacctaagggttgctactgttagtattttgttgtatctcctttggggtttttcggtgtttttagaggagttgggaggagtcttactctcttggtctgttgcacaggctggagtgcagtggagtgatcatagcccactgcagccttgaactcctgggctcaagtgatcctcttgcctcagcctcctgagtagctgggactacaggcttgagccactgtgtccagctaatattttaaattttttatacagatgggggtcttgctgtgttgcccaacgtggttttagctcctggcctcaagtgatcctctcaccttggcctctgaaagtgctgggattacaggcgtgaggcactgtgctcagccatctatatccatttttaacatgaattagataactacattttgctccactccttttcacttaatcagttgaggttgcctttttaaaactatgatacagtaataaaattggtctaaaaaggcagataacagaaaagggcagttttatttctgtgacgttacatatacctaacactggtttcatacaacttgctccacaatgccttttaagtactaaacatattcagaggtcagggctagaagataacaaaatctatttaagagttagagctgagaagatttcagaagctttataaaggcatgccaggaaatgtctacaatatttcacagcttggaggaagcaggcaaaaagaaaatcaaaacaaagcttccaaatctttactttgcacggaggggaaacctatctcctgtgattgtagttgtattttgttgtataaattgacataagaatattcctgttgaatcgtgattttatccatggcagtgttttttcatgagttattttccttgtgtgtttgttgcagacccctgtaaaagagcccaacagtgaaaatgtagatatcagcagtggaggaggcgtgacaggctggaagagcaaatgctgctgagcattctcctgttccatcagttgccatccactaccccgttttctcttcttgctgcaaaataaaccactctgtccatttttaactctaaacagatatttttgtttctcatcttaactatccaagccacctattttatttgttctttcatctgtgactgcttgctgactttatcataattttcttcaaacaaaaaaatgtatagaaaaatcatgtctgtgagttcatttttaaatgtacttgctcagctcaactgcatttcagttgtattatagtccagttcttatcaacattaaaacctatagcaatcatttcaaatctattctgcaaattgtataagaataaagttagaattaacaattttattttgtacaacagtggaattttctgtcatggataatgtgcttgagtccctataatctatagacatgtgatagcaaaagaaacaaacaaaagccaggaaaacactcattttcgccttgaatatgtaaatgggattaattttgtcctgtgccttatgtggaaaggaacttctttggttttccttttttgttctggtggaagcatgtgcaggagacatatcatccaaacataaaccattaaaatgtttgtggtttgcttggctgtaattttcaaagtagttaattgaggacaaagggtaatgcagaagtgatagctttggtttgctgagtcttgttttaagtggccttgatatttaaaactattcctgccaccatttcttctccttggccacttcttccttgcgtctccctgcatgctgctttatttgcttctccctccccaaccacctcatggtatatttaagagtgaaagggacaaactagtaggtttgtcaagtttaatataaagcactgatgtaacttgctaggtaaacggaaagataagttctaactgcctactatccaatgtcagttaattggtgtcttcccccctcatttgctctcttccctaaaatgtgtcccagatgccttcatttgctgttttacttctatgttctgcttttcctcctctctttgttcccttcctgtctatccattgagtttatgaaatggaagagttaactgcatgcactagtgtttggagggtgttgtggtttgtctttctaattaggtgtatagcctattcactttcctagaataaatctcttaacctaaatttgagtagtctgcattttggcaactcctctagcagcttggtagcctagtacaggttgtttttttaaaaaaggaaaagcaggaaggaggagtgaattttattaacatgtttgccaaatgtattgagatttggcctctgaagaacactttttcagtgttaagtttctttaccttaagattcagaaatactttagaatattattaattttaagtcctgtctttacatccttttggaaaacttgtattaccatgggtttggaaaaaggacaacgaaaggcttttcatgtaaagataagatctttagctatctctaaccctgtccttttttcactgcattttttctagttttgcttca

SEQ ID NO: 3333 - DNA, 6000 bp, Homo sapiens
aaatccctagaacagagttcatactggggatgtacatcagaatcacctaggtagttttttcaaaacatacatgtccttaccccacttgagatgtttagaagataaagaaatcttcatagtttttaaagcccagatacacgttgctgaaaaagccttccaagaaattctaacacactcctgattaagaataattgtcttaaaacatgaagtggaagcaacaatgcacatattgagagaagtaatctaaaaattcaggtacaaatatggactgggacgtgagtaaattaggcaaagcaattctggctacttgtaacttgaacttgtgtttatctcccacttaaaaaagaaccttattcaaatgcaagcaagaaaaaatgacaatatagagataaccttcaaatgctttcatttatttaaaaagtaaataatttacaacacaaatattttaactcttgcaacacatcacacaaatgattgtcacaccagtgtgtcaacaccacagttgagaatagctgactagactgcatgtctctcataaaggtcctcggtgacagactttgcctgagacctaaaggagccaatggagctaacaatatatatttttccaaatatcacctctactcaatttggagaaaaagaaaataagatctattatttttttcctcaaactaggtctctcatcagccaaaggctatgccaatatatcaggctgactttattactccaatacatcaggctgactttcaactgggccttaagaatcaaagaaaggaaattttcagatgagtattcaactgatttatgcactacaaggtaaaaactgtaaaagattctggcaatagggattctgttaccaagggggaaaaaaggtaagtcttgaaaaaactcttgcacgtgccagggtaaaataaataaattttaaaagctgtcctagattatacaggtattaaagttaaaaacaaatggcaagaccaaatcacctctgttttaaaaataaaaacagaggaggcccagataaatatgaatttcagaaaaacaattttatcccatgcaatatttgggtcatgtgcctacaaacaaaatcattttcagagaacccatatgagagaaagttggaacaaaatgaaattctgagtcccttaaattgtatttgagaaagatactatgcataacctagatgttcctaattatgattcattgtctggctcctccctagtcattacattaactcattccctttatctgtgcctatcatacgtcaccttaattatttaactccattgttatttctattttttcatgtgttgcatttctgaaacattcatgctcatgtgtggcattttacttaaaaaaagaagtcatttactgtagctatccattcctaacttccagctctgttattaaagattaagttgcctcacacttacttccatttctcccctttaatcgagaaaaacaacaattctcttgaaattcacactacaaatagttggtaagaagtgaggtttacaaaaacaattcatttctgtacttccttcctattgtgtgacacagaagaaccatactaagaaaaatgtgaagaaaaataaattatctaaattttaaaacattttaccaaagacagcactaattattagttaacagagctatatgccacacaaagacattttgctctttttactggaacaatgagaaggtttaaattcagacataaaatatctaattttacttatattaaatagaataaatatacaaaagcaacaactgcctactatgcataccttagatgggtttgggaacatttttcttcactatatctattattaattatgtcaaaagactgtgatcaaggtgtaatttttttaaaaagcaacgaaaggcagcttaatacaagctgtgaaatcctaattaatctgctaacttatctaaacaaaatttagaatcatattatatacatgattttaaactacattctaacttacataattttgcttataagattatgatttatgttacttttacattatagctatcacatattcaactacatatacctatttacatatgacatctggtaagaaatgaagaaatgctcttaaatacttcgtaatgaataaaagttactttctgaggttttaatactaccttactacaaacagaatctaaactagacaatgaaaaactaagcaatttctttttttttttttttttggtcactcttccggttaaattactgtttcaaaacagaataggaatttagaattttattagtgaatctttttctttctctaaggtctttataacagattaaggaaaagtacacagattcctgtaaacatttttttttttttattccaggcctggcagttttctaacaactgaattacaatttaaataacttgttacattttaaatagtcccattttaatgcaactcttagaaaagaccaaaaaaaaaaaaaaaaaagttaatcacccttcaacttctaaacctttaaaactttccatttctttaaacatttcctccttacttttagggaatccttcctcctcacaacagcacaaaatacagtgtcaatgaacaaatttaaattgtatcaaattttaaaatcctgtgggtcttacaatactctatatagaaatggttgtttcctctctcaactgaaaaaattagaagtattaaattcatgcaatatatcaataaagtttgattaaatcgccaagagcctgaacttacttataatgctaggcattctccattacttccaaacaaaatctttctgataaccaatacattaacaaaatatttgaagtcatcttagcacttctaatctacacatgctttgaattcataaatttacacgattatctgaaagtctggtgtcacttaagtgggaaaagggaaagttgaaatattttaaactacacttagtattctcacaaccacaaacaaactgaaatcaaatgtcatgtgaaacaccccaatttccttttctgcctacagcaatagctatggcattgttctgctcaaccttttaaaaaggttctttaagcttcctacttcctcatctctactagacatcagcctacttctgagggtcactggaccaggcagtttggggataagagtcaagttcataaacggggccccctcttcattctcttagtacagcatttaacatgcatttagccctccctgcctttgctcacgctgcttcctctgtctggaaagtgtcccccactcaccttgccaaaatcctggtaaaagaccaactcgaccccaggctacttgatttatccccccgccccggctctcccgtccccctcaaccttaagctccaggcagccccaaccacatctgtgtatataggagactttcttgctctgcaatgtttcttacaaacttattcccccccaaagggagagatcgagcatttattaagggaaaatatatagtcacataagtgataaagttgtattcattcctactcattattttaaagctcggatattctaaaactcctctttccccttatttccagcgaggaggaagggggattcaacgtctctattcgtcagattaggaaccttgagctttatctcacagtaaaaactacattttttttttttttaaatagagacagggtctccctctgtcgcccaggctggagtgcaggggcgcgatctcggctcactgcaacctccacctcccaggttcaagcgattctcctgcctcagcttcccgagtagctgggattacaggcgcgcgccaccacgccccgctgatttttgtatttttagtagagacggggtttcaccatgtttgccaggctggtctcaaactcctgacctctggttatccacccgcctcggcctcccaaagtgctgggaatacaggcatgagccaccgcgcccggcctacacttggtcgaagcaacattaacacttaaaataccacggattttctaattcgtgttaaaataccacggatgatttttaaagccgtgacacattttgtacaactgtcagtacaagggggatcacctctttgcatttgatgaaattaaactaaaaagggggagagagcttgcccgaggtctgaaggttcctcattcctgttctaaaacataaaaccaccatcttcaatacatatacatttttaatgagaactcttcgtcctcctttggttcgcttatgacttccctaatcctaaaatcaagtcgttgggaatttctaaggttcctgctatgacaacaggatcgaattacagagcgtggcttggattctgcacgcaaaccctgaagcaggtaacttttttaaaagctgacaattttaccatatgagattttaaagacagaacgcgccccagcaaaaactgagctccctaaactcactgcggcaggacccccttcagaagagctcctttcccccggcccaggcccgcgccccatgaacactcaccggaggccatggctccgctccccgcaccttcccgcaggcagctcccagcgtcctggccggaggcggccgcagtcagtcagtcaggaggccgagggacctctgccggcggggcccccagtcccccgaccaccctagaggcctcctccttcttcccgccctccgctgggtttgcggctcacaccttcccaacccctgaattcttgcaccccgggtcacccagcgtcgccgtccaccgtacgggagccaggggcagggggcggagcggggagagccgagtgctggcccagccgagaggcgagcagcctggcgggaggggaatttcccgcggctgacgtaggcccgacgcagcaaccctcacccggaggcgtgggcggggcgacctcgcggccgccgcgcgcgcgaccgcccccagcgccccgcccctgcctgtccccgcgcacgctccccgccggcccccacgcatacgcccccggcgctgctgcggcggctggcttgggagggggtcgagggagcgggagcttggggtgggcttcgggagcgcagggaacggcgggagccgggaggtgacggctagcagcgtgagaaggccgctggctcctgagaaatccccctcctccaggttgttcttccgagtgtggtttaaagttcaggagcgggcgggagggtgcggatgacgtagagagggccggccgctggggagcttttgggggcgcgcggggccgactctcccggcctgggagggcgacggccggggttttcgagaggtggttccccctcttcccgacttcgcacatgcaaatctccacccccgcgccagcggcgggacgttgcgccctgtagggggaagtggtgctgcggcgggggtcctgtcttcttctgtaattcctgtatttgcatacggggaccccccccccgactgattttttttcctccatctaaattgcgagggtactgtgaactttacgtattttacctactgaaacccgtttaaactcaaaaggtccgcacttggagttcgttgtctcattaggcagtgcactgaagtttagtggacactatatcctgagatttcacacagatgccaagaaaggcggaaatggagcacacatttagtgcattaaaggacctaggataacttcgtttccttcatttgaatagtacctgctatgcatcagataatgtccatacttaatctatgacgtatttattattcctaactttatagatgaagtattcggggttcagagaagttacttcaacatacagtacttcagaatgctgataaaaggcacagtttaaagccagggttgtctgactccaaagctccatgcccttgcccctgtcccttactagttaaaattagtacggagaggtaatggggaatatcagcctgccatacaagtgcccaaaactgggggacccatatgggcaaataatttaaaatatcctgccaaccccaaactgttctttccacgaaatgcgcaatgtacaacaaaagaatgaaacagttttattattggatatgtactaaaacgtacca

SEQ ID NO: 3334 - DNA, 6000 bp, Homo sapiens
gttacttgggaggctgaggcagaagaatcgcttgaacctgagaggtgaaggttccagtgagccgagattgcgccactgtactccagcctgggcgataaagcaagactccgtctcaaaaaaaaaaaaaaaagaaagaaaggaaaggagttcagcatctctagttatcagggaaatgtatataaaaaccacaagaaggtactgctacacctccatcagactggctaaaattaaaaggacaataccaagtgttggtgaaacaaatggaattatcttaagttttgttgttgttgttgttgttgttttttagaaggagtttcactcttgttgcccaggctggagtggagtgcagtggtgcaatctcagctcactggaacctccgcctcccgggttcaagcgattctcctgcctcaccctcccaagtagctgggattacaggcatgcgccaccatgccgggctaattttgtatctttagtagagacaggatttctccatgttggtcaggctggtctcgaactcccgacctccggtgatccacctgcctcggcctcccaaagtgctgggattacaggcgtgagccaccgtgtccgtccggcctcttaagtttttttgtgggagtataatttggtacaacaaccctggaaaactggcagtgtctactaaaactaacatgtatttaccatatgatccagcagtactactcttgggtgtatatcaacagaaataagtgcttataaccaccaaaagatggacaactatgtggacacaactcaaatatttatcaacagtagactggataaataaaatgtgctatattcatacaatggatttctccccaataatgaaaaagaatgtactactgtcacacagtacggacatgacacatacaattgttaagtgagaaagtcatacttaaaagagtatacactgtatgaatccattcatatcaagttcaaaaacagatacaactaattattgtcaaggaggtcagaatatcgggtgccttttgggggtggatattgactagaagcagctccgaggcagccttctgagtggctggctagaagcgttctgtatcttaatccgggtagtgggttacaaagactctccttgatgacactctgaagaggcttctctgagccctgttctccactaggcttcagccttggcctgtaactactgcagatactgagcacacattattttatccatgccccacactaacagacctaaacaaatactagcatgcccctaggatgatgacttcggtcacctttagttactgcctgggaaagctcaagaatgccaaaataatatatgtttgttccagttctatgaacctatggtgaccacaacgtttgattttattctgaaactgttgttaactgtatccattcaatttaatgatgggtgtcttgttctttcaacaacaaaaaaatatcttatggagcaatttcacttttgacccctcactcttactttttcatattctgcgatcacagactcagaacacatccatttgctaatcagatttgtttctttcctggaggattgtgactttttaactgctgcatcattaaaaaattttttttcatatgtttaaggtaagttctttagcatcaacagttctaaaggttctaaaggttctctgccctttcagatcagtgcccactgttttataacatatatttgtaacatcccctttagtaggttgaagtgaaattcataatctaccttacatgaatattttcaaataaataaaaattatgttctaacagcaatatcaagaattaaaaagaaagcaatttctaggaaaataatatcgactacagtatgtaaatgcttgggcataactacatcaaaagacataatggggccagatgcagtggctcatgcctataatcccggcactttgggaggctgaggcgggaagatcatttgagcccaggagttcgagaccagcctgggcaacatagcaagaccccgtctcttaaaaaaaaaagacataatgggttgggtgtggtagcacgggcatgtagtcccagctgtttgggaggatgaggtaggaggatagcttgagcccaggaggtggaggctgcagtgagctgtgttcatgccagtgcattccagccttggtgacagagcaagaccctgtctccaaaaaaaaaaaaaagacataatgaagttgccagatgtttgtacttgtacctagaatcagtgtgaatgcaagtgctgcaaatgcagcctgatactactgtggttttttgtttgtttgttttctgagacacagtcttgctctgtcatccaggctagaatgcaatggtgtgatctcggctcactgcaacctccacctccccagttctagcgattctcgtgcctcagcctctcaagtagctgggattacaggagcacaccactacgcccagctaatttttgtatttttagtagcgacagggtttcaccatgttgcccaggctggtgttgaactcctgacctcaggtaatccacccgcctcggcctcccaaagttctgggattacaggtgtgagccaccacagctggcatactgtgttgtattgatgagctgtcagagttacaattttccaacttttaaaacattttttaataaaagtctgccctcaatttatacaatatttgcattcctgggaaattcagtatatattaaaaaccatacaaaaatattttatatctatatatgaaagggagttgtgttctaaccatatattattaaaataggcatttcaactacatgaaagtgaatgtttgatgagacgtttgaaggtcatgaggatgagggacaattcttgactgtgctctttcctatctcaaggacctgctgcctgctgttcccccagctggaatgttctttccctgaatctccctgtgaatggcctttttttttttttttttttttttctgagacggagtctcgctctgtcgcccaggctggagtgcaagtggcatgatctcggctcaccgcaacctccgcctcccaggttcaagcaattctctacctcagcctcctgagtagctggggttacaggcgcccgccaccacgcctggctaatttttgtatttttagtagagacggggtttcaccatcttggccagactggtcttgaactcccaacctcgtgatccacttgcctcagcctcccaaagtgctgggattacaggcatgagccactgcgcctggccggctctttcttaaactgaggactcagctcaaatgtcacctcctcagaactttcctctcccccagtcacttttcattttgaaattccttcagagaactgaaaatgttttccgtctctttgaaatgtatgtacatattttaaaaagctaaataagcctcttgctagttttgcgtcctcagaaggtctttcttgcgggcctcggagccatctcttggaaatgtgaacatcaaggatggtgctccatgtttctgtctctaggagggtttaagccttggctcttggttccaagataacttcccattattttcctttggataaagacaattaataggtatgtaatggattgtacgtgcctgaccatatgaaaaggtgagatttccttttttttggtctttgcactctcttcagtggattgcctgtgatgtgcatcatggtacgttttagtacatatccaataataaaactgtttcattcttttgttgtacattgcgcatttcgtggaaagaacagtttggggttggcaggatattttaaattatttgcccatatgggtcccccagttttgggcacttgtatggcaggctgatattccccattacctctccgtactaattttaactagtaagggacaggggcaagggcatggagctttggagtcagacaaccctggctttaaactgtgccttttatcagcattctgaagtactgtatgttgaagtaacttctctgaaccccgaatacttcatctataaagttaggaataataaatacgtcatagattaagtatggacattatctgatgcatagcaggtactattcaaatgaaggaaacgaagttatcctaggtcctttaatgcactaaatgtgtgctccatttccgcctttcttggcatctgtgtgaaatctcaggatatagtgtccactaaacttcagtgcactgcctaatgagacaacgaactccaagtgcggaccttttgagtttaaacgggtttcagtaggtaaaatacgtaaagttcacagtaccctcgcaatttagatggaggaaaaaaaatcagtcggggggggggtccccgtatgcaaatacaggaattacagaagaagacaggacccccgccgcagcaccacttccccctacagggcgcaacgtcccgccgctggcgcgggggtggagatttgcatgtgcgaagtcgggaagagggggaaccacctctcgaaaaccccggccgtcgccctcccaggccgggagagtcggccccgcgcgcccccaaaagctccccagcggccggccctctctacgtcatccgcaccctcccgcccgctcctgaactttaaaccacactcggaagaacaacctggaggagggggatttctcaggagccagcggccttctcacgctgctagccgtcacctcccggctcccgccgttccctgcgctcccgaagcccaccccaagctcccgctccctcgaccccctcccaagccagccgccgcagcagcgccgggggcgtatgcgtgggggccggcggggagcgtgcgcggggacaggcaggggcggggcgctgggggcggtcgcgcgcgcggcggccgcgaggtcgccccgcccacgcctccgggtgagggttgctgcgtcgggcctacgtcagccgcgggaaattcccctcccgccaggctgctcgcctctcggctgggccagcactcggctctccccgctccgccccctgcccctggctcccgtacggtggacggcgacgctgggtgacccggggtgcaagaattcaggggttgggaaggtgtgagccgcaaacccagcggagggcgggaagaaggaggaggcctctagggtggtcgggggactgggggccccgccggcagaggtccctcggcctcctgactgactgactgcggccgcctccggccaggacgctgggagctgcctgcgggaaggtgcggggagcggagccatggcctccggtgagtgttcatggggcgcgggcctgggccgggggaaaggagctcttctgaagggggtcctgccgcagtgagtttagggagctcagtttttgctggggcgcgttctgtctttaaaatctcatatggtaaaattgtcagcttttaaaaaagttacctgcttcagggtttgcgtgcagaatccaagccacgctctgtaattcgatcctgttgtcatagcaggaaccttagaaattcccaacgacttgattttaggattagggaagtcataagcgaaccaaaggaggacgaagagttctcattaaaaatgtatatgtattgaagatggtggttttatgttttagaacaggaatgaggaaccttcagacctcgggcaagctctctccccctttttagtttaatttcatcaaatgcaaagaggtgatcccccttgtactgacagttgtacaaaatgtgtcacggctttaaaaatcatccgtggtattttaacacgaattagaaaatccgtggtattttaagtgttaatgttgcttcgaccaagtgtaggccgggcgcggtggctcatgcctgtattcccagcactttgggaggccgaggcgggtggataaccagaggtcaggagtttgagaccagcctggcaaacatggtgaaaccccgtctctactaaaaatacaaaaatcagcggggcgtggtggcgcgcgcctgtaatcccagctactcgggaagctgaggcaggagaatcgcttgaacctgggaggtggaggttgcagtgagccgagatcgcgcccctgcactccagcctgggcgacagagggag

SEQ ID NO: 3335 - DNA, 6000 bp, Homo sapiens
taatttcattgaagacagaaagctgtaataatttatctttatcttcctcactgttccaaacacaagtacaaaacacatttactatgtgtcaggtcataaacatttgataaaagcaggagggaggaaaaggaaaaggaaggaagaaaaaacttttaaaaagaaagaaaaaagcaagctaatgaacaaatggacaaacagccctaggataattctgattcaacaatagggcagccaacaaggctcacactagtttaatgaattagattctgagttattcacttgagctagaaatgtaactacttctaaaaacctaaacataaaatatatattaaaatttgagctgggcgcaggagctcacgcctgtaatcccagcactttggaaggctgagacgggctgaccacctgaggtcaggtgttcgagaccagcctggccaacatggtgaaagcccgtctggtctctactaaaaatacaataaattagctggatgtggtggtgcgcacctgtaatcctagccactcgggaggttgaagccagggaacagcttgaacccgggagaggggaggttgcagtgagctgagatcgtgccactgcactccagcctgggagacagagtgagactccatctcaaaacaacaacaacaacaacaacaaaaaaacacacacgaaaatatatatattaaagtttgagtcagcaaaacttttaaaaagtttaatttttagccactttaaatttggaaaggaagtcttaatgtaattgcacataaatttcagtgggggtagaaaacacccacctaccattcccaggctaagctgcctctgacctcttcgcataatattctacaacacggaagctaagctatgaggctttctgtccttggtacacagcaggtacacttaagactttcagagaagctgagagaagtagatgttggggaccaggacataccacctcaaatatcactctgggggaccagaatatgctctcctaaaatattcttctttggtggcatattttgagctggttattctaagaaactgtagacacaggagtagctctgaaaagctgtccttttgtaaaataagtttatgtctacaaaggaaatctacattagtaacgtatctatatcagagagagggctgcctcaagataacttttattacctgagagactttttatctgcatggcaggacaatctttctttaccatgcatttcccctcttgccctcctgtagcttatcattacctctccgaaggccccaagccccagttttgtttttttttttgagatggagtcttgctctgtcacctaggctggagtacagtggtgtgatctcagtttactgcaacctctacctcccgggttgaagatattctcctgcctcagctacctgagtagctaggattacaggtacccgccaccatgcctggctaattttttcaatttttttttttttgagattgagtctcgctctgttgcccaggctggagtgctgtggcacagtttcggctcactgcaatctccgcctcccaggttcaagcgattctcctgcctcagcctcccgagcagctgggatcacaggtatgtgccaccatgcccagctgatttttgtatttttagtagagacgggttttcaccatattggtcaggctggtcttgaactcctcaaatgatccacctgccttggcctcccaaagtgctgggattacaggcgtgagccactgtgcctgcccaattttttgtgtttttagtagagacagggtttcgccaggttggccaggctggtctcgaactcttgacctctagtgatccacccaccttggcttctcaaagagctgggatcacagccgtaagccgtaagccaccgcgcccggcaccaagccctattcttttttttttttgagatggactctcgctctgtagcccaggctggagtgcagtggtgccatctcagctgactgcaagctccgcctcccggattcacgccattcttctgtctcagcctcccgagtagctgggactacaggcagccgccaccacgcccaggtaattttgtttttgcatttttagtagagactgggtttcaccgtgttagccaggatgatcttgatgtcctgacctcgtgatccacccgccttggcctcccaaagtgctgggattagaggcgtgagctactgcacccggccaccaagccgtattcttttctgtagctcaggatgcttcaatcatcagacccttcttggagtctcttattttgaggaactcccatgcatatgtacttaatcaaatatgattttctcctgttaatctgtcttaggttaatttagttcataaactagccaaggaacctagcagggtggagggaagtcatttttttgctctcctacagagaaaagtaattaacatttaccaagggtcccaaagccattgtactatatgctttacattgtgtttattcaacgcttacagctatcctgtcacttagattaaaagctactaggaggtaatttttttttttttggtggttgttgttgagactgagtctcgctctgttgccaggctggagtgcagtggcgcgatctcggctcactacaacctctgactccctggttcaagccattctcctgcctcagcctcccgagtagctgagattctgtaatctcacgtgccacacgccaccacgcccagctaatttttgtatttttagcagagacggggtttcaccatgttggccaggatggtctcgatctcctgacctcataatctgcccgccttggcctcccaaagtgttgggattacaggcgtgagccactgcgcctggcagggggtaattctttgttgggaaagaaaatagttaattaaaggaagtttgggagtatacttcccaggggaggacagattgtatttttggctgaggacgagttctggacagttttctgagggttttttgggggtgtgtgtgtgtgtgtgtgtgtgtgtgtgcctttactagtgactcaggtcacagttttctgagattttttttctcccctcaagacagaatcttgctctgtcgcccaggctggagtgcagtggcctctcggcccactgtagcctccgcctcccgggttcaagcaattttcctgcctcagcctcccgagtagctgggattacaggcacgcgccaccatgcctggctaatttttgtatttttagtagagacagtgtttcaccatgttggccaggctggtcttgaattcctgacctcgtgatctgtccgttttggcctctcaaattcctgagattacaggcatgagccaccgagcctggccagttttctgagtttttatttgaaatcaaaataagctttttttttttttaatgggctttagagtccagggtaacgaacactttttggtgcctattactgaaccattcagggtattcctggggtggtgaccgtgttcatttcagaaaccaacatgttcatttcagaaaccaaactcgggtaacttttgataagttcatcaactaaggcccatggcagaatttgagggctaaggggtgtaattagtgtatgggtagaaataagtgccttctttctatattttggcgttgtaggaatttaaagtgattctgcagtaagtctcaggagacaattttcttagttcttagaagttggaagataaactttggacaatgtattacactatgccctttgtaattaaataactcaagataatgtgttaaagtttagcggagatttaaattcctgagctgattaaagagagctgttaaggccataggttttttaaaaatgagttaatattactcccagaaattgtaggcactatatagtgatgaattgcctatttttattgcttattattttccagtcttgcagaatggctcagggttagtagcaactaaaagataatacattacaattcaacctgaaggccgggacgaaggtaggaattggattttaggctggctctgggctgtgtccctcccatccatgggatgtggagccattgaaggttgtggggtcacgatgcaggtgctgtctcagaaagatacatccgactgtgtgtgcaaatgggctggggcggagaggagagagagaggtagagtccatttggagactactgcaatagccaggctgacgagttaagagcggggcacagtaagaatgggaagaaatctaagaagaaaatggtagtgcgcggggccaacaatggacgatgaccgaacccaggtggggatgggtgagtgacgagaagaaccgctccgtgccgtccagggagccccttgacttcccttctgttcttagagcggacgtcctcctaccagcccccaaccagcgccaccagggtggcgcaagcctcaagctggtcaggtcagcaacagccgcaacggaggcaggagccgacacgctcgtaccccggccccctccccgcccccgcacccccggcagtccctccggtttgaccactccccccggtcccttgcctcccccgacccccagcctccgtcggccgccggcaccaccctccgcccctctccgccccctcccccgtggggcgctgactcgcccggctgccacgtctcactgatgacatcactagggcagctcggccttagccaatccgccagggggagtccgagcgaagtcctagccagcgagtcagaggggaggggagcagggaggggccgagggtggggaggtgagggagtggggaatggggcgggcgacaacccttcaggtacgcatgccccagaggcgcggcgcttggcgggaagctgagtcctggccttgcgtcgcactgtctgtcctcagctcgcgtagccgcgctcgcgactccctttcccggcatgccaggcggtgcggccgccctctgggccgtgtaaaggcccctcggtctaaggcttccctatttcctggttcgccggcggccattttgggtggaagcgatagctgagtggcggcggctgctgattgtgttctaggggacggagtaggggaagacgtttgctctcccggaacagcctatctcattcctttctttcgattacccgtggcgcggagagtcagggcggcggctgcggcagcaagggcggcggtggcggcggcggcagctgcagtgacatgtccagcatgaatcccgaatagtgagttcaggagagcaccggtcggctgggtccgtgggccagcttgggggatcttaaaggggtcgaggagggttggggcagaagtcggggcatcggctggggtgaggcgagggtgatgggtcaggagaggctggcggccgggagtcgggccccattgtctgacgcggaggggcggccgcgcgggggaggggtcgggccggaggggtgagccgcccgggcctggaccgggtcaggttagagggcctgactgcggggcgggtgctgaggaagcctgccgaggggcctggggcggtgtgaaggggtatcttctctcggaggcagtgacttttgaaggaggacttgtctctaaggggaggggatggggtgggagagcccttctagagggcactgtcagaccctgcgcccgcactctgcggagctgtcaggatcttcggggtagaaaccagctttacttgtaaatcctgagcttgttggctctctctccttccatcctccccgccaggtttcaggtaatatggatgcttttcgggactgcgtgggattgaggggaatgagtagatggtgagaagcaactgaacatttattagttctctttttgagttgtgtcttggaggagttgtttaagagctcgccgggtccattgccctcctataaaaacctgggcatttgtgagaattttgttttttttttttttaaagaggacacctaagtcattttgtcttctgtgggtcaagggaaaaaaaaaaaactaaagccaagaaatgtctttttgatactcgcagattaaaggaagcttgctgtcaagttgaaagagaaacgaacgggacctatgatagatctgtatgtaggt

SEQ ID NO: 3336 - DNA, 6000 bp, Homo sapiens
aattttttagcagtgaaaccgtttaacttccacttaacgattatacaactggccgggcgcagtggctcacacctgtaatcccagcactttgggatgctgaggcaggtggatcatgaggtcaagagatggaggccatcctggccaacatggtgaaaccacgtctctactaaaaatacaaaaattagctgggtgtggtggcacacacctatagtcccagctactcgggaggttgaggcaggagaattgcttgaatctgggaggcggaggttgcagtgagccaagatcacgccactgcacaacagcctggtgacagagcaagattcggtctcaaaaaaaaaaaaaaaggcaattatatgactgcacttgtgtatgtgtgtttgattcaatatttcaaatggtttacattacctaaaatatatgcccccaaaggccttaaacctatactcccattatgttgttcagcacattgaacagggtctcttccatgcactgtctgtgttatgcaagaaactacaagatgcttgtacgtccctcaagatttttggcattatgagttgacttttcttacgggcaccattccagttatccagcaaattttaagaacttggcacttacatttctaatatattgctcagaatactgaatgaaggacaagaggtcaaggggtttagaagctgtggtgttgaagtaccatttataaggtaccgaaactaccaaaagtcatggcagggatagtgtaaagggagtgactgtgatgcaggcgctgcatcttcagagaattaggagagactcaggggtccctacgtggctgcagcaagcagggctggtctagtctaatgacatcagagtcaaagccagagactagagagtagggacacataatggtcttaagacagcaaagagaatatcacatccagacccagggacagggaggtgagtgtaggaagcatggttcaccaaaggaaaaccagggtgctattactagagtattgtggtatggatgctagctgctgggtgagtgagtgccaaagtggtctgaagattgcttttttttttttttgagacggagtctttctctctgttgcccaggctggagtgcagtggcaccatcttagctcactgcaacctctgcctcccaggttcaaacaattctcctgcctcagctgggattacaggcatgcgccaccacagccagctaatttttgtatttttagtagagacagtgtttcaccatgttgaccaggctggtctcgaactcccgacctcaagtaatctgcccaccttggccccccaaagtgttgggattacaggtgtgagccactgtacccagctgatgggatagaagatttctgagggaggtgaactggggggtctacatggtagactagaggcaggagggggaaataaattacaggtatagctgtagacagagctgaaaggggtaggggacaggggtaagaggacaaagagaagcaaggtatgggtttagacatagggtcattgaggactacgtcttcacacatttcatttgtgtgtggcctggcgcgctcctatgggaccttcaattggaagcctcaagtcctgtcactgatacgttgaacatgtttgacagatagattgtgaccacaatgccactttaccttggttacagctctttcacacttgaatcagtgggggtaatcttccctagcccttagatgaacactgcagcaggcctttaacattctctctttttcttaggtattaaacagtaggggctcctacttgtagcacagagtcttagctgacacaggagacacagtgggcattggagaatgggttccaggtaagtgtcttcttgttgaagttgcacaacagccttggaactagttatgtaatatggggtccgggttgttttttgtttgtttgtttgtcgctcatattttcctacatgtagtctgatcacttgaataattaggacattaaattgcaatatcatttggatgcacaagtacaaaattaacattgtagagctgacatctcacagtttagctaaattttggcatttgcagatttttaaaagcataactgcaacttctttgacacttctatcttcaagaggttgggcttgaacctctatggctcctccccatgagggtggggttgtgactgcttccatcaagagagtagggtggagttatgtgacctccgaggctaggacataaaaggccacgaagcttcctccttgtttactggaatgcttgctcttggagccctgagctgccatgcaagacttccagctactccaaggccaccatggagaagcctagtttaggtgctccagttagtctgcagccctagtgcccaagtcatcccagtgcagatggcagctatgtgagtgaatgagccttgagatcggggttagccaactttttatctaaagggccagattgcatggctttgtgggccacataatctctgtcacaattaccaacatgaatgactgtgtttcgataacgattatttgcaaaaagaagccataggcctgcaggttataatttactttacatgattctaatccccaaccatttgagcctaaggtcccaggcagatatggaggagcaaggacaacctatttcccctgtgctctgtccaaacctccgatccacagaattcaggaatctaataaaatggctgacattttactcccactatgtttggggtggtatatcaaacaccggtagatagctgaagagtattgtacaaggcaggcctcaacaagaaagtgagatttgagctgacttggaggagagccaactgggaagctgtgtgtctaggggaagagcatttcaggcagagagaacagccagtgcaaacctttgggcggaggagtgcttggtatatgtgagcaatagcaaggaaattgcaggagaacagctctgccgaggtgtccttggcaatcttgcacatctctcgaggccatgtaggcaaggtatgaccacggtctgacccaagtcttgttggactgccctgtgatttcccctaaagcagggatgggtaagcctggtgaggagccactggtaggcagtttcctatccctaccccatgggagactgctgcaaggccatttctcttccttctccaacgtttcagttgactgcaggactttccatatccctccctccaccgcccagcccgcttccctccaagcatacagcggcaggctcctgtgaagtctataaaactgcttggtgtaatttagacttggctactcagcggcagggctcatgttgtcttatttatttatttatttatttatttatttttgttaaattatgtagacccataggataacactgacccttccagtttggtgttatcttgtaggcctaaggatgcatggagctgacaccacactgattttgcttttgctgtcggtgtaagtaataacctgtctaaacccatctgggctgcctgtctccttcccgtagccaaatctacgggaagtgtccagccagtgtaggggtcaagggaccgcttgacgagaccaacgtaaattgaagaggcgtaaggagatgaggccaaagaggaaaggggaccaggtcacgtagaacctcgtagaccactgcagaaccttggcttacgtacgcagagacagcaggaaccactgataggtttagggagatttgaggagagggacatgatttggcttatgttatgttgttaaagggaccacattaaaatacattcattctaaaagtgttacctttaagaaactacgtatataaattaagttactgttgccattattagcgtaagtagttacatttctcttacgactcactctctgctactgcctcttggaccctgcacaccttgtggaggcccatgagagtgacgtgctgtggttccccctctccccactcctgctctgcactttgtcattcacgttcatctccctccttgagtgtcacctctctctggctcgtcacggagccacggcaaagcgtcctttcccaggaacccctccccctggggaggtgagctcctcgccgccagggccgtgtcgcgcacctcgggccgggtacccaggcggcgctcggcggcgagcggaatggatgtggaggagcgctcggcagggagcgctgccgccctggccttggcctctgggagcggcgcggccagggttttctgtgtcagccaagcccggaatgcgggggcgcctctggaccctcctcttgggtctgggggctgcctcgggcatcctctactcctctcccaccttctgtccttccccatctcccacccacacgtgtggggccccggacccgcgcagcggccagagccttccgctgtggacctccagtccacccctccccttcacttctctttccggctccctccgggtctctcagccccctccccttcctctccgcccccttccccgccgtctgcccagcggcggccttcggcccgccccttctctccaaccccctccctttcccctttacgcccctcctccccctcgtcctcccgccccctcccaccccaacctgctgggcccgccgggactcgcccccctgcccgctcctctcctccagccccggccggcctcggctcggcccccggcccgccccttccagccctcggcacctcccgccggccgcttggctccgccactcggcactcactgcccgggccgcccggacagggagcttcgctggcgcgcttggccggcgacaggacaggttcgggacgtccatctgtccatccgtccggagagaaattacagatccgcagccccgggatggggccggccccgctgccgctgctgctgggcctcttcctccccgcgctctggcgtagaggtgagtgcgcccggctgggggccaggcgagggggtgggggctcccaggaggaagcaggggcctctggggagggagcgcgtccacaggggcgcgcctggctgctggacaagtttgcaaacaccctccacccactgcggtgccagaggagggggcgtaggcgaacctaccgtccactgaccgcggcgcctcaagcgtcccgagggcacccagcctggcttgcgggtgcgcatcgtggtgaagccgggtcggggtcggcgttgcaggctcccctcttcaccgcagaggaggaaatcgagctcggccgggcgcgctgcaagtcctgaagttccgacgagtggaacgtaggtagcaggtctggtctgggatgcgacgagaactttccactagagttgcatggtggggccccgctctggccggagtcccgggggccacagatccggtctcccgagggaccggcgcggggcgaacgaacgggctgcgggagtcggagccgcagtccgggagccgcgatagactgaggccgagcgacgggccagggggggacggcagtcctggctgctcccaatgggcccttacgggcattattagtatccctttttaggggcacccagagagtgtgggaaaaggggagcgttcttttcactcctgttatggcagaacagaacttacagtgctcggcagcgtttacgtttatctggattcagcgaagtgttgttacaggcttttttttttttaatttgagaccgagtctcgccctgtcgcccaggctggagtgccgcggcgcgatctcggctcactgcaggctccgcctcccgggttcaagcgattctcctgcctcagcctcccgagtagctgagactatagacgcgcgctaccacgtccggctaatttttgtatttttagtagagacggggtttcaccatgttggccaggatggtctcgatctcttgacctcgtgatctgctctccttggcctcccaaagttctgggattacagtcgtgagccaccgcgcccggcttgttccaggcattttaatacaagatgctggactgatacgtggaggcaaggaaggccggtttcattctgcttgaacagcttatttggggagtgagtgatgaacagatttcaagtttgatcgctgatgcacttctt

SEQ ID NO: 3337 - DNA, 6000 bp, Homo sapiens
tacactctaaccatgattttatacttctgatatttaaactgcagcttgaattgtaaaaggaggatagattttatttataactataaagaaacagcacccttactataaagaaaacacatcatcttcttagatcacgtagaaaattacacaaagaaattaccgtggccagaggttaagatggtcaatgaaaaagactcaagctcagaacactgtcttgagagggcacatgctcagaaagtgcaggaggaagaggagagatccataaacttgcctcatccaagcagaagcagtgaaagaataaaaacacaggcacagagggattttcttaaggaaaagttgcctctggaagacaggatgaaggagggaaaaagaggccccagagactcattccctcccaacgttctgcagcttagcagagaaccagctcggcaggcctgagctcaaaaacagagcaggcctacctccggaggctctaggaagctgcctctgtcactgtcacatacacagatgttccctgtcttcttttcccaaaaatatttagagtaggcactggtcactggtggcctaagcacaactccctcaggataatgagagcttgggacccagggagtcacatggtgtgacctttctgcttgtaagtttcccccatcactctagtctgtactcacaccatgtggccttagttttgggtggggggggtgtgcctttgccctctttgcacaacgatgataggcaatcattaacggtaatggaagaccctaaaggccaagttagacagctatcaaagaaaaaagacaacacatctggacctaactactcttaaagatggaatcagaaagccacgtcttgttggctgggtgcggtggctcacacctgtaatcccagcgctttgggaggccaaggcagacagatcacttgaggttaggaattccagaccaacctggccaacatggcaaaacctctgctaaaaatacaaaaaaattagctaggcatggtggcgcatgcctgtaatcccagctactcaggaggctgaggcatgagaattgcttgaacctgggaggcggaggttgcagtgagccgagattgccccactgtactccagcctgggtgacagagcaagactctgtctcaaaaaaaaaccaaaaaaacaaaaaaacaccatgtcttgttattaagcagtatgatcacctggggtcaaaagaaatctggtcgggtgcagtggctcacacctgtaatggcagctcaggaaggtggcatgtgcaggagcaaaggaaaagccttccacaggaggcagtgcccaggtctgaggtcacctgttcacagggggtaggggagctgtcatcagagcccaccaacagagccctgagtggaatcaagaagcatgaacatgctgcatgagaaaaaaaaaaaaaggcaccttaaagaaagcctggtgactggggctgctaccgtggtaaatttctgaactctgcaagaaggccgcactgccacaacattgctatctagaaatgaggccgtgtacaactgacgcccttcagatatgatgaacacaagtgttaacttttttttttgagacagggtcttgctctgtcactaggctagagtgcagtggcacaatcatagctcaccacagcctgatgtgtcaacctcttaatgggtgttttagcccaaccgagtttagattcataggttagagatactgaaaattggcagtagttcttgagtccaatcaaaactgaaccacagtgttctcatgcactcaccttccctcagatgcactgtttccatcatggtctttgtatctgggacaaccttttgcctgagatactgctagtggatgaagactggcttgttttctaattgttgtgtctgtggaggccaatgttatggtaatctttgacgtcaagttaactacttggattcttattttttgttactgtttgaaatgaggcatataaagagactagcattgaacttgggagctgggtataccaagatacattctccgaaagctctgtttgttattaaagtggcaatttgctctacacctgcctgccatttctattctttgttgttttaaacttgagtggggataaagggggtattatttattgggtaaccttcccaaactacaacacctaccctcacttttactgtacaggcgtgctgttgaggatggtcaaagtaactataaaatactaaaccagaggccgggcgcggtggctcatgcctataatcccagcactttcggaggctgaggtgggcggatcacgaggtcaggagatcaagaccatcctggctaacaaggtgaagccccgtctctactaaaaatacaaaaataaaattagctgggtgtggtggcgggcgcctgtagtcctagctactcgcaaggctgtggcaggagaatggtgtgaacccgggaggcggagcttgcagtgagccgagatcacgtcactgcactccagcctgggggacagagcgagactccgtctcaaaaaaaaaaaaaaaattctaaaccagagctgcagtgtgtgattgtgtggtggggaagagagagagagagagagacagagaattcaaattcatggagatggcctaaaaaccagcaaagcccccagagaattattcacagctacctgagtcaaaggacttgactataaaaatgaaggtagaaaccaaggtgggcctggagtacttgggagataaacgtgaccacttctctgggcaggggcaagtgtaccgtcatgctatgaaggcggaaatggacatgtgccctcagcagtcctaggcgtgagaactaggacgtctcatggagacaagctggcagcacggcagagcctcccttcacctctccaggtggcatgtaggcaccgaaattcattacaagaagaagccagtcttcacaatgattatagtcaatcgtcagttctacccagttttctctatttcagagagtccctccaagaaagcatctttaccacctttacccaatctgtcacggtggcatagtcacttttgtctttccattcccactccccgcccttgccatccctcagcccacaaaccacatacaatgtcctcagttgctccacacgttctctcagggctcagaggaaacattcaaattcctcagtccttatgacctgccccctccacccgacacacacaacgggtcatgtgattcccctcgttcccccatgaacatctgggctccagccaagactgctccttcaccagccccaagaagccatgctcctctgcctctggaggactttttaaatgacctggaccctctctggggctggtatttattccctaatctcccaacatacttggatttgcccactgcgctgtctcccaggcagatgatcttcacgttgtcatcagcatcatacttcccttggtccaactcactcggtttggttttgtcttctgccattggctcctagctgtagagaggggtccagcccaagggaggggagggtattgtcactgtctgggaagatcaacaagaggctgttgtcagagataagtcccctcaaccaaatctccagctgtacctccatccagactgcttccctcagtgccagactgagatatggtatgcaattggctactagacttggagtagcagaggatgacacacaggcatcagtaatatgttatacacaaatagttaagtcctgcgcaccccaaatgctgctcctcacgttacccatttgcacaagacattcaccaggcatccagtgccaaaggctgtgtgcaacattatgtctagctctgttttactctcctcacacctaaatatgactttgcagacattcctgagaatgtaaccacagtccagactcttagctaggggggcacatagaaatgatatgatgatgagatagcagcaataggtgagccttactgggcattcaccatgagcagaccttgcacagggttcagaggatggaagacacaatgatagcagagtctactgtggtgagagctacgacagaagtatgcacacgggtcaggggtagaaaataccaacagggcccccgagttttcctgactgtgccaccacacagctactgcttctgcacagccagggacttcgccttgtttatccagggagacaattcctgggaagtggcagatgcctggaaagcatgatgaggggtctgccccctttcacctgtaccctgtagagagagcgacagaaagccaaatccagcttcatggctccatgcttgaagacgttctttcttttgtttagagatagggtctcactctgtcgcccaggctggagtgcagtggcgcgatcacggctcactgcagcctccaactcctggactcaagcgatcctccctcctcggcatccctggactataggcgtgagccaccgcttacgggcgaagacttgcttgtcgatgtcctcgccatctaagtgggtatgctatctttcgataaatgtttttggccaccaaccatgtccaggcatcgccaggctgcccgtcccgccccccacaacagcctcgcgaagccacctttccgtgcttcccccgacccggacgccctctcgcccacaccgctagggaggcctcggaggggctgtccccgcgtgctaagccagccaccggggcggatttgccctcacgtgcggttccgagtgagggctggagagaccagggacgctgcgggtcggcccctcgggccctgccgccagtctggactctgcgcgctctcgaaccaccccgccggcccagctcgcaccgcagcgcactccacttccggctcgccccgcgtcctcgcagctgctacgcaaccgcgcaaggaccccgagggaggctgcccggccgaaggcctgaaggaccccgccggggcgctggctgcccagcgcggcgcctggcgggagggccgcagggagtgcgcatgcggccgagtgcgggactggggctcctggctgtgggtgtggtactgaggcttcagcgggtgccgcccgcctagagggagtggagcggtgagcacgtcaggggtggggggcgcaggtcaagctttcaccagtttttaattctttgatggggtaaatttgagcaattttctcgacttgtcgacattcgttattaactgagcaggaatcaggagaggaacccggtcctctccacacagcccagcaggtacgccgcccatgtgcctgtggagaagagaggttcctgtggggcagacaggtgtggaccaagtagctgtgaaatttcttctgaagaaaacacacaaggaggaagcgagtgagctcagtggaggaggggcgctaccccaggggacgtccccatgcatgggcttgtgaacctcgaatatgtgagacggtctcagtcaatttagaaagtttattttgccaaggttgaggacgcacgcccgtgacacagcctcaggaggtcttgacatgtgccaaaggtggtcgggacacagcttgcttttatacattttagggagacaggagacatcaatatatgtaagatgaacgttggttccctcgggaaaggcgggacaactcgaagcagggagggggcttccaggtcacaggtaggtgagagacaaactgttgtattctttcgggtttctgaatagcctccgcaaaggaggctatcacatattaacctatctcagtgagcagaggggtgactttgaatagatggggaggcaggtttgccctaagcagttcccagcttttttccctttagcttagtgattttggggcccccagattcattttcctttcacaggctagacagctttaggaactgaaaggttcacgaggctgtaacgaagagtcgagttgctccaggtgagcctgggccacaacagcaggcaggacctgggcgcccacgaggggctcctgggagggttcgggaaagggatgtgtgaaccctatctgagatggtttcaggtaatttagaaagacgtgcacccgtgacacagcctcaggaggtcttgacgacatgtgcccaaggtggt

SEQ ID NO: 3338 - DNA, 6000 bp, Homo sapiens
tacgtgctagaaacagaagcatctgggtcacagctatattagagctacctgtgttcccctgtcactgacattaaaacaaaaatgtccaatacgatccttcacagtgtgggagaggggaagatgaaggatggaaaggccaggcataaaaggatttcagaatttccgtccataaggaagtggctttgtgcactgtctgttactgcgtgcaaggtgaaatttgaagaatgaaaacatgcagtaacaagggctcctttgtccaactcacctctccagataccaagtttcagacatgttgcattttaattgaaaggttgatataattttttttaaagaacacttgcggtgtttgaagtgacaaaggctgctgtgacaaaaaagcagggaaagggaatttttttttaaaaaagcaaacaacaacaacaaaaaccccagagaaaagcaaacaacaaacaaacaaaaaacagaggaagaagtcaaacaccctgggctgtgactacttccaggaaggggctacaagaggcagttggaaattctatttgctttgcaactgtgggttttctggcctgcttcctttctaaagtatattactctgcttttggttcatgaagttatccatttctgttttctggaacagctatgtattttctttatctatcatctatctatctgtttaccatctatcttttctacctttcgctatcaagagcttgggtcaagcaggatagaattccagtgtatgttcactctaccatttaaaacaagagctcttgtgggcattctccatcacatcataaacctgagctttctaaaacagagtgtggcaaactaccatgcatggaccatgtctgacacagtctgcgtttgtaagtaaagttgtaatgggacacagccaatacatgtgttacataatgtctctggctactttcacggtataatggaagagcagagtcattgagagagagaccatatggcttggaaaacttgaaatatttaacacttagccccttgcagaaaatatttgctgactcttgttttaaaagatctctgtttagaatgctacctattgccttctggatagaatcgcaactctttaccacaatcgacacagcttcagccctgcttctatatccagcctcatctgtttctgctcctcctccttattttccttctggacatgctgatggattgtcagcttcccagatgtgcgagaatctctcctcccttcccaacattctcacaatctccctctgcctctcaagaacttcctgtcccatctctcatgacaaatcctttcttcattctttaagatgcagccccttggctctttccttaaggatgtctgtctggctctattttgggtgacgtgctccttctgcatctcccagagccagccggtgtgtgtcagctacaacatttctttgcatctctgtgtcgtatatcaccaaatctgcctaagcttgcatgagtcactgcatgacaacttcagactccaccagcattgtccccactaaccacaaggcttagacattcgtccagtatgctcggggttgtggggtggtagcagtaaccagctggtgaccatcatttcttacatcagaatcaaatctgtagatctctgccattcataagtatttggagtttaaaattagcataaagattttccttaaaataagaacaaatggcttgagtaggcttttggaacgtaggatgtttccactggttcatgtctgtgttcagtattcccacatgaatctaaacacgactctgctcttagtagctgtgtgaccctgggacagtcactcagtctccctcagctaaattttgttgtgtgagtaatgaggagagagttgtgatttgtatttagtgaataataacaaacaaaaggcatttagctttctggaacatggtatgtagtagaacctcatgaaaatactagctgttgataaaactagactgaaaaaagctttcaaagtcaacaacagtatgaggcagtgaaggacgtagaggagaagctgctgctgcagcctgtagctcctggaagcccgttttgtccatgatttagcaggaactcattacctttccatgaggacactgcccacagaaaccaaggccattctttgaagacaaacatgtcttaatagcctttacattatgtaatagtgtaatacaaataataatttattattagtaataatgtgaaattatttacagtaccataaccctaaccataacccctaatcctaaccctaaccctaacccctaacccctaaccctaacccctaacccctaaccccaacccctaaccctaaaccctaacccctaaccctaacccctgaccttgaccctaaccctaacccctaaccatgactctgaccctgaccctaactctgaccctaccctaaccctaacccctaaccctcaccccccaccctcaccatcaccctaacccaaccctaacccaacgactgtaagccgtttacaggaaactcaagccaaaacactacttgtttccaacgttttgtttgcagaggatttacaaattacactccaaaacaagatagccacagagcatactacttctcctctgaagtcgctctgagggcctccgcatcagtcctagaattggaagattggtggacaagaactgggatgttgatggggcactgaatatttgctggacaccaacctcctgttacctaaccttacagagggcccagatctcacctgcccaaatcagacattttaacacacacacctctcaacagcaggacttacacacacaaaactctgaggtaaagaaaggattgtctcaactccttggtgtctcaacgaactaaaacactgcctagcgcaggtgcaccatcaaccttattcactaaatacacctctgtatatattcttcatctttgattgtggaaatgatataatcaacataaaaatgttttatagattggactaaagacctttgaggtctcttcacaggatcctatctggcggacccccaaatctgccaacacagaggtcatccgtaaacatgtgcaggacagaggccagacaaaaccatctctctcagcctcaaagtggcctggcagtcacatgtggggtctggcctgtgtgaggaagtcaggctttcggctccaggcaccctactgcaccgcaaaaccaagttctgcctaacaaacaaaaaacagcctgctcactctccctaatatcccaggtggtaacctaagagcattatgctagacacccctcctcctccaccctccatgtccaagctatcaccaaggtcctagcaatcttacctcctaaatgtctcccaaatccacttctctcccttcaatgtccaggccaccagcatgacttctgcatgtgtgtagcagcctccgcgcaggacgtaaagatgcaaatctagtcgtaggctctctgaaaggaaaattttggggacccaaaattactaagctaaaggaaaagtcaagctgggaactgctcagggcaaacctgcctccctttctattccaagtcacctatctcctcactaagataggtgcatatctgattccctgctttggagaggctaatcagaaactcaaaacaatgcaacctttgtctctcacctacctgtgaccttggaagccccctccctgcttccagttgtccccacctttctggatggaagcaacgtacttcttacatatattgattgatgtctcatgtctccctaaaaccaagctgtgccctgaccaccttgggcacatgtcgtcaagacctcctgaggctgtgtcacgggtgcacgtctttctaaattacctgaaaccatctcagatagggttcacacatccctttcccgaaccctcccaggagcccctcgtgggcgcccaggtcctgcctgctgttgtggcccaggctcacctggagcaactcgactcttcgttacagcctcgtgaacctttcagttcctaaagctgtctagcctgtgaaaggaaaatgaatctgggggccccaaaatcactaagctaaagggaaaaaagctgggaactgcttagggcaaacctgcctccccatctattcaaagtcacccctctgctcactgagataggttaatatgtgatagcctcctttgcggaggctattcagaaacccgaaagaatacaacagtttgtctctcacctacctgtgacctggaagccccctccctgcttcgagttgtcccgcctttcccgagggaaccaacgttcatcttacatatattgatgtctcctgtctccctaaaatgtataaaagcaagctgtgtcccgaccacctttggcacatgtcaagacctcctgaggctgtgtcacgggcgtgcgtcctcaaccttggcaaaataaactttctaaattgactgagaccgtctcacatattcgaggttcacaagcccatgcatggggacgtcccctggggtagcgcccctcctccactgagctcactcgcttcctccttgtgtgttttcttcagaagaaatttcacagctacttggtccacacctgtctgccccacaggaacctctcttctccacaggcacatgggcggcgtacctgctgggctgtgtggagaggaccgggttcctctcctgattcctgctcagttaataacgaatgtcgacaagtcgagaaaattgctcaaatttaccccatcaaagaattaaaaactggtgaaagcttgacctgcgccccccacccctgacgtgctcaccgctccactccctctaggcgggcggcacccgctgaagcctcagtaccacacccacagccaggagccccagtcccgcactcggccgcatgcgcactccctgcggccctcccgccaggcgccgcgctgggcagccagcgccccggcggggtccttcaggccttcggccgggcagcctccctcggggtccttgcgcggttgcgtagcagctgcgaggacgcggggcgagccggaagtggagtgcgctgcggtgcgagctgggccggcggggtggttcgagagcgcgcagagtccagactggcggcagggcccgaggggccgacccgcagcgtccctggtctctccagccctcactcggaaccgcacgtgagggcaaatccgccccggtggctggcttagcacgcggggacagcccctccgaggcctccctagcggtgtgggcgagagggcgtccgggtcgggggaagcacggaaaggtggcttcgcgaggctgttgtggggggcgggacgggcagcctggcgatgcctggacatggttggtggccaaaaacatttatcgaaagatagcatacccacttagatggcgaggacatcgacaagcaagtcttcgcccgtaagcggtggctcacgcctatagtccagggatgccgaggagggaggatcgcttgagtccaggagttggaggctgcagtgagccgtgatcgcgccactgcactccagcctgggcgacagagtgagaccctatctctaaacaaaagaaagaacgtcttcaagcatggagccatgaagctggatttggctttctgtcgctctctctacagggtacaggtgaaagggggcagacccctcatcatgctttccaggcatctgccacttcccaggaattgtctccctggataaacaaggcgaagtccctggctgtgcagaagcagtagctgtgtggtggcacagtcaggaaaactcgggggccctgttggtattttctacccctgacccgtgtgcatacttctgtcgtagctctcaccacagtagactctgctatcattgtgtcttccatcctctgaaccctgtgcaaggtctgctcatggtgaatgcccagtaaggctcacctattgctgctatctcatcatcatatcatttctatgtgcccccctagctaagagtctggactgtggttacattctcaggaatgtctgcaaagtcatatttaggtgtgaggagagtaaaacagagctagacataatgttgcacacagcctttggcactggatgc

SEQ ID NO: 3339 - DNA, 6000 bp, Homo sapiens
gatggtcctctcaataaccaatagattaagcagattctcctgtctcagcctcctgagtagctgggattacaggcgtgtgtcgccacacctggctaattttttgtatctttagtggagacaagggcttcaccatgttggccaggctgctctcggcctcccaaagtgctgggattacaggcgtgagccaccgcgcccgaccgggaaatggcttttgaacggaaggcgcagctttggcctggcctctgtttccctttgcataacacaagggtaattgcatgtgcagaactgtgctctggtggaaataacagatttgagagcttcacgtgggctggtgtgtgtactcatagtgacatgagctgttttgttatgacgggttggtaatgctgatacccaatttccagacttgacccggaagctgtgtggctgtggagtgaaagggggaagggaagccacaggtggcttccaggttgtcagccttagggtgaaaaagtctgggacaagggagagatggagacgccatctgaccaccttgcctgttctgcttacagactcatggagagatttctcatggatggcttgtatccttcaaggtttgaagtactccttgttcctgtgggtcttcccacgctcatgtatcagtgtcccactgcccacccctttgtaccagcagcccaggaacaggaaggaggattgggtaagtgaacgcacaggttttgttctgcacttgtttcttgccgattgacccacatggcattgcacaatcagtgctgtatattttggaccttactcatatttggattgttttatattaagagggcagtagaatggcaaacagcaaatggtttggatctaatgcctggattcaaaccccacctcctcctcctcagtagcttctgatactggccaagtcatttaacctctctaacctcaaagcttgggccccctactattgaaaaaaatctctgatatgaatgaactttgtaaaataggagctgccagccccacctttctcccatgaattgttatattacataggtttggagtgagttcctccccgcaactgggagatttttaaacagcttcccaagtggatccactgagaaccacaggtgagaggagcccctggagcctgctgctgcctgtcctaggctcggcaccccaaggctcagttgccttaagatctgagtatgtgttactccaccttgtaccaagtgctcctgcacacccagcccacctgcgtcatttggctctgctttttacactgtccagcttcttgcagcctcggaaggtgttaatccccagagtttaaccctttttctcagggtttcacacatagacagactccaaattgattgacagcttgtcaactgtatggcttgtgggagcttctgtccctggaatggtcatgttgctacctagggttagggtttcctttctagcctgcgaaagctccatccatgattgagttggggtatccacttttgcattttccaactgcatgatgccttttatgacacttgtctgtaaaatcctgttctgtgttttacctcagacttcgatggccaggacacactctcatctcctcccacccctcacccttccatggagcttgtaccagtggtatgtgaagctgatcctctgtctgcaacattcatttgatttaaaatctcaataactccaaagagaagaggagggagaggatccatttcatcaaaccaaacacccctgctccccactccttccttacctccccttttattgattttgctccttaacctgagtgcagtcagccacagcagctgtccacgtacgccctgaccctgtacaagcacacagccacggtagatggcaagaccatccttgtgggtaagtggcacagggccaagacatgctgaccctcaggaaagaggaaatgggagacgaggggaggtgaggcaaggttcataaggagagagtccagagggagaaaatgagaccccaggcagggacaaggggtgctagagagaacccagagagccaggagccaggagggtggaagggggcacgcaggggccaagtcccagccctctgacctggcgtccaggccagcacctgtgcaggacagggttcaggaaaggagaagtcagggggctgtacccacctcagggaagaagaacataagaggccttcgacgaggcagtagttttcctagcttcaggggttcttactcagccagtttgaaaaaataaatgtggtcagaacattatctcccacatcgggctgcgaccttccatcgggtcataatcttctccttggccgggcacacagcctgcctgactctgtctaccgtctgtggtcatcgcacgtgagaagttggaatagtttggaacttagaggaccctgcgtgtcacgtgggaaacggggaactgtcttctccctccttgggcttccagtgtgttgtccttcctcctggcccctgacccactgtcttcccatacacacaggtgaagacacacctctcacatcacactcaggtgcactgtgtcttgaagacacacgtgtggggctgtatagtctctgtttctccctgtgctccccatgtacactcacacatgtgctgtggtttgtgccgcatgtgtgttgtatcttagtgacttgcacagaaatgcaccaggcatgtaggtctgtctgtgttcacattgcagacttttgggacacggcaggccaggagcggttccagagcatgcatgcctcctactaccacaaggcccatgcctgcatcatggtacgagacggtggggaggtggacaaaggcactgggcaagtctggcctgaggggtgaggggcctagcagccctgggcccttgtaaccaagtctgggtgttgtgggaggggggcttagggtcacccggggatgtttcaaaccacacctgctccccagagcttcttagtgagaaggtgccaggtgagctctctgtaggcggggatgggtggagaaaaggtggaacagcaagctcagggcttcaacatcaggtgtagcatccaagaggcaaacatgcctgaaacagggccacagtccctctgatggacctaacctgtcagacaagctcccaaggcctccctccactgttgcctgctgcctttccctagggggcacatgctgggactgagtagatgctgcgggtcccagagaaccttctctctcaggccagcccctcgcctccccccgagcctcccattgtgttgcccgggacgcagtcctcacggctccaccctggtgacccgggtgtggtgaagcagtcgctccaacagaaaaatgcagccgaggaaacggctgagaaaggagaaaggagctctgtaaacctgtgtcctatagaagttcctacccgtgaattccctggctgcgttctcaggccaccacttttaaatgctgaaaaggagcatgtttttcttttgggtcacttaaaaaacattttcatggctgggcacggtggctcatgcctgtaatcccagcactttgggaggccaagatgggtggatcacctgaggtcagcagtttgagaccagcgtggccaacatggtgaaatcccgtctctactaaaaatacaaaaaattagccgggcatggtggcgggtgcctgtaatcccagctacttgggaggctgaggcaggagaatcatttgaacccaggaggcagaggttgcagtgagccgagatcacaccattgcactccagcctgggcaacaagagcaaaactccatctaaaaaaaacccacattttcatgaatatcagccatcaacaatgcagaaagtaatagactagtcttctgaattattaaccctagcaattgtcaccaagtgaaaacctcggtcactaaaacttcttggaatagcattcaaggtcttgctttaacacaaaaccccaaaacttggcggtacaaaacaaccattttctgatggatcgggaatccatgtctgaagtctcagctaagaagactccaaggctgggttccaggctggaactgcctggggcatctccccacacacacactggtacttggctggaccaccagcaggttctactccccgtgtttcttcacagtttgtcagttgggctgatttgggtttgctcacagagtatcagccaagatcccaagatcaagtatccaaagagaacccggtgggacttatatttccttttatggcctagccctggaatatgtggcatctctctgtccatagtcacagagggaagaaacagatggcatctctcagtggggaaccagaatcatatggttaaaagaacacatgggatggacaggttgccaccattgttggcatacattaataaagtctgccatgggccgggtgcggtggctcacgcctgtaatcccagcactttgggtggccgaggcgggcggatcacgaggtcaggagatcgagaccatcctggctaacacagtgaaaccccgtctctactaaaaatacaaaaaaattagccgggcgtggtagcgggcgcctgtagtcccagctactcgggaggctgaggcaggagaatggcgtgaacccaggaggcggagcttgcagtgagccgagatcgcgccactgcactccagcctgggcaacagagcgagactctgtctcaaaaaaaataaaaaaataaaaaaataaagtctgccatggcaccccatagcatttagacacccacctttctagccctacctcccacttagtgattgtctgtaaatacgcacggccttaccttggcactgagagagatgcatggctgagtaggtgtcatctcatctgtaagaagcaatagcagaggggatgcagaaggagctgctctgttctgctcattgtcacctgctcctctgcacaccttccttcatgctcttccctcagcctctccccagctcacacccctttatttgaaactctgctcatttttcaggccctgcttcaatgccaccacctccgtgcagcctcctctgatgtttgtcattagcttagctcttccgtgtgtgctcctgcaccactgatcccttccacaacatggactgtctgtgatgcacgtgtgcaggatgctgggaatgcccaggtggaaagacacacgtgctgcccccaggaactgactgactggtaggcacagtacagataccagtggtgaggacagtgaggattcttcccttctgaccctttgcagatggtaaaggaaggaactcgtcacctaattcccccgactgcccgttaagaacaaaatcccttgaaaaattccaaaagctttaactctgataactgttaaggtactaaacaagaggataatggggcaaggaaaatgggggcagtgtagtgcagaagtctgaccctcaagagcagaggagcttggtcctagccagtttggtttcaggcctacagtggcatttggtattttgagctcacctctctttttctcttggagtgactgcttcctgcatctgctgcatctccgtgggctcccctcagaccctcttctgaaggcctggggtgtctctcctgccaccatgcctgtgtctgcaggtgcctgccaccagccccagtctgctgcacgggccctggcaagtagaaagcacttgccttctgaccacacggggagctgagggtcagagacggaaccagggctcgaccctccaccttgaaaccttgagatggggatgctcctcattctagccagttcctcctcagctctcaaaacaaggaacagatgctcaggaaaccagatctggacaaaagtcatctgagcctggtgtgaggcagattccagaagtttagttacagacatcctttataaggagacttcatcgggaattcaagacaacctggtgattcattgaaatttgcctgtgaaagagaatctacatagacttcctgccacctcttgagatgtgacagttgctgaccctcccgccaccacacagggcgagcccctagccctgagcttgaaccatgttgcttgcacaaatagctgggtgatttagaagtg

SEQ ID NO: 3340 - DNA, 6000 bp, Homo sapiens
ggcagtgaggggtggtgaaacgcagaggggaaagctgagagaagggccgagggcaagctcctcttgctgtggctgcttggaatagtgtctgtccagaatcatcagcaggtgagaatggctgttcccccatctgtagattggcagccttttttcttttctaattgatgcggttaccaaagatcaaatgcccccagggatgcccacagaagcttgccgggcctctttctaataatacggtctatgaatacactcctgccagctcatggaagcaagtctccactgctggctgatgttctgggaaatccataccctcccccatttccttcctggcttttgagtacccatgtccctggtgtcaaagcacctctagggatctaaacttcaaaccttgcctctggttcctctggggtttggcaggaagactgttctgtttggtcttcagctctcttcagctctcttgctcccttcctcctgcaatctctccaaatctctgatctgagagctgattaccctgtctaggaccccactgtgcgtggacccccggaacagcatcctaacctcggttccacatccaaccctcacagcccaatctccccaccacagccagagtaatgttttttcttttttctgacagcttcttgctgtgtcgtccaggctagggtgcagtggcacgatctcagctcattgcaacctctgcctcctgggctcagcctccgcctcctggactcactcaatctcctacctcagcctccctggtagctggcaccagaggtgtgcaccactgtctggctaatttttttattttttatagaaatggggtctcgccatgttgcccaggctgttcttgaactcctgaccccaggagattcaccctccttggcctctcaaagtgctgggattataggcatgagttaccatgcctgacccagagtaatctttttaaaaccaaaatcaaagcatgtcagcctcctgtttgaaccttgtgttagtcttttttttttttttttttaagacggagtcttgctctgttgcccaggctggagtgcagtggcatgatcttggctcactgcaacttctgcctcctgggttcaagcaactctcttctcagcctcccgagtagctgggattacaggcatctgccaccacgcctggctaatttttttgtatttttagtagagatggggtttcaccatgttggccaggctggtctcaaactcctgacctcatgatccacccaccttcacctcctaaagtgctggaattacaggcgtgagccaccgcgcccgtccgtgttagtccattttgtgttgctataaagaaatacctgagactgggtaattgataaagaaaagaggcttaattattaattagctcatgtttctgtaggctgtacaggaggcatagcactggcatctgttcctggggaggcttcaggaagcttccagtcatggcggaaggcatagtgggagcaggtgcatctcatactgagagcggggataagaataggcggggaggtgccacgcactcttaaacaaccagaccttgtgtgaactcagagcaagaactcactcattgccaaggagtagcactaagccattcatgagggatctgtccctatgatcaaaacagccccccaccaggccccgcctccaacagtggggattacatttcaacatgagatttggaggggacacacatccaaaccatatcaaacctcttcagcagtttctaccgcactaggagtaaatttcaaactcctctgtataaccgagaagcccctgcatcatctggctcttgcctccccttccagccctgtgtgactcactttcccctgctcaccattccaggcctcctggccattctcagcagtaccaagctttcttctgcctcaggactttgcacaggcttatgcctctgcctgaaatactctcctgtccttcctcctacccccatcttttgctaagattgatttttctcatccttgaggtcctagcttaaatgtcacttcccaagagagatcttttttgaccacccagtctaaaataatttgtaatgacataatttgtaatttttggggtgcttgtctgtttactggcctcttctctgtccttttgtgtgagttgttcaccttgcatccgtcagagcaggctaagctatgtgcagtaacaaacaactcccacatcgtagtgtcttcaaaccataagggcttatttctcagtcattctaaatgtccatcacaggttggtagggggcctgtgctcattgtagaaaccctggctgatggagcagtcacatttcctaacattctcagtagccataccaaggacaagagagctctggagggtcttatattggcaattaatttctccagcctagaaatgattatgtgtcatttctgctcacaagtgatcggttagagctagtcacatggctccacccaactacagggctaggaagtttccagtgctcacaagagaggagtagaaatgtttgtcagacagcactaaagactcccacagtaatcaataaatactttagaaggatggagtgtctagaatgctctttccatggcagcagtcgtttacagcatccttaaggagtcctgctggggatcttgtatttctgctgctcaagcccctggctctgctgggagtcagagttctggtagggaaactcagcagacaagaggtcccctgagacctggaatgagccaccttagaggcagctgaggctggtggcctcttggttcccttctcccgttgggacacgtttcccctattggtgtcctgtgtgagacagccccgccaaaagggtcctgccactcctctctgaatatactgcacagctcagggtctggcatgtccaggatctgaatagatgatcctgctggaggagtcccagtaggacccctccgagttctaggcaggcagagaatgaaagcagcatttctcagaaagccctgtgcatcctgttaccaatgcaaaggaatggcacttcagcaccccagaaaaggtggggaaacctcctgcatctgctgtgggtcctaggggatggggggcaggtgggaacagtagaatcctggcctgtggcctgatttctgaccctgttccctcaactatcatacccttttcacttgggtaggctgctgcagctgctctcctctctatacttgcatttgacaaagggtaccaccacagcaggccctttccaccaggctgcacgcggtcacacttgatacagatgggctttgggagataaggctgtaccagattggtgatcacacacttgactgtacatcgtggcctctggtggcaatcactaatgtaagctcacattcctgaggcactcaccaagttcctagcactgtactgagagctctatgtggacttgcatgtacatcttcttacctatagcatggaggtgctgctattgggcagctggtgaaactaaagcccacagaagtagtttcctaattaagtaactgctagtcacaaggtagagccctcctttaatcctatgcttccagactccaaacctgtgcacttaactgttactccgtaagaaaaggtttgggtctgattcctcttctaggttataaatactagggagcttcctctttgagaagcctcctaccccatctccttactgtacctagcaaagtgtctgtcatacgattagcactcaataaaagttttaaatgtgaatgagaatggtaaaaacagaatacttagtaggctaacactaggatattcttctgattgcacttttttgttaagttggtcacttaagactaaggtaaagcttctgtgctttttgatatagatgctgatggagggactggatctggtagatacatagcaatctaatcatggcccaaagcctccaatatagtatacacatgcatcctaacttacaatgatcaacaatgaaagaattaattacactgtgctagcagccatggatatcacattgcataagagatagttccctcccttagagataagaggcagacgtttaaactgtcagttgcgatggcttgtgactctcatgaggtctgcgtaggggtcagcacggtcacaaaacctgtggaggaggaggtggttaggaaggaaaatccaccgagatgaagctgtactggatacaaaatcacacgttcctgggctttggcagggagcttgcccactgcacttcctgcctcgaggctatggctggggtgggattctggcccttgtaggcggcctgggtccagtctccgccatgcactcactaactccattactgctaatgggatgtcatcagcgaagcgagtggtggcggcaggtggagtcccgccccaagacccccgggcggcatccccatcgccgcgctccagcactcttcgccacctcgtaattttcttctgtttctgtatgatcaggtctgtccttcgcttttgctttccattacttcgtcctagccctggcctgaatcccacaactggcgccccaccttgtgcacccgcacccgccctcaataccggcgggcagctcctccactgccgcagggttaccagctgcgtgtccgaggggcagagagagaaacagagggggacggggcaggcgcgctgggcccgcccccccgtgcctggggcagcttctcattggtgaaacctcctccccggccgcccgctgcttggaaaatcagcctcggattggctgacagccccccgacgggcgtggcttccgaggagagggcaagaacggaagcgagggcgcgctctcgagaggaggggttgcctaggcgacgccggaggcgcgctcggggggtgggaaagcgagcccggcagctcaatgacaaatcggtggaggacggctggggtccggccccgggagggggcggggcgcgtttaagagctgcgggccgggtgcggacggcggaggcggcgggactggtccctggtaagggcgcggcgcccgcgggccccgggcggggtggggcgcgggctggggagtggggtacgccgcacgcccgcagcctcttgctccctccgtgccgggctgtggccgggcggcggcaggacatgtcgcgccccgaggccggcggagggcgacgccccggcagcggccccgctccgctccgggaggactccctgggggagtctcggcttcctgggctgcctggggctgaggaagtgggggcggcctccgcctctcccttgtagccgcggttccttccctatcccgcagatggctctgcttccacttcctgccgcgggcctcccgctcgggaccgtccacttcctcagtcctccggccgcggcttgggcagggtcagggctgggaagtgttgcaaaaacttaactgccctcggaacttgcacgcgccgtgaactgggcggtgttcctaaagggcttcggtttgctggttttgttttggtcctgtcttgcaaatgagcataaagttgtttctcccccagcctcctcccctttcctttctgataggggccagcggcgaaggggcttctaaggggaagcgcctggactgggcatcgccgtcccggttcttgccgcctgtgggagtgtgaggttaaccgtgctcggtgcagggttgcggggcgcggagcttgctgcgtccacactgcttgtgtgagcagtgtcctctctgtgctcatttccaacgagaaacgttggaactttggtgttcttatcaggtgagtcttcgggagagaagtgcttgtgcctggcggactgaatgaattggccgtggaagagacttggctgattgctcatctgggttacctgtgactcatcttcagcccttgtagaacagtgcactttctgctctgtcctggtttcctaacctcatttcttctgaagttttggggatggatggtgggcatggagtatcagaggggatagtgaatcttttagaggtgtcaatgactgatgttccaagcagagccataagattgttggatgtcaaagctcagaaccggtcaaggctcagaatgctccttaaacct

SEQ ID NO: 3341 - DNA, 6000 bp, Homo sapiens
agattgcacccctgcactccagcctgggcaacagagcgagactccgtctcaaaaaaaaaaaaaaaagaaatgatttcaagaacgtaataatagtgacctaacctctatgcctgttctccctctgcccttcaaaaaaaattgtatattaaatttgagtattttggttttcatcagatactccaaatgccaacaacaaaataggtgtcaggcactcctacattccaagttgaggggctgggccggacacttacaatccgagattccactgggatgctgcagaggccattggaaagaggtcctagtgagctgtggcgtttcctacaagtcaagcccagacaatggcttcaacaggaccatttgtagagcttgacatgagtcccctggaatttggggaatgatttaacatctgattccaaagagtaaacactggtttggactgcttgctgggagagaaggaagcaccaccgcactgtgaactgcatgcacttgcagattatcccactggaggggtactgaagttgtttatactgtgagccatacagatcctggagaaggcactggacatgagtaggtttaaaagggaccctgtaccacaggcccacctgaaggatggaagtgatctcaataaaagggtaattcttcccggaacacagactctgagggtgaaactgcaagtggcactctggaggaggtatctgaacaaccatcaaggaaactgcagaagggagatcccaggtgatgaacagtgtctcaaaatctactacattccctctaaagagaaagagccaatagactggatacacagtgtacacagcacccagctgcctgatcacaaggcagcaactgtttattgtttttttaatttttttttttttgagacgaggtcttgctctgtcacccaggctggagtgcagttggctcactgcagcctctgcttcccgggttcaagtgattttcacgcctcagcctcctaagcagctgggactgcaggcacgcaccaccatgcctggcttttttttagtattttttgtatttttagtagagatggggttttgtcatgttggccaggatggtctcaaactcctggcctcaaatgatctgcccccctaggcctcctaaagtgctgggaatataggtgtgagccactgtgcccagccagcagctgctgtttaaggatgatccttgttctccctaactattcccaccatcccaagggaccacaagcagcgattactagtgaatagaggagaaggtgaagtcaactgcatccttctccccactgcaggctcctgagcctctcccagctggaggagaacagacattctgaattagaagaaagtttatagttgtaacaaatagaacgggctagaatggataatatcagatggtgactggaaatcctatgatctgcttgaaattccatccagagatacggtggaaggtggggaacaatccacaaagcaaatttacttggagaggggtgagaaagaaataataaagttactttctgctcctcttcatagaaagtctagcttgtggccgggcacagtggctcatgcctataatcccagcactttgagaggccgaggcaggcagatcacctgagaggtcagaagttcgagactagcatggccaacatggtgaaacctcgtctctactaaaaatacaaaaattagctgggcgcagtggtaggctcctgaaatcccagctactcgggaggcggaggagggagaattgcttgaacctgggaggcagagattgcagtgagccaagattgtgccactgcactccagcctgggcgacaaagcaagattctgtctcaaaaaaaaataaacaagaaaagagagtaagataattctatttaacatacttagcagtctctgacatagtggtacacaatcaatattgattatttttattattgaaacatagtaatagagtatcttattttccacttttagaatagaaaaataatagaggtcatagtatatcttgaccagaaattaattcaactaattaactaatatcttcataagaaattaattggaaggcaatttggcattactataaccatgtttttcattgtaccatactttctgtatatgcttatagaaaatacaaacataattttttctagcgttctcacacagtattaacctacactagcatctgctgaatggggtctgatttgggggcttttaactggcattgcctcctaaaattatctgtggagcttttaaaaagaacacattcccatctctgaggcaagacttacccaatcagaatctctgggtctggaaaccagacatgtgtattttgaaaaagctcctcaggtggttcaactgtaaaacgaggattgcgagtcatcagcctaggtcagtcacttagctcttttgaaaactagaagccaggctcctagtcttttggtctctgaaaaagaaccagagacacagaatacctattaggtcacttaaaacctgttttgttgttgtggtggttggtggtagtggtggtggttttttcgtttgtttgggtttgtttttttttttttttgagaaaggctgtgaaacaatacaaaaataactacagaccaaagaaactcagaacagtcatttgggcccccattcttgacttctattttctttttcctttttttttttttttttttcttgagacagggtcgcactccactgctggggctggagtgcagtggtgtgatcatgactcactgcagcctccaccatctgggctccatccatcctcccacctcagccttccaagtagttgggaccgcacgtgcatgccaccatgcccagccactttttaaaattgtatatagcgatggggtctcactacgttgcccaggatggtctccaactccagggctcaagcaattctcccaccttagcttcccaaagtgctgggattacagcatgagccactgcgctgggatgacttctattttctaaaagcaactctactgggagatttatgctgaggaaagtatgtggttatcagactcagtgcccatggtggatgacttcttttttttttttctttgtagagaagggatcttgctttgtcacccaggctcgagtgcagtggcatgaccacggctcactgtagcctcgacttcccgggctcaagtgatccccccaactcagctcccccaagtagctgagaatacaggcatgggctaccacaattgtctaatttttttttttttttgagacagggttttgctctgtcgctcaggctggagtgcagaggcatgatcttggctcactgtaacttctgcctcccagattcaagcatctctcgcctcagccttgggagtagctggggactacaggtgtgtgtgggtgagtctgggtgtgtgtgggtgagtgcaggtgtatctgggtgtaggtgggtgagtatgggtgtgtgtctgcgtgtaggtgggtgagtatgggtgtgcaggtgcgtgtgagtatgtgtttacattgtggtatgtgtctgttgggtgccgccattagggatttggaagagtgaggaccataaacttgtaaacatttctacatgcctggtccataagaagtgtaccaagcatgatcaaaagtaactaaaccaagtaaacaaattagacattaattaaacttaatgctgggcaggaaagaagtattcaaggccaggtaaaatgaagaaatataaccaaataaatgaaattttaaaattagtagaatgagacagaaatactttttaaagtttttaatttctgatgaatatcagtatataaaactaacaattatatggccgttaattgactaaaaacagtactttagatttcagctagtgaaacagccatatatgatcttctaattccatttttatgtctcaagaatgacttgtttaaataattttttttgaattgttacattttcatcttgaaagagcttcacaaaacttacatgagaatctggattgtcataagaggtctgagtttttaatggtatgttcgtatttctgttatgtacatcgatgtcaaacattcatttcctgagctgttctccagaacacaatttgacttgtaatgaacactcaataaatggttgcttggataatcaaatcaacaccttagtttcatcaattttcatttcatataaaagtgactgatcttccatactcaccaatgaaacagagagagatgagggagggatagcagtggagactaagaggatgacaagcagacctcattttgcagtggatatcctacactctccacttctgaatgcttggaaacacttgccatactcaaaaaacattgctatttcctaggcagaaaatgggagttaaagaaaatccatatttctatattacaataacttacactataatacatggacgacatacatttctaagctcttcagttcatagaaaatgtagatacatttaggtgagcaagatgcaggagaagggttaataatcaggctgagtgtgattgtgagattcagtctaatacaagtcttgggtaattgtatcagttgacatttctgttcaaatgcaaggtgggagagttttgcaggagctactgaaacttcctgcctgatgttaggagagatgttggtccatgtgattaggccagatgtgtttgcttaattgtggcttagaaaagttaggtttctgacctctcacagagacggggagatagggacgttaaattttataacatttctatttaatatatatttaataatacataataaagtttttaaaatgtcaattttgtcctttttctagtttgcattattttgttttcaccgcaccattgtttttagtacatatgttttgtgtatttaaaaaactgtgttgaggcgccctggctcgccctgcgccagaggctcgcgcactcagcaggttgggctgcggcggcggcggctggggaagccgaagcgccgcgcgtgagagatcccggatacatctgcggtttgggctccgccaccctccgtctctctcccgcaggtctctgagccgggtgcggaaggagggaacggccctagccttgggaagccaaagcacacccctggctcctgccgacaccgccctccttcccttcccagccgcgggcctcgctccgtgctcggctactctgccgggaggcggcggcggctgccagtctgtggcgagccctgctgccctccagccgggctcctccagccgggctcctccaccggcccttgcaggggcgcagagagctcggcgcccgcccttccgctcgcctttttcgtcagccggctggaggagcatcggtccgggaggtctctgggctgaggcggcgacagctcctctagttccaccatgtccgcgggcggagacttcgggaatccgctgaggaaattcaagctggtgttcctgggggagcaaagcgttgcaaagacatctttgatcaccagattcaggtatgacagttttgacaacacctatcaggcaataattggcattgactttttatcaaaaactatgtacttggaggatggaacaatcgggcttcggctgtgggatacggcgggtcaggaacgtctccgtagcctcattcccaggtacatccgtgattctgctgcagctgtagtagtttacgatatcacaaatgttaactcattccagcaaactacaaagtggattgatgatgtcagaacagaaagaggaagtgatgttatcatcacgctagtaggaaatagaacagatcttgctgacaagaggcaagtgtcagttgaggagggagagaggaaagccaaagggctgaatgttacgtttattgaaactagggcaaaagctggatacaatgtaaagcagctctttcgacgtgtagcagcagctttgccgggaatggaaagcacacaggacggaagcagagaagacatgagtgacataaaactggaaaagcctcaggagcaaacagtcagcgaagggggttgttcctgctactctcccatgtcatcttcaacccttcctcagaagccc

SEQ ID NO: 3342 - DNA, 6000 bp, Homo sapiens
tattggtaatcagggaaatgctattaaacatagaacaggatgatgttttacattagccagcttgacaaaaatttaaaatttcaatcacaactgtcagagaagttacagaacaaaggaaactcttatacatgacttgtaagtaatgagatggggaaggggacatagaagtcactgcctcacaatcaatggcggttactcaattcactagtcagtaatgtgtgctgtaagtttcacaatcattttatgctttttgtgagagtaatagtttaacaaaagtataatttttattaatctcacaataaatttgacctaacattttatgtgattgaattcctttagaccccattattttattatggctagtttcctgtgttttattttgtagatacatataataactctaaaagacagaaagattttgtaacatcagttacttctgggagtgaaagtgggaggagtatttttttttactaaatattacttactttttaaattttacactaggataatgtattactatattctgtaacaaaattaaaatataacattttaaaaagttttaaattaaagtaaaaagttgagtagatgagagattctgtctctaatcaggggctaatgactgattccactataaacaactagaaaactagacaaactatagaaaaccatcattttcaaacattagacaatcagcaactaaggactgtttttctccagttgagaagagaaacaagcaatgtaagccctacaatagccccttatttctgcctggggatacttactggacaacaccattggcagcagaacccagacagagcttggagaaatccctgaattgaagagagacaaatattattttaggagggctaagtgagcatctcaaatttaaagtaacgaactatacaaagaaagagctccagaaatcagcataggtttcccctgagtgacccagggactggctaattgagtgagcatccagccccggatctcgtgtctaattcccctcctgaatgtccaggatcactaccttgagctgtcttcatatctgcaaatgacagattcatctctgcccctcaggactgcagaaacctgtgcaaatactttctactttttatgaaaaacatgcacaatttcacaagcaaataccatttcctgtgttttggagcattagctcaaactttggaattcagagttatgggttagaccctttactcacttcacctttctctgcatacttgtgcctgatttttcctcttttttatttttgtttttgtttgagacagagtctcactctgtcacccaggctggagtgcaatggcctgatcttggctcactgcaacctccttctcctaggttcaagagatttataaaagagcaatataaatccctgtggaattccccttttacttaagaatttaatatcagcaaattagtttaacaaggctgttttgtaagaggctgcggttgcattcaaaaattggaatgggaacaacgacttgtaaaaattcaacattttatttatttatttatttgagagggagtctcactctgtcacccaggctggagtgcagtggtgtgatcttggctcactgcaacctgggcctcctgggttcaagcgattcttctccctcagcctcccgagtagctgggatacagaaacgcgccaccacgcccagctaatttttgtaggtttcaccatgtcggccaggctggtcttgaactccctacctcaggtgatccacccacctcagcctcccaaagtgctgggattacaggtgtgagccaccacacctgaccaaaagtcaacacttgaaactaccacctgttatattcactgtgtctgtgattggacatatctttttcggtggccaaaaaattataaaacggacacagaatagtctcttcaaaaaattaaggatgttctttcttcttaaaaggattataaggccagacgcggtgcctcacaactgtaatcccagcactttgcgaggccaaggtgggcagatcacctgaggtcaggagttcaagaccagcctgatcaatatggttaaactctgcctctactaaaaatacaaaaatcagtccagcctggtggtgggtgcctgtaatcccagctactagggaggctgaggcaggagacttgcttgaacctgggaggcggaggttgtggtgagccaagattgcgccactgcactccagcctgggcaacaagagcaaagctccgtataaaaaaaaaaggtgtgtgtgtgtgtgggaggataataaatataattcgaactggcatctaaattaattttagtcggtatgtgtgtgcacgttgtgtgtgtggatgtgtggatgtaaatggcagtaaaaggtaaaagggaaaggcggtaaaaagggagatgatctaacattttcaaaactttttatttttgtttccttttgtgttttatttatatatttttggcagcaaaattgtgtttactaaaaaaaaatctggactatgaacacacttcactgctttgaagaactccaagccaaataaaaagaccaatcaatattaaaagcagtataactggttactttcttaaaaatacataaaaagaatcaaatgcaacagtgtagggagaaaatcacccccatgtcagaagtcatgacttcttccaaataaagaatatgacccatctgccatagtgaatcaatatttatttcaggacatgccatgtcaaaataaaacaaagagtcaacccttgcctttagcaattatattgtattataaaagcactttataactccatcccatctttaagtataagttactggtatgtgggctaatgattatctgtaagcatttctctattcagatccataatccaagtgctctctgaatattacaaagtgacaataagtgggaagtggaggaggaagaggaaagagaggggactaaggttctcccagtttaaggttttgttgcaatgaggggatgaggaagtatgaagatacttttgttgtcttttcatctttatactgtgttaagtaacgtttacaacataaattcagcaggcttttcctgacctgtaactcgaagttttcttcctgcaaacaatgtatttacaaatgtgtttattagcttacacagcaatctcacaataactagtaaagattaaaagggcacactcctagtatatttgtttgcagtgttttaagggaaatacatattgccatggtgaagctctaaatagattcaacgaaacatctaaaaatggaaagttgttaaaaaaaaaaaaagcaaagaaatatcgccaaagaaaaaatattaatcgtagcttaaatataaaactaaatcactagttaaactatacagatctaatacaaaccaaaaccagcctgaaagacccaaccttaaaaaatgctaaaaaataaggcataaatctgcataatattcagttttatttccattctctcctttccctctactatgtatgctttacctgatctgcctctaggggcttacaagaaaacggtttccggtttccgtcttccgtcttccgtcttcaatttgacctcaaatgtcctgagcaaagtttttgctattctgctgagggttcttttgctggtaagctttagatatcgttatttctgctaattcagtagttttgatcgtagtgccaaatttaaattcttccactggttcttctgtaaggaattaaacttttatggtgtcttgcctgcatagtattatttttttaagaaagaaaacccaagcaaaatctattgcttacagaggtttcttactttttaaacaaacagaataactcttgacaattttaaaaccttgggagaaatagttcattagaacttcattatcttaccatgaagaagtaaatactaaaaacctgttctgaagcacttggttacttttctctcccagagtctaataaagcacatgtgaaaggaccatttgtgttagtcagaaatacattttatgttctgctacttataagtactcagtatgttctttaggactcattttgaagatgcaccaggaggcttttctcattcaagcactgcctaccgtgatcgctgaattctgacctcaaagaagatctaagtaatttacatcagtgctcaagaataattctggacatcttggtccacagcctacagcaagtggtatctgtaaaattaaaggataattccagtgggcttggtcggactgctgctttgccatctcttgtttgttttgaggaagtggggggaggctaggtaagaacacggaaatagggaacggggtaagggagaggtgagaagagcaaggagagataaagcaggctgtgaacatactgctcgttaaccaagccatactcatactgttgagatttccatcattttgaagtacattatcataacattaaaaaagaaaaaaatgttaagaaaatgtatctaatttttaaagttatcaccggaatatgctgaaataatttggctttttgtaaaatataaataatgaagacgctgactttttttgtgcttgtgaagctaatagatcacctccacgagacaggcagcaatgatgaattgcaaaacgttattaatgaagggaaaaggttcaagccaatattcacactgcagtcaatgaaagagtaagggggcttctgaggaagggttgaagatgacatgggagagtagcaggaacaacccccttcgctgactgtttgctcctgaggcttttccagttttatgtcactcatgtcttctctgcttccgtcctgtgtgctttccattcccggcaaagctgctgctacacgtcgaaagagctgctttacattgtatccagcttttgccctagtttcaataaacgtaacattcagccctttggctttcctctctccctcctcaactgacacttgcctcttgtcagcaagatctgttctatttcctactagcgtgatgataacatcacttcctctttctgttctgacatcatcaatccactttgtagtttgctggaatgagttaacatttgtgatatcgtaaactactacagctgcagcagaatcacggatgtacctgggaatgaggctacggagacgttcctgacccgccgtatcccacagccgaagcccgattgttccatcctccaagtacatagtttttgataaaaagtcaatgccaattattgcctgataggtgttgtcaaaactgtcatacctgaatctggtgatcaaagatgtctttgcaacgctttgctcccccaggaacaccagcttgaatttcctcagcggattcccgaagtctccgcccgcggacatggtggaactagaggagctgtcgccgcctcagcccagagacctcccggaccgatgctcctccagccggctgacgaaaaaggcgagcggaagggcgggcgccgagctctctgcgcccctgcaagggccggtggaggagcccggctggaggagcccggctggagggcagcagggctcgccacagactggcagccgccgccgcctcccggcagagtagccgagcacggagcgaggcccgcggctgggaagggaaggagggcggtgtcggcaggagccaggggtgtgctttggcttcccaaggctagggccgttccctccttccgcacccggctcagagacctgcgggagagagacggagggtggcggagcccaaaccgcagatgtatccgggatctctcacgcgcggcgcttcggcttccccagccgccgccgccgcagcccaacctgctgagtgcgcgagcctctggcgcagggcgagccagggcgcctcaacacagttttttaaatacacaaaacatatgtactaaaaacaatggtgcggtgaaaacaaaataatgcaaactagaaaaaggacaaaattgacattttaaaaactttattatgtattattaaatatatattaaatagaaatgttataaaatttaacgtccctatctccccgtctctgtgagaggtcagaaacctaacttttctaagccacaattaagca

SEQ ID NO: 3343 - DNA, 6000 bp, Homo sapiens
ggttattctcttgctgacccctaaggggtaaaatgatctgaaacatgctttttaaaagcatgtacaggaactggaacataaagtcacataattgagtcaccttgcttaatttccctttgtgaattattggtttcctgagaggtagtttaacagctgaacagaggaaaataattctcaaacttaaagtatctccttgagcatccctcttccatgtaatgacactattagagtgcatgacaaaaatcactggtaaacaaggctttgaatttgaatgcacactgccatgcgtagaatatattcatcacctcaacatacagagagttcaatgtgtttgatttgttatgttgaagattattgtgtctttctgttgatttactatagaattaagatagatgatattttctaatgtttcaagatattaatatatatattttactaccaacgatgtgtatatagtcatagctcttctaagaaagaacttttgcgaaggacctatttttttcttggatcagctgttcttgttgagaacctggtatgcaagtaaggaataaatgaggcctgaaagttgtattaaaggaacaccatttgcaactttttgtaatttggcaatttttaaatgtgaatatttttcgatctataaaaatacaggtgattgaatatgttggccttttcaaaatcatatataatttttgcaggggtgagaaatttgaaattaaccaatgatttctgaatttattaaaggaatattttagtctcagtagaagaaaaagttctacatgtaataggaaggtaaaaagaaaattttctcttcttttatacagattccatgtgaattctcacacttataattgatgtaaactgaaacttaaataacaaaatccattgtaaaaatgtcagttagtggaagtttttagaaaatattaattatcctatgaaggctactctatctacaaatgaagtatttagctaaatgcagtataaaatttctaaaatattgtgctttaagaatgcataatatgtaactctctatactgtagtatcggatttgtatgttataaataacttttctaccacaccaaagctctgggacatatgaaggggtacatataacccttcgatgttacaaatgtaagcactagataccccttcatatattccagagctttggttatgtggtagaaaataccatgtaacactgtatcatcagacttcgagatgattccagagtttgtggctgccattactatcctcaccgaccatctgaataactcagggaagagatgaggcaagttaattacatgagtgattcttcagtgaatgggcaaactaaaggattgtctctcagaagtcgttctttaaaagagttttcacctttcacaacttctgtgggttattaatgatgttaaatgtgtttcttgaaaatagagcttcataatttgcaatgatgatttaaaaatctaatttgatccttatcaactaatttgcagtgagctaatataactgctaattcctgctgttggtgatatttagacatattgaaatctaattttgccttaaaattagaaaatttaaggctatatttacagaagtcaagttacttaacacttagcagaatgcacctctgatcacattatatatagagagagcacccattaaagttttagacataaactgattcacagttggctggaaaagttgtataacaccatgatcctaactatttactatttaatcatattacaagtaacttaaaagcaaattgcaaccagtaatatatttcacagaaacataaaattgctgactgttttttaatattacactctggaagaaaaggcatttacaattattgtctaaaatggcatttgtaaattataaaattctgtttatctttattaacaagcctaaaaaaattagtattttattatgaccattgaaattttgattccacctcctttcaggaaaggccatccctcaaggtgatagcaacagagatagaccaaagaacagacaacctgggttacaaaatgacagtgaggtcctgtttttcatttgccttttaattgatttcaatacatgctctaatcattggaaaacaatcatggacaaagtagtgaaaaatccttgatttggtagagattatattttcttaaaagttgacaaaataagtaaaacatatggaagcctagactataagtattatggagaataataaattaggaaagaggacaatgaatgttgggagattatagtttcacgtagggtgccccatggagagatttactgaagaagtggcatttgagtaaagatctgagggaagtgaagatgctggtgaaagcatggtgcagactaatcaaacagcaagtatgaaggccctgtgatgacagttcaaggaaacagttaacactatatgttgatgggataagaaaatgcaagggtcatgagagatgtcatcatagaataataggggaaggaaaggtatgtagtagactttggcttttattctcagacataggagaagccattgaggaatgctaagaagtggagtggcctgatctgatatacattcaatgaggattactcttgctctttggttaagaatactctgaacagagtcaaaggcaaatgcaatattccaagtaagagattgtgttgactttatccagagtagaagcagtgggggtggtgagaagcaatgagattctgtatacgttttaaagggagagggagcctgcaggaattactgagagatatgatatgaaatttcaaagaaaacaagaataaaaatagttacgaaggttttttttttttttttttttttttaatatgagcagttggaaggatggagttgccatcaactgagatgagatgaagaagaccatgaaaggagctgtttagatgagaatatagaccaagagatcaggagttcatgtgacatatgcttattatgccacctgccatccaaacagagaggctgagtagcattcgtcctcctggatataggagcgtgaggttctggagagaggtctgtcaaagagggaatcagtgtcaatcagtctgaataaaaaattcagaaaacatcaaggatatgagaagagatacaggagtaagtctatgtttccttctaaggaaaagcagtgcaaccgcgtatttattatttacatcaatgtgaccaggtttggggtcagaaggtcattaaaactcagcaccacaatctcaatctttgtctctgtctctccttgtctttgtgtcactgtctctgtctctccctctcactctctcttgcttcccccatcccccatctcccacctcatctttcctcttgctttctcaacatgagattgaatacttttggaaaataactctgtactcaatgacttagctgtctcatgctaaacaagattggtaatgggatctcaatatgtatacaacataatattcttcgaatataaaaacagcatgcagtttgagaccagcctggccaacatggtgaaaccccatctctactaaaaatacaaaaaattagctaggtgtggtggtaggcacctgtaatcccagctacttgggaggctgaggcaggagaatcgcttcaacccaggaggtggaggctgcagtgagccaagatcgcgccactgcactccagcctgggcaacaaagcgagacttcatttaaaagaaaagaaaaaaaaaaaaaccaacatgcgaagtaattgcaacctgcaaagagacataactgactgtagatagaaagcaatttttcattttatggaatttctctttattaacaggttttatgttttaaaaatgttcttctggcttaaataagatgtttgatatagacatggtgtagattttaataatatgactgctagttatattttacttacacatttttaacacgtggtttctacttaaataaagcacatcgtatgtatgtatataaaacacaagtataagaggaaaaacaattaatattcaaagccaagctaaataatagacctgaatctagttcctttcataagcattatttattttctttaccagttgcattttaggaaagtggattatttaatctgtccaacaactataatgtctaagtggttctctcatcttcatttcattttaaagtaatggtgcaattctgcatatgtatgaatcccattacttctgcctctcttccaacttaatgtttcagtgtagaaggcaaactataacagatattaattaaaagaacctattaattcaaattatgaatagttttaagtattttcgcattttattttaattactttccacagttgggaatcttatcagcatatttatgtcaaatatagggaagcattatatgaggtcattaggtgaacaggctctggggtcagacctagacaggtttgaatctaactgccatggtttcatcatgtgttcatcatgtgttatttaggaagataattacctctctgtgcctcagtttcttattttgtcaaaaaagaataataataggacctacctgaaaatactgtaagggagaagaaaatttatataaagtgcttagcataatccgtgggcataagaacttagtaaatgtagtaaattttggtaactgtcatatgaaattttagagggggattcttagtttttggtttatgacagcctcctcctttgatatactcagctatccacacttgtataatccgttgaagacagaaagctccactgtgtcctcagaaatcctggctttgtgttctgattgttggaagctggcctgtgtggatgattatcagtagactcctgtgctttctgggttttgtttaggattgtccaatgacccatttggaaagccccagcagggaatcagagagagagaaaggacagtgaaactaagtatttgttctcctggttccctctctgtgagatcttcttaatctgtgtctttcaagggaaggtcattgctgctctgaaggaagctgcatttgtaagtttctctttgttctataatctctctcttccctgctttagtcttgctgggcctggggctaatgccagctcaaataaactgctctcattcctgcactgtccctagtaattcctttacattgctcaaactcttaaaattaataacttttatattaacattctttaaattatcctaatttgaatgtctcataaagtagttgctgggaatctgactgatacactggggttccacataacccctcccctgaagtcagttcatttcctgagtgctgcctgggagtgcacttgtatccctctatctgttatgcctacagatgtcccttcctttcccagacttagtgagtatgcacttgtctcttctcttcttgataacaaatgcatgggctcaacccaaaaccatctacctttcctctagcttaaacttctcactggacttaaggttttattttactttatttatttaaattttattttattgtgataagaacacaacatgaaatctattttcttacatttttagtatacaatgtggtattattagctataggtacaatgttttgcaccagatctgtagactttcttattaatttttctttactgaaacttcatgctcattgattagccatttcccattttctcctctccagtcctggacaactatcatttcaccctttggttctatgaatttgactttttcagattcctcatataatctttcttcctggtttaggtttcaaaaacaaaagccaagaaggaagattatctctggaaaaaccaatgaggcaaggaaatataatggcctagctatttccttggaattaaagaaaaacataatatttacaaaacataagctgataagaaagatgaattaaagcattgttccaaccactctgtacatataatttaagaaaaaatgttggtataagaaaaagtattttctactgtttaaatattattatcatttcctgtatataaaattcatgcccaatttgtatgtcattcttgaatccatagcttaataaaaataaca

SEQ ID NO: 3344 - DNA, 6000 bp, Homo sapiens
gagaagagggtcctctccaggaaccaaatcagctagcagcttgatcttggacttctcagcctccagaattgtgagaaataaatgtttgctgtttaagccacccagtcaatggtatttgatatagcagcctgagctaagaatgatagtttaaggtgtgttcatctggtgtcccagatgaagatgtgtgtgggggtgagtgggagtaaagaagaaggaatgtaagagaaaattaaagtatatgggaattttgacaagcacttagtaggtgaagagtaaatcagagagtcataaagtattagatttgggatgtaacaagcccttcctttaaaggtgaggaaatgggcacagtatatgaattgaattgctcatgatcacaagatgacttagaaagatgaggaggaagataaggcacaagaagtgaaattataattatatatttttaaatgttgagaagataactggtttgtaatagagtcttgtttacttttcttacttgacatttgtcacaaatttatatttatggccgatcgcaaaatatttacagcagcaagctctaatatgacctttagggaagtcttagaaacaagctgaagattggaatgaactataagactctgggacaaagtcagggatgtataataattttacactgaattctgagttcaatgtgttcctttctccaaacagcagcattctgtcactcattatgtcaagactctccttgaattctgttaataatggaagaaatgaagaggagaaggggatatgaaagagcatcacaggacaaagccatctctatattggggttacagcttcaaccaagggaaagtgtgagagatctggaaggaaaacaaaagaatatgggccatagcaagatattgttctcaagggcataatgacctctatgatctctctcaagttggagaagttctagtcccatttcacactgttctagtttcaggtaacaacaatgaaaattgaactagcttaaggcaaaaggggacatgaacaactaacccacaggaagagcttgaatattctccagatccatctgagattttgattctttcaaacagtagcttcattcttaccacggcctggttattcctatatagaaggaaagaaaaactagatgtggagttttagatctcaaaagctatccatgaaagactggatataaactctttatttcatttacaaaaactgccagataaaggactcagtggaagtcccatccaattaacagtgagcaaggcattttacttggttcaacttggtgttttgagtgatccaacttagagccagggagtgggagttgttgtagcacggaggtagatccaagttaaacatgtagaactgaggaaagggctgtttctggaaaatgggcactcagcaggtaattccaggtattcatccgtggcttgctaagtaacacattgtgttacccacataatttttatgcaggttctgagtaacagcaacacattctagttaggtcccctaatagggatttattatcaagctatatggaaaagtaaagaaatacagagattcatcttggcctctaacaatccaagtatcatgtcctttctacatcagctagtaaatattccctactctggtatttgtttcttataatgacttagatgagatgggaagcaaatgagggtagacactgaaataactgattcttgacttgagctcatggcttctttctcatcctttggcttgcccatacagggtactaccttcctgtctacatttcaaattatctgagctggaatctgattgggtagacaaggcaccatcaaatatatcatgctttttttggcaaaagctttgatgtcaaatcattttataggctgctgttcagatacccatctgtggccacatatctaaaattgttgtttcaatgttagaatgagtaaaatggggatcaaggcagaacaaacagaattagagggaaactgtgggtatgttgggtaatgtaataggtgaatccttgtatgggctgtttaatatccacaaaaatatatactaagtgtttttttaaaccaatgaatattaatggaaaatcctcctttgtcaagaattattctagaagatatgggtgagagcagggcatatagaagatattctgttatagaaaagctataaaattgacaggggaacaaaaactaacataattggcacaactataaaaaaatccaaaatattcaggccatgaagtttttgccctacaatttaagcgaaaatatgcaactcatttattcactttgtcttttttttctttttctttttctctctttttttttttcagagatagggtcttgctctatctcccaggttggagtgcagtggcatgatcatagctcactgtaactattaactcctgggctcaagcaattctatcccatctcagcctcccaatagctaagactacaggtgtgcaccaccatacccagctcattaaaaaaaaaaaaaaaaaaaggtagagttgaggtctcactatgttgcccaggttggtctggaacttctggcctcaagggatcctcccacttcagcctcccaaaatgctagaattacaagcatgagccaccacacctggcccattccttcacttcgtgcaacataattgccatcagaaaccagactttttttttttttttactacagagacttaaacttttacaaaaggaagatgtttttctcatttaaattgtcattctagggacagaaagtaagttttgaaaagaagtagcttttatggaagagaggtgcctgagaatttcaaaaggatttaagacaaggggaatgagaagagattgaatgaaagaagagaaaacagagagaaagagtaattaaaaaaaagaaaagaaaagaaaacaaagataatcccaaagagcagtgtgcacagttttgctgcaatcagtaccattctggtcaagtctccgtcatctgctctaggcttagttcctctctgccctaggctgcttctggtaaaaccgcacgctcagcttgttgggcgtcttcatggagcctgttatttgctgtgggtctaagaaagggaaagcttcaggcttcaggcatctgtacctcctatctgttctcagctccatggaaattcttaagggatggggctatagataagagagtgggaaatggagatcaaggtctcaaatgaaaggcagggtggtttgatttttaagctcccctgatactttttatttatatatttgctgcttctagaaaaaccaaaaaaggaaagtgattcatacatagaatgcctgtacaaatagcaaaccaataactacccccagcagattctggcccttgccagggtgcggtttcagagctgtaaaaggcaagggatatgtacattgaaatgacccagtcccagaatattttagattcagaaaaggtcagagactttcgtaactagcaatgacctccagattagggaccatgaatgtgcagagtgaggacaaggaaggggcctaaagctgggtctactgtagaataaacagaatcatttaaggttaattatgttctgatgtggcctccttaaattctttcaggctggggacaatttctagccctttaagatcaaatcagtggctttggactagaatctgcttaataagaatgaactccaaaggtgaaaaaaaaacataaaatctaaaaatcaaaggatatgcctttataaatgtgaaagtttagtttggctcaatgttggtcagtttagaaatgtgggagtaatcggagagatggcataactgggggcgggaggcggggcggtgattatacccctaccactacctaatcctcaggggctaccagttacttgctgtacacacttttaaagtactttctaattgtggaccatgagtggcagagtactgcgggcggaggctttttgctgaaagcaacattgacttttatttctagggaaagtcttgtctgtagatgagcaccgtggggcaacggagaaaatgctgactttcttgtttaaaaaaaaaaaaaatttccgtaagcggccctccaatggtccgtccactcagcaggccagctgtcccaggcctctgccagggagggaagacgagtgcttcagtgcatggcttcggtgagccctttaaatccagcttcccctgcccccaccaagaggctccctttccctgacaggtgttttcccaactccggaggcccaggattttggggagtggctgagccaataagatttccctttggaagggggggggaagggcgtggctagttgggtcagagcatgggcggggtttgcgcggctgagcagagccggcctggttgcgtggagggttgttttattcccaccgccccccgcaccttttttttttttttttctggagtcttattaatttctctgtgggctgcagctggagaccgcggagcgctggaaatgacgctcggagctttaattaccgcagccgccggacaagtgtgaggaaagctgagaggaaaaagaaggacgggatccggggagaagcgagaagctccccccgccccgctcccctcccgatttggactggaggtgcaaggaaactgaagaaggagcagaacatagcccggctgcggggagaggccggaaacctaccgcctctttgcaatcaactttttttggaaacctttcgccccccttccttttttattgttgaccaaccagtgagagagagagaaagtgaggagggagcgagcaagcgaaggctcacgcggggaaatagctgcacagtccggcccagagcgccaagcgcacacaccgagcacactcccacacgcgcacacacgcgctcacactcgccccctcctcgggccccggccctggacccgcgggcgcggactcggtcgcccgccctgggagtcgccacaccgcgcgcgccgcgcccgcccccctcgcacccccacgcgcgcccggctgggggatctcctccgcgtgcccgaaagggggatatgccatttggacatgtaattgtcagcacgggatctgagacttccaaaaaatgaagccggcgacaggactttgggtctgggtgagccttctcgtggcggcggggaccgtccagcccagcgattctcagtcaggtgggttccttctggcactccggtcgccgaacctgcagccgccggcggggctgcctcgagtggctcccctgccctcttcacccatcccgggaggcgtggagggaccgcttgaccggggcctcttccctgggctttcggtcacccctctttccatttgaaacttaccctgtatgtgtgcgtttgctttatttatcgtgaaaaatcactctgagtccctcttttctctccttaaccccctgcttttctttcccgagcgttttgtttgggagcctaagcgggatcccttctggtggcgcctgttgttcgggacatgggagacccaaatccccagtcagaggagactcttctgtccctgtcgggtccccgagggcagaacccgcaccgccggggccgcggtcctggggcggtgctggctgggcctctcccgagccgagcccgaagggcggtggagagcggcgctcagaaaatcgggctttgcacctgtgtgtgctgctggcgaccgctgcgcccccagtcgcccgagccttgtggcgtcagacgcaactcgcgcccagcccgggcagccggagtgcagcaggcgggcgcgcctcggtccggggcccggagttctgggcctcttccgccggcttcccggagccctctccccattgacttgaggggcgcttactcgcctgcctgacctcttaaaaaaaaaaaaaaaggcttggcacacttgagccagaagcccggccttcccgtcggttgccgtgtttggctccgggaagagttcttcctgtagttcaacttgctattggccggagtccttcaaacttgtctgtttactgcccggccaggctgccgagcctgcgggtcactggatccacccgaggcgaaagcggcagcggc

SEQ ID NO: 3345 - DNA, 6000 bp, Homo sapiens
gggcaggggagggagagagccacggagggaaagttgaagcaatgattttggaactgggggttgggagctacaaaaggggggctgctggtggagaacatagggtgggggtgggggcagagcttactccctgcctctgtaccctcactggcctaggtgggtggcctaccagtacccaggctaccgaggctaccagtatgtgttggagcgggaccggcacagcggagagttctgtacttacggtgagctcggcacacaggcccacactgggcagctgcagtccatccggagagtccagcactaggctccacggccccagacaccttccctgaggacactcaataaaggttcctgaatcttcctgcccctcttgcctccttggtgtcttgctttgtgatctccatcctcatctttctgaaggtccctccctgccaagctgaccctccccacaggctccagcatccttggctacgaagtgtaagctggctgaggttgtgtgtgggtaggctctggtgggtctgacagcaaagtgctggtaagaatcttagcaattctggctgggcgcagtggctcattcctgcaatcccagcactttgggaggctgagacacgtggctcacaaggtcaagagattgaaaccatcctggtcaacatggtgaaaccccgtctctactaaaaatacaaagattagctgggtgtggtggtgcacacctgtaatcccagctacttgggaggctgaggcaggagaattgcttgaacttgggaggtggaggctgcagtgagccaagatcgtgccagtgcactccagcctggcgacagagcaagactccgaaacaaacaaacaaacaaaaacaacaacaacaaaaaaaccttagtaattctgttaaatggcaccagtcccaaacctctccttggtaaggtccaccactatgggcccagggtactgctagctcagatggcacctttgccaccttgtgggtggggtggacacaccccaacaacagggctcatagctggattgcagcttccacacatctcctggcccaggtaccatcatgcagggcagaacttccttaccatgcactgaagttctgggcttcctctgtaaccccagagcattttcaacctttatcttcacccagttccctgcccagtaagggaagcctgagcctcctgcgttgtcccatttcctccattcgcaggaggggagttagtgggaaaccccactgcttcccagggccttcaaaggggagacttccaccctctgagcccagcccccagaccctttgaacaatgacaatcccttgcagtggtgttgaactccagcatttacaaagcatcttcatatcccccctctcagctgctccataccaccccctcttcactcttcctttccctccctacccttcagaaaactggtgagctgtagaagtcacccctcagttgctaagcctgggttctgggcaagtggcaggtgcccataggcatggcagggctgagtatggtggcagccattagagcctctggcactagtatgggttttttcccagttccctcttcggtccagttggtgatgccccccaacccccacacagacagagcctctcaagattcttgggactgccttcatcctgtccttcagggattcttgtgttttcaagtccccagtggacctatcagtggggaagggtggctctaattattgccccaggccaggcagagcaggacaatgccagggagcagtcagacttgggcctgaaatccccagaggttcagctgtgcaaagtcaggcagctgctcctttgggaagagctccggaccataagtcagaacacctgggacccaattccctcaccttgtaaactggggctattggccactgtcctgcctgtctcacaggggctgttgggaggattccatgagaaacccctgcaaatgtttgtggtgttatggaaaagcactggggtagtcaatgtagggacctccttcccctacctccccgctatggatcctagggttgggtcaggggaccaagggagtgagctttggatggcgtataaattttgctttacactcgaatgggctctagagtccatggcccttgttgcattcaatcctcctaatactctccaattccatctattttaccaaactgggggtccaaggagaaactttgatgacatcacccacttaattggtgacaaaaccaggatttgaacacagagttcttggccctaaatccaggctgttaggtggaggctgaactgagctgtggctaaaagccacaggcctcagcagagccccaaacttctgtgggccccagaggaacctggggttcctggctggtcatgggcacctccccatccccttgtggaatggcaatatttacaatagctacatgtatagaatctgatctaagcccttcacatgtgttatctcatataaacctcatcattctgtatggcaggtactatcatacccattttatttttatttatttttatttttattttgagacagagtctcactctgttgcccaggatggagtgcgttggcacgatctcagctcattgcaacctccacttcctgggttcaagcaattcttccaccttagcccctgagtaactgggattacaggcacctgccatcatgccaggctaatttttgtatttttgtagagatggggtttcaccttgttggccaggctggtcttgaactcctgacctcaggtgatcaccctccttggcctcccaaagtgctgggattacaggcatgagccactgcgctggcccatacccactttacaaatgaggagatgcaagtacagtacagaggttatgttacttcccccaaagtcacataaccaggaaatgggagagtcaggagttgaaactagaacccaggcaaactggcttcagagcccagcaggccacttccccactgcttgctttggggagcaggcaatgagcaaagggagatctggaatctgcccttgactgagctgctctccctacaggggtatctgtggttgctgggaagaatcagcaagatggcttcaggaactagaagtgtgactctggaccttctggtcctccattcattctgggcaggctggccatctgcagaaccacatgggaccagcgctcagcagggtaggaaggggatgaaggggaaactgccaaggactctcctgttggcttccctagctgtacttgcagcaggaggggatggagaagatcaagactcaggtgggtggagatgactgccccccatgcacacatttcctggtgctccaccccctcagcaaatgacttctgggtaagactgagggataaagcctatactgttgatccttgcccagctcacagctgggatatttgggtagacctcactaggaccctctcctttacaccttagcctcccactgagagcattaagtgggcgaattttgatgcctcccagctttcccagctcttacctcctgcccctggctattttctgttcttacctcctgctccttgttttctgtccatagtgggtgggggaagcagaaagaggaatgagaaggagagggattgggatcttgaccccaacttcaaggccctcaccttctgtggagccctgagtttggtccacagggaacattccaacctctagtctttgctcccaccagattccaggtccacatcctgaaggcttcatccctgtcccactaggatcctcccaggccctgggatccctctttttccctccacactctgcctcccactcttctccctggctcctttgcaccctccacgagcaaagatgaacactccagaagttgcagcaaatgagggtgaacatgggccctgtagaaccccagaagtaggagtttccagccatcctcaatcaggcatcccaggaccaggcacttagcaggagacctgcccattcccaggcctcctccacccctgggctcaagcagtgagagaggactttgagaatgccagttttgacagtacccgttccatactgcaaggctgcagaaggtgggcttctgggctggagcctcatcttcagccagcatcctccttagcctgcctctccagagccacgaagccccataggtacccagagagactccaggccacttgggaaccacatcaacatctttgcatgagttagaaataggaatccttttcttggagtggattccagccttgtacagtgcacaaccctgtcttaacccctccacctctccagcctcgttcagggatagccagaatgggagtagtggtgagggtgggtggcagactgggaggacaggggatggggaaggatgggagcagaatagttgtacagggaagtagcagggggctcaggaacccatcagggaaagccaggacagattctcaacatctttagaggccttcagcagtccaagccactactaatttatggggactgaatgaatgagaaaaggaggggagggagaaggatgagagggagagagaaggctggaggggagatgagagtcggagagaaaagcctaggaggtaaagagagacctagaagggggcggggaggacagaagagggggccacccatcataagttgccaggagagatggcccagcaccaggcctgaggcttgggggccccagaaaggcaggaaacgggccaaagcaagaaggagacggggaaggggttcgggtctctagggaagagcagagagtgggagaagaggaggagggagcggggatgcgggcagagataaagggagcaacggctgcagggccgggcgcgcagcgacaggcgagagggagggaagcggaaatttaaaagtgaagatgcagataacgcagcctggagacgggaacccgggtggggatagagggagggagggggaggagagtgagcggcgagtggagcgggagccgactggaagaagggctctagggagggggctgtggctgctggggtccgaggtggggccgggtacaccagccccatcactgtttgcagagagtcagggaggcggaaaagacacgcgctctaggctcccatcagggcacatggcccgggcccatcccccgcgcgtctccccggctgcggggcgcggggggctgccgggtgcgcttggctgtggcgcggcgcgttggagactttattgcgatgggacgataagaggggcgggggcggggtcctgggggccgaggcggcagcgctttaattaaaacggaaattgcggccccgggccgcgcgggggccggagggttccaagcggccccttagctggaagcgtttctccaggacccccccgcaacccccgccacgcccgggctgccccctcccgccaggccctgccggacccggcgccgtcttctcctccttgtcacccgcggtcgcttcgggcggggatcggtgccaccgagcgcaaagcctgcctcgccccccttccccgtcccccccatctcccaccgcccagtccccggcggcgatgagacagagcggcgcctcccagcccctgctgatcaacatgtacctgccaggtaccagggaccagccggaggctggtggcaccggaacctggggcgggaagtctaggctcaggcatgggaagagagtgctggggtccaggggaaggagaagtgtccggagattcgggttgcatggagggccgattgtaatgtagggcactggggagacctaaaggcagatagagagctctgggtttcagtgcagggtctagaggagttgaaatgagcagattgggagcctgggggccaagagccgggactcagggacccgaaggagcctgagaggggaagcacgggtctctggcgtggtggagtactctgtggccgagccgtaccagaaggctgtggtccgcgggcgtctcccctgcgctctcacggctcctcaccttcctgctacgagcttcaggccggccctccaggcaccctcctcttctcttcgcgctccagctcggctggcgcagttccccgctcggctttataagg

SEQ ID NO: 3346 - DNA, 6000 bp, Homo sapiens
agtaaggttctgtggagacacaactctacctcttcaggtacttaccctctgtaaatgatattcttgctgttcctcctcctctattcactctaaaatggcagcagggttgagtggttgcagcagtgaccccatggccagtaaaacctaaagtatctgctacagggccttttacagaaggactccatgacgccaccctagcagagcctgcaggagccagcgcccaaaggcactcactaggtgagcgcaagcagggctgagagattccgagatgcccggttggagcgtaggagggtgctttggattcattgagacgtgcttggacgtgctcagcccacagagagctgtacccacagagcacccacctttcttgggtgggggtgggggggtgatgtgtggggtctgtgaagcttcagggtggtgccgggcattctgtattttacaggtgagggggatggaggccccgacaatgaggcgcgaggccctagttcctttcattccagcaagccagggtccgagcatccccctcacacctgccctgcctgtaccaattgcctgccctctcttcagggggcctaccagggtcggggggtgaacaaagctgggcttgctggggagtcctaggccaggttgggggtctttgcttggggggcaggcctgtatgtctcactctactcctggtcctctgtctggccccgcaggggccatccccctgccggcagctttcagatgaaagccagggcctcccttcctccaagcccctctcttccaggcctgggtttatctcctctctctgaggggaaggaccgttctacaggctgggctctgcctttcacccagaactggtgggtggagtctttgttcccactctgggtctctgtgatggggccggggtgggaggctgtgggctgtggcccgtggcacaacggggagaggagaacagccagattaggttagcctgtggctcatgagctgccttcatcccatcagcctccaaccctggggtccgcacttttgtattgagcacctctgtgtgtgggcagctgtgccgggttgcggggttagaaatgtggaagctccttcctttgctgttggctgagtcccctgtgggaaccatggtctcctctgcttccatccaagtgtctgcgtcacaccttgggataatattacagcttttagaggtagatattactgtaactatggatagatgtcatgcaatttattattatcattatgttaatttttttgagacagagtcttgctctgtcacccaggctggagtgcagtgtctcactggaacctctgcctcctgggctcaagccatcctcccaccttagcctccagagtagctgctatcacaggtgcgcaccaccatagccagctaatttttatattttttgtagagatagggttttgccatggtgtgcaccactgcacccggcctatgttaattattttattattattttttttgagacggagtctcgctctgttgcccaggcggagtgcagtggtgcaaccttggctcattgcatcctctgcctcctgggttcaagtgattctcctgcctcagcctcccgagtggctgggattacaggtgcataccaccatgctgatttttgtatttttagtagagacggagtttcaccatgttggccaggctggttttgaactcctgacctcaaggaatccaccacccttggcctcccaaagtgtatgttaattattaatcctcattataataattacatgatcacatattataaatgtggatattgccacttttaggatgaggagatgggatgtgctcactcctttaacttacgtgctttgggggaagagtgatctgtgttgcacaaaaaccctttgagagcagacactcctgcttcttttgtcacgtgtggcttcagcttttatcaagaacactgggctcctgtccaggggagagggtaggccaggagcagagcctcagaggagaatgggagtgctgtcctcacaggcggcctggaaatgcaggaggcagcacgcccagtgcttggctgcaggatccccgagggagggacaggatggatggccacaggcatgccactccttccctccgtctggattttttccctgtgaaacgggagtgtaaacaccttcctggagtggcctctccatgaaaggttgctgtcaccctgggtggcttaaggtcaccaaggccggccctgtccgaggggtcagccttcaggaggattgactcaggtccctggggccctcccgagggtctggttcagtcgacaggtgtgtggggtggggcccacagcaggacatgacacaggtggtgggctcagctcctggcaagacaccgtccatccagaggaagcaggaagcagagccagaaagggacatggactcgagccctgaagctggaaagccaacgtgctggctggagccagaagagcaggcaggagcagaggcagaacggacgggagtccgagggacgggagtccaagtgagcgcagcctcccgcccacccccgccagggcctgctgcggaggtggcagctttaggagcccctgctgtgtcagggacgggggctggacctccccatggactgcccccactgtcctaacaggccacagcaggggagattctgtgcgctgctgactttctgcatgacatcttttggaaggatggtgacatctagtgcttgtgtgcacatttgccagctgaagccacaactaaccccagacttgttgggctttttccaggaaggggacggtgacaaacaggtactgagcacattcaacttggcaccagctgacttcccttctaaatcgagaacgtggctgacgtcctagagcccccagaaaataagtttccatttcatgttcctttcaatttgtcatcagctcactatttttacaaaacagccaagtgctacagagagggcttcaatgagcagaattggctgtttatttaaattaaaaggtaaaaaaagcaaaaccacttaaatgatattaacatttagtagagaggctgggcgcagtggctcatgcctataatctcagcaatttgggaggccgaggcgggcagattgcccgagctcaggagttggataccagcctgggcaacatggtgaaaccgtgtctctactaaaaaaataaaattaaattaaaaaaataaaatttagtagaggaacttttttttttttttttaagatggcgtctcattctgttgcccaggctggagtgtggtggtatgatcacagctcactgtagcctcaacctcctgggctcaagcaagcctccacctccacctcttcagtagctgggaccacaggtgtgcgccaccacacccagctaatttttgtgttttttgtagagacaaggtttcactgatcttaagctcctgagctagattgatcttccctccttggcctcccaaaatgctggggttacaggcatgagccactgtacccagccaaaactttattttttaattacattttggccttagccatggagatatagaaatgtggttagtgggtttctgaaaaaggttatgataataaatgcatgctgtcttccgggtcagagccacggagtgcacgagactaggttgcctcaaatacctgtccaggggcccacctgagggccttacatctctgcagggaagggaagggtctatgttctgtaaatagccaaacattgactattattatgcattatcattgcttggactaaaacccatgccctccttggaaatttgctggaattttacattagtgtaaattcaaccaccagccatcattttccctcccctcctccccccccttctttttttgaggcagagtctcactctgtctcctgctgcccaggctggagtgcagtggcacaatcttggctcgctgcaacctccacctcctgggttcaagcgattctcctgcttcggcctcccgagtagctgggactacaggggcatgccagcacacctggctaatttttgtatttttagtagaaacagggtttcaccatgttggtcaggctggtcttgaactcgacctcaagtgatctacccacctcggcctcccaaagtgctgggattacaggcatgagccactgtgcccagcctccagccatcattttcaacatggaaaaggaaaatatgagaggctaagattggtaaatggaggaagaaaacctgaattttatgctcacgtttcaccctgcgccagcttttaagataaaaccaaattcaaactgagaaatgtgatttgaagtgatgggaaacagaaagatgtggataaaaggcccacgttttaagacaacaagtccacaaagagcaaagaggacagaaagaagaagcaaaattcatatgccctttctctccttgctcaggcgatttaacagccaccctgggtgaagggcaccattagctcctgctatggatgaggaagctgagacttagaaagtttaagcaagctgccatcagatcagctgatgggtgtacatttatattctgggcacggtcttcattctggcaccattgtcaatccagtggagcatctggtgtgttcagaggtttatagccggttcagtcccgacagttgccccatctaagctggaaatcactggtcctactgtctggatggagactgcagctttgtttgacctggggagttggtctgacttcaagttcctggacctgcagggaactgcaggacatgcgggcagaagagcccaggcagtggtttccgtttaggaagaggttgtctcatgatagagaagcacggtcttgctgcaccatgctggaaagctctgtccagcctcctgttctctgtccagcctcctgttctctgtctagtgggtgcaattgagtttctcccacccgtaaagaggcgattaagtcctaacccccggaacctgtgagtgcgaccttatttggagagagggtctttgcagatgtaattaattaaggccaacaagatggaacttaggatagcccttaagtccagtgactgacatccttataagaaggggagaggacacagccacagaggggcagccacgtgaagacagagccagagatgggggtgatgcagccaccaggaacaccagggttgccggcagcccctgaagctggaggaggcctggaatggattctccttcagtctccggaaggaaccaacccagccaacgcatcagttttggacctctggcctccagaactgcaggaagaaatttgctaatttgagccactcggctcatgggactttgttttggcagccgcaggacactcatgcactgtccttggagtgtaagtttttattttaaacatgtggctccatttgccagaatctccccaacagaccccaaacccaatccagggtctaggcagggtagcagctttgacaggagcctgtcggtgctggtggctcctccatgccccagacaccttgccttcccccgccccgtcctctccagttctgtgtataacacattcctgacaagccacacacaatggggcaaaacattttggagatctataaaataaccattttaaaatcatataactttggaaagcaaagggtagaaaatctttaaatgaacagtgcattgcccaatatgttaaagtgcttgggagtagttgtgtgtgtgtgtgtgtgtgtgtgtgtgtgtgtgtgtgtgttaagcaggtacatggctgagtaagacaaagcccctgccttcctgggggagacaggtggagaacgcaggaggccttgcctctgggtgtgtatggggtgcagggaggcttccgtggaggcagggggcccagcagcccttccggggttgccgctggaagatctcagaggatgcctaagagttttctaggtgaacaagaggaaggataccatgcagaggggacagtagagaagggtgttggtggggagcagcattgggaaagtggggaggttagcaggaggcgaggaaggccttggaggagcctatgcaatcgtgactgcctctgtgcaagatg

SEQ ID NO: 3347 - DNA, 6000 bp, Homo sapiens
cttccggggcccaggatgctctccctcttcttggctgccacgtgggcttctcgtgcctcctccgggagaggtcctctggattcttcccctgcctctgggcaggtaggtcagcctctctggcctgtgtgaaactgggtggcagcctcttgctctgcaggcaactgtcccatccccgccaggctctgggcacctgggggcaggacttgggtttattcccttggctcccctctgttctgcccagactggcgggcagccacgtgccaaactgattgttgagtggaggaatttaacttggtgttcagaaatccctgctggaattttccactgagataagcaaggataaaggtttggaggcaaggcagacaccacaattcctgcttatctcaaaggccttaggagataagggcattctggagaagctgacctcaggtaattatcacagctgagctgagtcttcacagcagctccgcaagaaaaccccaaggaggagggggcgcgcttccccacaaatcccctgaggacttcggcccattgttccctggccagaggggggtcacctggtcacatctgcaagaaagaagatacggagaggcactaacaacctgaaccacagtggggaatctcctcataaggaacaaggggggcacggatctggggcaggccgttagcaatgcctgttgcaagccttgagagctgcttcaacatctctgaaatgtttatgcagcagtaggcctggctctccacgcaaccccagggcagtaaagagtggaaagttacaaaggactgacttggctagaaaggaacccacatgggataaactctcagaggaaatcccatcactgtcaatatttgagcagaacccgagacatcaggtggcaggagagttgcagagattcttcagcccctgggcgggcactcaggccacatcctccccagggggcccttcctgctccacaatgatataattttacatgttttggaaggagaatgtgtgcatgcctgcctacgtggcctgtgtaagtggcattgcgaatattctccctgtcaatggtaacacagaaaagttgataaaatggccagagacaaacttaaaaattggtatgtgttaaaataatattaattctggtcctgtaagtaaattgcttatgttccgttttgcctcatttccactacaagcaatgatgattgtgcacgataccacatctatgtggcattatggatactgtctgggcggtgagtcctgacccgccttccacgagaggtttgtgtctgagcttgccatcccatgtccccatgggaatgcaccttctgatttacacgagcgcaccacaggcttcctgctcacgctggatggcccttagtgcatagagtgatccgtcacagaggctggaagcggagggaggtttagaaccatctggctcagcccccttactttggaggcgagtaaattggtgttgggaggagctgactggttcccgagggaggatctggcaggttgctcccagatgacctctgtgcaggaggggaagctgtgagcccccagaccctcttaagtatctgagttctggcctttcactgtacccttgggccttcatgaggagggtgtcaggttgcttgagatcagcatgagcaccaggccttgccacactggccaagcaggaggcgggcttcggcactggctcccctgccacccgcccgcgtgtgccagtgggctgtgaagtcacctgggctgggggggcctcccttgtgtgagctttggttcaggcactgtggacaacggactctaggatgggccccaagattccaagcccctggtggacatgtctgtccccttgagtgtgtgcagggctgggactgtgatggtgtcactcctgagatcaggttatattacatggtaaaggtgaagggattttgcagatgtaattagggtcccttgtccattgactgtgagttgagcaaaagggagattgtgctgggggtgtctgccccaatcaggtgggccctttaaaagaggatctagaagtcagagagcatctctcgctggccttgagaaagcaagctgccctgtgtgaaggggccttgaagagctgacagcagctgcccactgacgccagcaggaatggggacctcagcctactgagggaactgaattctgccaacaaacatgtgggctcagaagaggaccctgaactcagaaggagaccccagcctggccagtgtcttgactgcagcctgtgggaccctgagcagcgaggctgagccccgactccgggccgcaggagctgtgaggccataactgcgtgttactgtaagccgccgagtcagtgggtatgtgttacacatccagagataactacacaggcatcgaccctgtccacccggggatgctagaggggctgtgctggttttactccaggccatggtgagagccactgtgaacacagggctctctcctctgagctgcagaagctctgtgccctgtcccctgccacaagtcacagactttcttcatgtgttttacctcatgttaatgaaggagatcttctccaggggcttgatctagtgggaaacagaggagggggggattttaaatttcagtccgtccaaccctgtagatctgctgtcctacagtaacgtaaaggatcaccaggtaaaacgctgcttctcccggacgccgccaccttgcccctctctctcacatggacactggtgcctgggttgggagtatggccggtgacttcgtggcagtgtggggaggggatgtgtgtccttacatctgtgagaggtcctcgcttccccgtggtctctgctgaaaatgtctgcctggaccgccagcctctgaggcaccttggccctgcctgcaccagctcctgagcctgcctgtcttggtgtctccttctgctgtcccgtgcctggccctcagggcctctctgcaccgtcaccggtcacttctgagatcttacgcatgtgcattgctcaaagggtggctggggtgccacgtggcacagctctgtgctgtttggggactggcttggggtctttgaggggttttcgccttctagggagtcgggaccctctctaacatgagcgatgggctgtgacataatcacagttgagcttagctgattccaaaactcccttctccacacaaggcctggctttcaaacctgttgtctgactgtaggtacaaacctcccattttgggtgtaaaaagctggttcttaaccattttgtctttttaatttttttttttttttttttttactttttgagatagtttcactctgttgcccaggctggcatgcagtggcatgatctcagctcactgcaacctctgcctcccaggttcaagcaattctcctgcctcagctaggattataggtgcatgccaccacacctggctaatttttttttttgtatttttcatagagatgaggtttctccatgttggtcaggctggtctcgaactcctgacctcaagtgatccgcccagctcgccttccaaagtgctgggattccaggctcgagccaccgcgctggcctctttttgcattcttgctataaaattggtatttgtatcttcctcccattctgcgctcccccaaccctgcaggaaggtggattcttcaagggaactggagagaagagaagcacattcatgtatttccacattcagcctccatctcacgagttacaccattcccagcacgtcaccacccccagacctttggttaccagcctgggggcagaggataaggacgtcattcaaaaatagagagattctcaagcctccagagtgcgggggcccagccgagcatgctggcggcttccagggaggtggccacgccccaggggaagtggttgcatggaggaagaatctcagaggaggcttggacgtggtagagcaacgctagtcctgtgttaggactggctagtccgtcctgcagggatgaggggcagagcctcagcagaagtccaggccagtgtcccccctccagcataagagccccccactcccacagggcggaggaaccactgtggtggcggagcttatttcccagcagccccgcgggatgagacccaaacgagaagttagggtgagtttggaggacataaagtgagctggcttcccgtatactggctgtgtggagtaatgttcacggcaacagatttccatctcctcagcctcaggcccaaccctgctaccccagccatactcagaggctctggaaatcttacctggaggagactcttctgttaccaccaagccaggaagtttcatggcttgggaagaccaagaggaagtccacctccccctctcctgcacctggagtctcccatgtgcacggaggccacgcccccaccccgccctcaggtggcatcagcccaggatctgaccctggactggctcacactcagttgcctctggccagtgcagggctcagccagggatggcttctagctgacagtgggaggaattaattcatctgaccggaatattcttttctcttctgggctgttggtttttcaagtgcaacaaagattccatacagctccaaggaaggagccaagaaaaacattctgtgccaaagtgagatcctggaagtgaaaccccggaataaagctgaaaaacgggctccagttgggtgccaggaaatgcaggactggaatgtgacttgacttccggcagcgcgcaggtgctcccgggtcacctgctttgaggtccagcctcctgccctgcctcaggtgaccacatgaccactgtggactttgccctgaaaccttctgggaggagaagaggcctgaccttggcgctggggtccagtgggcattgctctggtccgaggctgctgctcttgacctctgctctgcggctgttttccattggagtagaggctcctcctgtcctgtcctgcctgtggagggaagcaaaccttcccctggaccagagagaggagaaagcggagacaggtagcaacgctgtggactggtgatgacaggctcttcagctccctgcaagtgaccgggcctggggaacaggtgagtcattgtttaaacctctgtgccctttgtggagtgtctgcctgtgtgtgtgtgtgtctctgcttctctgtgtgtgagtctctgtgtgtctgtgtgtgtgctcacgtgtttgtacccatgtctgtatttgtttgtgtctgtgcatgtgcccatgtgtgtataatcaaaggacaaagctggggcggagacttcctagttcagatttctgatggctcactaagtcggattcccagaaggagattcttatttgcatttttcttcgggaaagttccggttttaaggtcttgaaaaaaaaaaacacaaaaaacttctggtaatgagaagaactcttaaagaaatccatttcaaatgacatcaacattcccaatttaatacccagtgatatctaggaagcttgtcaggttttcttgtaaactcctttttacaatctacattgtgttttctgtatcagatggctgtattctgaatgcaatgtacaggtgtacctctcgtaatctcaatattcttcacaggccccaggcaagggtgacacaggatcacagttgccgatagactcatcaatcagacccttccctggaatggccccttccccgcaaaaaagactaatgtgggatttgctctccgttttttttccctttagtggaagggaggtgcaagagattaaaaagccccaagttaagattactagagaagcgccagtcttgaatatggtgttcctgaaaacatctttgtcttcaacaacctaataacatctttcactactaataaccccatcttgattaaattctggaggtgggggtcaggtgccacacttttaattttctctttggacagaaggctccaacctctcattattgaaagcttacaacactcaatcacacaaaaagttatataagaaaatgtttactgcagtcttattacagagaaaaaattaaaactaagtaaaaatccagtatt

SEQ ID NO: 3348 - DNA, 6000 bp, Homo sapiens
gtctcaaactcctgagtgtaagtgatcctcccacctcggcctcccaaagtgctgagattacaggtgtgagccactgcacccggcccttcatttttgttattttattttatttttcagacagagacttgttctgttgcccaggctggagtgcagtggcatggtctgggctcactgcaacctctgcctcctgggttgaagcaattctcctgcctcaacctccttagtacctgggattaataggtgtgcgccaccacgcccggctaatttttgtatttttagtagagacggggtttcaccatgttggccaggttggtcttgaactcccagcctcagatgatccaccagcctcagcctcccaaagtggataacaggtgtgagccaccgtgcctaacccatttttgtcatgtttctaatcctagtctttacagaattaggcagggcctcccacaacccggcttggctgcctctccgccctcacccctcccgaagcctacccagaccctgtgctcactgaaggtgtccctggccccgtgcctcccagtgcatgtctgcccctggcattgtgcttccggggcccaggatgctctccctcttcttggctgccacgtgggcttctcgtgcctcctccgggagaggtcctctggattcttcccctgcctctgggcaggtaggtcagcctctctggcctgtgtgaaactgggtggcagcctcttgctctgcaggcaactgtcccatccccgccaggctctgggcacctgggggcaggacttgggtttattcccttggctcccctctgttctgcccagactggcgggcagccacgtgccaaactgattgttgagtggaggaatttaacttggtgttcagaaatccctgctggaattttccactgagataagcaaggataaaggtttggaggcaaggcagacaccacaattcctgcttatctcaaaggccttaggagataagggcattctggagaagctgacctcaggtaattatcacagctgagctgagtcttcacagcagctccgcaagaaaaccccaaggaggagggggcgcgcttccccacaaatcccctgaggacttcggcccattgttccctggccagaggggggtcacctggtcacatctgcaagaaagaagatacggagaggcactaacaacctgaaccacagtggggaatctcctcataaggaacaaggggggcacggatctggggcaggccgttagcaatgcctgttgcaagccttgagagctgcttcaacatctctgaaatgtttatgcagcagtaggcctggctctccacgcaaccccagggcagtaaagagtggaaagttacaaaggactgacttggctagaaaggaacccacatgggataaactctcagaggaaatcccatcactgtcaatatttgagcagaacccgagacatcaggtggcaggagagttgcagagattcttcagcccctgggcgggcactcaggccacatcctccccagggggcccttcctgctccacaatgatataattttacatgttttggaaggagaatgtgtgcatgcctgcctacgtggcctgtgtaagtggcattgcgaatattctccctgtcaatggtaacacagaaaagttgataaaatggccagagacaaacttaaaaattggtatgtgttaaaataatattaattctggtcctgtaagtaaattgcttatgttccgttttgcctcatttccactacaagcaatgatgattgtgcacgataccacatctatgtggcattatggatactgtctgggcggtgagtcctgacccgccttccacgagaggtttgtgtctgagcttgccatcccatgtccccatgggaatgcaccttctgatttacacgagcgcaccacaggcttcctgctcacgctggatggcccttagtgcatagagtgatccgtcacagaggctggaagcggagggaggtttagaaccatctggctcagcccccttactttggaggcgagtaaattggtgttgggaggagctgactggttcccgagggaggatctggcaggttgctcccagatgacctctgtgcaggaggggaagctgtgagcccccagaccctcttaagtatctgagttctggcctttcactgtacccttgggccttcatgaggagggtgtcaggttgcttgagatcagcatgagcaccaggccttgccacactggccaagcaggaggcgggcttcggcactggctcccctgccacccgcccgcgtgtgccagtgggctgtgaagtcacctgggctgggggggcctcccttgtgtgagctttggttcaggcactgtggacaacggactctaggatgggccccaagattccaagcccctggtggacatgtctgtccccttgagtgtgtgcagggctgggactgtgatggtgtcactcctgagatcaggttatattacatggtaaaggtgaagggattttgcagatgtaattagggtcccttgtccattgactgtgagttgagcaaaagggagattgtgctgggggtgtctgccccaatcaggtgggccctttaaaagaggatctagaagtcagagagcatctctcgctggccttgagaaagcaagctgccctgtgtgaaggggccttgaagagctgacagcagctgcccactgacgccagcaggaatggggacctcagcctactgagggaactgaattctgccaacaaacatgtgggctcagaagaggaccctgaactcagaaggagaccccagcctggccagtgtcttgactgcagcctgtgggaccctgagcagcgaggctgagccccgactccgggccgcaggagctgtgaggccataactgcgtgttactgtaagccgccgagtcagtgggtatgtgttacacatccagagataactacacaggcatcgaccctgtccacccggggatgctagaggggctgtgctggttttactccaggccatggtgagagccactgtgaacacagggctctctcctctgagctgcagaagctctgtgccctgtcccctgccacaagtcacagactttcttcatgtgttttacctcatgttaatgaaggagatcttctccaggggcttgatctagtgggaaacagaggagggggggattttaaatttcagtccgtccaaccctgtagatctgctgtcctacagtaacgtaaaggatcaccaggtaaaacgctgcttctcccggacgccgccaccttgcccctctctctcacatggacactggtgcctgggttgggagtatggccggtgacttcgtggcagtgtggggaggggatgtgtgtccttacatctgtgagaggtcctcgcttccccgtggtctctgctgaaaatgtctgcctggaccgccagcctctgaggcaccttggccctgcctgcaccagctcctgagcctgcctgtcttggtgtctccttctgctgtcccgtgcctggccctcagggcctctctgcaccgtcaccggtcacttctgagatcttacgcatgtgcattgctcaaagggtggctggggtgccacgtggcacagctctgtgctgtttggggactggcttggggtctttgaggggttttcgccttctagggagtcgggaccctctctaacatgagcgatgggctgtgacataatcacagttgagcttagctgattccaaaactcccttctccacacaaggcctggctttcaaacctgttgtctgactgtaggtacaaacctcccattttgggtgtaaaaagctggttcttaaccattttgtctttttaatttttttttttttttttttttactttttgagatagtttcactctgttgcccaggctggcatgcagtggcatgatctcagctcactgcaacctctgcctcccaggttcaagcaattctcctgcctcagctaggattataggtgcatgccaccacacctggctaatttttttttttgtatttttcatagagatgaggtttctccatgttggtcaggctggtctcgaactcctgacctcaagtgatccgcccagctcgccttccaaagtgctgggattccaggctcgagccaccgcgctggcctctttttgcattcttgctataaaattggtatttgtatcttcctcccattctgcgctcccccaaccctgcaggaaggtggattcttcaagggaactggagagaagagaagcacattcatgtatttccacattcagcctccatctcacgagttacaccattcccagcacgtcaccacccccagacctttggttaccagcctgggggcagaggataaggacgtcattcaaaaatagagagattctcaagcctccagagtgcgggggcccagccgagcatgctggcggcttccagggaggtggccacgccccaggggaagtggttgcatggaggaagaatctcagaggaggcttggacgtggtagagcaacgctagtcctgtgttaggactggctagtccgtcctgcagggatgaggggcagagcctcagcagaagtccaggccagtgtcccccctccagcataagagccccccactcccacagggcggaggaaccactgtggtggcggagcttatttcccagcagccccgcgggatgagacccaaacgagaagttagggtgagtttggaggacataaagtgagctggcttcccgtatactggctgtgtggagtaatgttcacggcaacagatttccatctcctcagcctcaggcccaaccctgctaccccagccatactcagaggctctggaaatcttacctggaggagactcttctgttaccaccaagccaggaagtttcatggcttgggaagaccaagaggaagtccacctccccctctcctgcacctggagtctcccatgtgcacggaggccacgcccccaccccgccctcaggtggcatcagcccaggatctgaccctggactggctcacactcagttgcctctggccagtgcagggctcagccagggatggcttctagctgacagtgggaggaattaattcatctgaccggaatattcttttctcttctgggctgttggtttttcaagtgcaacaaagattccatacagctccaaggaaggagccaagaaaaacattctgtgccaaagtgagatcctggaagtgaaaccccggaataaagctgaaaaacgggctccagttgggtgccaggaaatgcaggactggaatgtgacttgacttccggcagcgcgcaggtgctcccgggtcacctgctttgaggtccagcctcctgccctgcctcaggtgaccacatgaccactgtggactttgccctgaaaccttctgggaggagaagaggcctgaccttggcgctggggtccagtgggcattgctctggtccgaggctgctgctcttgacctctgctctgcggctgttttccattggagtagaggctcctcctgtcctgtcctgcctgtggagggaagcaaaccttcccctggaccagagagaggagaaagcggagacaggtagcaacgctgtggactggtgatgacaggctcttcagctccctgcaagtgaccgggcctggggaacaggtgagtcattgtttaaacctctgtgccctttgtggagtgtctgcctgtgtgtgtgtgtgtctctgcttctctgtgtgtgagtctctgtgtgtctgtgtgtgtgctcacgtgtttgtacccatgtctgtatttgtttgtgtctgtgcatgtgcccatgtgtgtataatcaaaggacaaagctggggcggagacttcctagttcagatttctgatggctcactaagtcggattcccagaaggagattcttatttgcatttttcttcgggaaagttccggttttaaggtcttgaaaaaaaaaaacacaaaaaacttctggtaatgagaagaactcttaaagaaatccatttcaaatgacatcaacattcccaatttaatacccagtgatatctaggaa

SEQ ID NO: 3349 - DNA, 6000 bp, Homo sapiens
tcagcaagctcaaccccggggctgcttctcggtcaggagcagatggcccaatacagagctcccaactcagaggccacctaggtccacactcctgcttccctctgcaccccatgccccatctccccatctgcaatttttaggtccatttttaggtctgtggtaaggaacaaaaggagctttgcttggaaagctccgggcacgggtcattgcagaccctgaaaagcaatgattacatgtgacggtctcagggcttgttgtcctccttccattactttcagtttttacaaatctattacttgtccccaaagtatctaatgcaaggagaggtaaaaagcatctgagcatttcttgggtggttgttcatggattaaagttggtgtttcagaaaaaatctacctaaaaaaaggttggtgtctcaatgatctcaaaacatcgtagacacattcccattgtgtctaaagcctcagaacccacagtaatatgccccagagaaaaccaacttcgtgatcaaaataaacgtgggcgacccctgcgtatttttcatcatagaaactttcatgtacacaccacaatagagagaacggtccgatgggcccatagacccacctcccgcttccccagtaatcagctcagccatttgtatcactcacactcccaaacctccccctgcagggtactgtgtaaagcagatcccaggcattctatcatctgcaaatctcagtagagatacaggtatttttttttctttgcagttcatgtgttgaagaaatcaggttgtcctgtagatttccagtacggatgttgctgattacacccctgtgttattgaatagagtcctatgaactctgtatttttgataccgcggtggttcaggacataaacctgattagatacaggctattttttggcaagattgccatgagagtgtgcgtgcacttcccacagaaggcaaataatgtccagttgtctttctgtgatgttggcagtcactgaagactattacttcgacccactattttactaaggggttgcaaaatggtgacattctaataatgttctaatgttatcactttgtgtttattatctaggaagagaagctccccacaaaaaatatgaaacccatcaggggcagctggtcctgggaacagagtctcttctcccttcctcaccacagtgggcaagagggaggctccctaaagggggaaggggaggaattttgaaaaggaaagaagaaaagcaggagtggttggaagcagcccacatgccctcactgccgccagtaaggagccatggccacagactggtctggtctgccctgcagggataagaggggagggaatcaagtttggaatcaatctcaaaacaaataggactgagtcctagataccaagaagatcgttctagagagaaagtgactgagagtcatggagtccagaacaggagggtttagggctctctacccatcagagaagaagggttccacatagtagactcgggtggttatcccaaacatgcctggaaccccatcttagctggaaatactcaagtttcaccatcaagtatgatgctggcttcagagacggataaaaaacataacattaagttttccatctgtgtttcttaaaaaaaaaaaaaagaaaagaaaaagaaagaaaaagaaaaagaaaagctctccaggtgatctcagtatgcagccaagactaggaatcactgctagaattctgttttccttggagctgggaacagtgtctagcacatagtaagtactaattcctaagaaatgaatgaatgaggccaagcatgaagagcacataacacagcacctgtgctttgaaatatccacctggattgaggatgatttcttggggccagctatggtttgcatggatcttccaaaaagcagatttggaaacttagtccccagtgcaaccatgctaggaggtggggcctaatggaagggggttgggtcatgaggactctgccctcgttaatccacgcccagcacagattaacactgctgcgtcttgcacatccacaagcctgcgtgttctcttgccctttcaccttccactgtgggatgacacagcaagaaggccctcaacagatgtagaccccttggccttggacttcccagcctccagaaccataagaaacaaatctttgttctttatacatttctgtcccaggaattctgttaaagcagcacaaacagactaagacagcatctgaggcacagtgagagtgcctggggtgggaacttagtccagcagatgatccgctcaagtcagctggggacaggctctcagaggtcaaggcacggcccagactttccaccctttggtggaaggggaaagggtagcgggggcggggtgagggaaaaaagactactcaatggctacagtgtacaccgctctggtatggggtgcaacaaaatctcagaaatcactaaagaacatatccctgtaaccaaataccacctgttcccctaaaatctattgaaataaaaaataatttaaaataaacagagataccccttcaagttctctttgctatttatttgcataggttaataaaacctttcctaagtcaaaaaatctgtagcccgaaacatgtctgaattaactgaaacaggtggactctgaaggaatgcaccatgaccactgggatgccggcgtctcattcctttgacaatgatatgtctctttgtttaatgaagttattttatttttgggctgggcgcagtggctcatgcctgtaaaggcactttgagaagacgaggcaggtggatcacttgaggtcaggagttggagaccagcctgtccaacacggtgaaaccccatctctactaaaaatacaaaaattagctgggtgtggtggcacacgcttgtaatcccagctactcgggaggctgaggcaggaaaatcgcttgaacccaggaggcagaggtttcagcgagccaaaatcccaccattgcactccagcctgggtgacagagcgagaatctgtctccaaaaaaaaaggttattttactataaacatacaagtgtcaatataaaagaagcagctacccataactccacccccgtaatacaaccacaaatggtatttttgcctacttctagtttttttctatgactcctaaaaacaaaccaaaacccatagttttaacataaaattattatccgatgggtaagaaatacttaataccaaaggcagtctcacacattgcttcaaaatcatgtttaatggacatataacatttctacaactatctcaacttgctgaaccattttcctaatactggatttttacttagttttaattttttctctgtaataagactgcagtaaacattttcttatataactttttgtgtgattgagtgttgtaagctttcaataatgagaggttggagccttctgtccaaagagaaaattaaaagtgtggcacctgacccccacctccagaatttaatcaagatggggttattagtagtgaaagatgttattaggttgttgaagacaaagatgttttcaggaacaccatattcaagactggcgcttctctagtaatcttaacttggggctttttaatctcttgcacctcccttccactaaagggaaaaaaaacggagagcaaatcccacattagtcttttttgcggggaaggggccattccagggaagggtctgattgatgagtctatcggcaactgtgatcctgtgtcacccttgcctggggcctgtgaagaatattgagattacgagaggtacacctgtacattgcattcagaatacagccatctgatacagaaaacacaatgtagattgtaaaaaggagtttacaagaaaacctgacaagcttcctagatatcactgggtattaaattgggaatgttgatgtcatttgaaatggatttctttaagagttcttctcattaccagaagttttttgtgtttttttttttcaagaccttaaaaccggaactttcccgaagaaaaatgcaaataagaatctccttctgggaatccgacttagtgagccatcagaaatctgaactaggaagtctccgccccagctttgtcctttgattatacacacatgggcacatgcacagacacaaacaaatacagacatgggtacaaacacgtgagcacacacacagacacacagagactcacacacagagaagcagagacacacacacacacaggcagacactccacaaagggcacagaggtttaaacaatgactcacctgttccccaggcccggtcacttgcagggagctgaagagcctgtcatcaccagtccacagcgttgctacctgtctccgctttctcctctctctggtccaggggaaggtttgcttccctccacaggcaggacaggacaggaggagcctctactccaatggaaaacagccgcagagcagaggtcaagagcagcagcctcggaccagagcaatgcccactggaccccagcgccaaggtcaggcctcttctcctcccagaaggtttcagggcaaagtccacagtggtcatgtggtcacctgaggcagggcaggaggctggacctcaaagcaggtgacccgggagcacctgcgcgctgccggaagtcaagtcacattccagtcctgcatttcctggcacccaactggagcccgtttttcagctttattccggggtttcacttccaggatctcactttggcacagaatgtttttcttggctccttccttggagctgtatggaatctttgttgcacttgaaaaaccaacagcccagaagagaaaagaatattccggtcagatgaattaattcctcccactgtcagctagaagccatccctggctgagccctgcactggccagaggcaactgagtgtgagccagtccagggtcagatcctgggctgatgccacctgagggcggggtgggggcgtggcctccgtgcacatgggagactccaggtgcaggagagggggaggtggacttcctcttggtcttcccaagccatgaaacttcctggcttggtggtaacagaagagtctcctccaggtaagatttccagagcctctgagtatggctggggtagcagggttgggcctgaggctgaggagatggaaatctgttgccgtgaacattactccacacagccagtatacgggaagccagctcactttatgtcctccaaactcaccctaacttctcgtttgggtctcatcccgcggggctgctgggaaataagctccgccaccacagtggttcctccgccctgtgggagtggggggctcttatgctggaggggggacactggcctggacttctgctgaggctctgcccctcatccctgcaggacggactagccagtcctaacacaggactagcgttgctctaccacgtccaagcctcctctgagattcttcctccatgcaaccacttcccctggggcgtggccacctccctggaagccgccagcatgctcggctgggcccccgcactctggaggcttgagaatctctctatttttgaatgacgtccttatcctctgcccccaggctggtaaccaaaggtctgggggtggtgacgtgctgggaatggtgtaactcgtgagatggaggctgaatgtggaaatacatgaatgtgcttctcttctctccagttcccttgaagaatccaccttcctgcagggttgggggagcgcagaatgggaggaagatacaaataccaattttatagcaagaatgcaaaaagaggccagcgcggtggctcgagcctggaatcccagcactttggaaggcgagctgggcggatcacttgaggtcaggagttcgagaccagcctgaccaacatggagaaacctcatctctatgaaaaatacaaaaaaaaaaattagccaggtgtggtggcatgcacctataatcctagctgaggcaggagaattgcttgaacctgggaggcagaggttgcagtgagctgagatcatgccactgcatgccag

SEQ ID NO: 3350 - DNA, 6000 bp, Homo sapiens
ggccttttgctcttggatgtgaaatatgcgagctttgaggttcacagacccgggtagcacagaaccgcagcacctgagttccagattcaggaaggcttaatttttttttttttttttttttttgagagggagtcttgctctgttgcccaggctggagtgcagtggtgcaatctcagctcactgcaacctctgcctcccgggttcaggaaattctcctgcctcaggctcccgagtagctgggattacaggcacctgccaccacacccagctagtttttgtatttttagtagagatggggtttcactatgttggccaggctggtctcgatctcctgatctcagatgatccacctgcctcggcctcccaaagtgctgggattacaggcgtgagccaccgcacccagccaggaaggcttgaattttgtttgggtttgaattcaaggtcccgcccttcctcaccacgtcatgtcacctcactgagcctcagtttcctcatctgtatggtgggataacaatagctagctcctaccttgttgcgttgtgaagaatgaactagatgctacatccagagtccctggaagcgattccctgctcaggaaactccttgcaccaggactgtgagccatggtgattatttttacaatgattctttcagccctcctgtcgtgaccgtctcctctctgtgcggcaggtttctcaccccctgtggactgtggggtcacagctctagctgcagatttccggctgccctctgccctcccatcaggccaggcagatcaagggcccagcctcctttcatcttttctcacaaacattctgggatgtggcggaaggaggcctgggctggggtgggatggtggctctgcctgccagcaactctctgtgtgaccttgggagaatgcttgtccttctctgggcctcttctgcagcctgaggggagtgaggtgttgagcgtacttggccgtcatgcgagcccagtggggccaggcgtctcccccattttcacatgggcaggtcttttctgcctttgacgtctgtgttttgtctccagattctgggctgggtagagacacacttgagcctgaggttccccatctgtgaaccggccacacagcccagaaggtccggctgtgagggtttgaatgtgtggggctgtgctcagtggttaatgccgtttgaaggtcaccactcaggcgccacctgctcaggtgctgctgtcaccatctcttccctgacgggggcacatttgttatgattaatgaatcaatacaatattgatacattattattatttaaaaaaatttcagaggcagcgtctcactctgttagccaggctggagtgcagtggtaccatcacggctcactgcagccttgacctcctgggctcaagcgatcctcctgcctcagcctcccaagtagctgggatacaggtgcacaccacgcctagctaattttttgttgttgttttttgtggagacaggggtctcactgtatacccaggctaatcttgaactcctagactcaagtgatcctcccacttcagcctcgatgctgggattacaaggcatgagccattgcacctggtctgatacattattataattgaagtccatgctttagtcagacttcctaagtctttccctaatgtcttttttctgccccaggatcatgtctcctctttgctctgatagtttttcagatttttcttttctgcctttgacacccatgttttggacgcccctcccggtgctggccgctgggggagaacaagctcatctgctcctggctcctgactcccatggggttggggatgcttctctagtgtcttgggtttcccaccttcggccagtttggcctcacttcctggaacacggatatatgcccatgcacacactcctgtgtgagccaggccttctgcatcagctgggtccccgctgctcctcagcacagaggcctcctgactgccccctccctgtcccctaatgtgaccgccactccatgtctccccaggccctgctctgctcaccaccctccgtggctcccaccacctccaggacagaagccacgcctggcactcagggatcctcaggttcccctaccacccttcccacctcacttccccgactccagcccaaccgccatgctgtgcttcgcaaacaccacctgcttctgcatggagttgcagacgcagcggcgttccccatctctgtctttgctcacactgtccctctacctgcacacctgtcctgtcctgtttgttattataattatcttgttttttgagacagggtcttgctctgtcacccaggctagagtgcagtggtacgatcatggctcactgcagcctcgatctcctgggttcaagttatcttcccagctcagccttcccagtacctgggaccacaggtgcacaccaccacatctggctaatttttagttttttttttttttttttgtagagacagggcctcactatattgcccagactggtctcaaactcctggactcaagtgatcctcctgcttcagcctcccaaagtgttgggattataggcgtgacccaccatgccctgcctccctgtcccattttcacctggcaaccatctccccaggcttctaaactctccatagacaactctctcctcaacacacatgctgggttgggggccccactctgggccctgcagcccctgtacttgcccatccctgactcctctaagttagagaccaaagaccagccttggttttttcactgctgtatcccagcatgtagcacagaccctagcacatagtagatgctcaataaatgaccactgcaggaggaaggaagagtgaagccaagccaaggactagggggtggggaaccttctgggcagagggatcagcaagtgcaaaggcctcaggacagggactgcttgtggagggacagcaggaggcaggtagaggaggggaggagaccagggcctgcacagcacgacatctctgtgtaaactgtgaagtgcagtgccaggggaggtgccaagcccattccacagactcaggctagagcccatcccccacccaccctgtcctgtagccctgagcctggtggcttcaactagaccactcacagcacaccatgtggagaatggcagaactgttctggagtttcccactgaggcctgtgatgggtccagtttcctggctgctgcagcaagggtgagctgggctggggctgggcatagcagatcagccatcattgagccagggtcaccagggcactaggtgtgctgtgggcagcacctctgatcccatgtcatgggacaactctggctcgtgggttcactgccagtcgtggagggccaggcctcaccctaccccctccaccctgccctcagttgtggctttggcccacccaggttgagggaaggagggaagaggaggtttctggagacagaggactatacaaccagcactcaccatctcagcaatgttgacgtcaatagcatctatcatctgctgggtgcttttgggttgggaagtggttcctgttggtgttctaagactggcctggggccatatatacagttggtagtcaataaatgcttgctgtccattaacgatgatttgcaggaattaagcaatgagttgctgctttaccaacaaagaatgttttaagcaaaataatttgcacaaagagtcacttatctaccaggccagaccagcaactcccaactgcacaatcctggaacttgccagggttgttaccctcgttttactgatgagtaaactgaggcccagagaaggcaggttcacatagtcactgaagggaagagctggaacttgaactcttgtctgtaggtcccaagtcagtgtgtgctgcctggccaactgggcagtgcctgctccgtgctgggcatgggccaggccttggtcactgccctcagggtggggacagacacactcagaacggacttagcacgtgcctccatcagggcgtgtcaggaagcatgttgtggagaaggtggcgtttactctggactttgaagaacaaggcgaggtagccagggacaggggctgagccttcctggcaggggttacagcctagcaaaagcccagaggggtagttaaaaataaagagtgcttcaaacgctcaataatggaaccattgtgctggccacatcctcctgagaacctcagccgctgagccaggcccttgaagtcggcagtggcttcaggtgggaagctgcatctgtgcttgcagaacctttacttgtctaagttgcctcctctctgataagagcatgtagggtatgaatgagaaagagatttcacatgtgctgagcgggcatcacctcatttcatccttacatgcgtcttctgggggctgtgatatctttagcccactctgcaggttggcatactgaggcttcttacattatctgcaaagtggcagagttgagacttgaacctgggtctggtccaaaatctgtgcttttaagctctctgtcatcccagttctcgaaaagcccagaattttctgttgaactcctggggatgagtttagtgatgtgctcgtacatattgaataaccagctctctggaagaaaaaagaggcttgattggtagcgtattccgatgtccaaggggtaaatactcccactgtggctgacatggagctatcagtgtgacattcttgaatatggagttgggaagagatgagcacagttggttcttgcaagtaggtaagggccagctccagcgtgtcactgggtaaatgtccctgcctcccccccgagcccagtatggccagtaaaggcctttagacatgtctaaggaatggaagagggctgagaaacctgctcctccagctgggggcccgccctgagccctgggaagctgcggttaatctttaagccagccttgcaaacaagtgcggccatttcaccagcccaggctggcttctgctgttgactggctgtggcacctcaagcagcccctttcccctctagcctcagtttatcaccgcaagagctaccattcatctagcacaacctgaccatcctcacactggtcagttccaaccttcccaggaatcttctgtggccatgttcactccggttttacaggtgagggggctgggctgggaagctgatcgacttgtccaccccacagcagaggggcagctagcctagatgcgaacctagatcagtgtagagtaaggctttgctcattcctggtctcctggaaggtatgttgtacccagaggcctttgccttccacattctagggtgctcctcccagctcctctcagcagggacctttgcccagggaatagaagcctgacctgtctgggccttaatttcccatctgtgaaatgggagaactttcaaagaaggaatatggaggcaggtgtgatatttaaagctggacccaggcccacctttccctgtgctaggattccaggacaggtaaggagccaagggtggggtgcccagccccaaaaggatagccctggagcctgcgccagggggtaagaggggagtctttgtggcctaaagcagcatttcctcaatgtcccgtttttctgctacatttcctgccctggttcagaggtacttagcctctttacttacttggaagtgtgactgccactcagatgccctggtcagcccctcctaagcagtaataattagaactaggggacttccgatgggctgccagggatgttttgcccttatgcacttaaaatgaacccgtaactattaaaataaatgtcgctcctccccaccctgtccctcctgccccagcccctactttgagaaactcaggtcaaggctaaagtccaaggcctggttcttgtcagtgcctcagtttccccatctgtaaagtggggcgatcttccgccgctcaggccaggtggtggttaggattaaaccctgaagtcgacctgagcagcttagcatggcgcctggcccagagcgggcgctccacgcccgctgatattattaccaatcgtgatt

SEQ ID NO: 3351 - DNA, 6000 bp, Homo sapiens
gacctcctgggctcaagcgatcctcctgcctcagcctcccaagtagctgggatacaggtgcacaccacgcctagctaattttttgttgttgttttttgtggagacaggggtctcactgtatacccaggctaatcttgaactcctagactcaagtgatcctcccacttcagcctcgatgctgggattacaaggcatgagccattgcacctggtctgatacattattataattgaagtccatgctttagtcagacttcctaagtctttccctaatgtcttttttctgccccaggatcatgtctcctctttgctctgatagtttttcagatttttcttttctgcctttgacacccatgttttggacgcccctcccggtgctggccgctgggggagaacaagctcatctgctcctggctcctgactcccatggggttggggatgcttctctagtgtcttgggtttcccaccttcggccagtttggcctcacttcctggaacacggatatatgcccatgcacacactcctgtgtgagccaggccttctgcatcagctgggtccccgctgctcctcagcacagaggcctcctgactgccccctccctgtcccctaatgtgaccgccactccatgtctccccaggccctgctctgctcaccaccctccgtggctcccaccacctccaggacagaagccacgcctggcactcagggatcctcaggttcccctaccacccttcccacctcacttccccgactccagcccaaccgccatgctgtgcttcgcaaacaccacctgcttctgcatggagttgcagacgcagcggcgttccccatctctgtctttgctcacactgtccctctacctgcacacctgtcctgtcctgtttgttattataattatcttgttttttgagacagggtcttgctctgtcacccaggctagagtgcagtggtacgatcatggctcactgcagcctcgatctcctgggttcaagttatcttcccagctcagccttcccagtacctgggaccacaggtgcacaccaccacatctggctaatttttagttttttttttttttttttgtagagacagggcctcactatattgcccagactggtctcaaactcctggactcaagtgatcctcctgcttcagcctcccaaagtgttgggattataggcgtgacccaccatgccctgcctccctgtcccattttcacctggcaaccatctccccaggcttctaaactctccatagacaactctctcctcaacacacatgctgggttgggggccccactctgggccctgcagcccctgtacttgcccatccctgactcctctaagttagagaccaaagaccagccttggttttttcactgctgtatcccagcatgtagcacagaccctagcacatagtagatgctcaataaatgaccactgcaggaggaaggaagagtgaagccaagccaaggactagggggtggggaaccttctgggcagagggatcagcaagtgcaaaggcctcaggacagggactgcttgtggagggacagcaggaggcaggtagaggaggggaggagaccagggcctgcacagcacgacatctctgtgtaaactgtgaagtgcagtgccaggggaggtgccaagcccattccacagactcaggctagagcccatcccccacccaccctgtcctgtagccctgagcctggtggcttcaactagaccactcacagcacaccatgtggagaatggcagaactgttctggagtttcccactgaggcctgtgatgggtccagtttcctggctgctgcagcaagggtgagctgggctggggctgggcatagcagatcagccatcattgagccagggtcaccagggcactaggtgtgctgtgggcagcacctctgatcccatgtcatgggacaactctggctcgtgggttcactgccagtcgtggagggccaggcctcaccctaccccctccaccctgccctcagttgtggctttggcccacccaggttgagggaaggagggaagaggaggtttctggagacagaggactatacaaccagcactcaccatctcagcaatgttgacgtcaatagcatctatcatctgctgggtgcttttgggttgggaagtggttcctgttggtgttctaagactggcctggggccatatatacagttggtagtcaataaatgcttgctgtccattaacgatgatttgcaggaattaagcaatgagttgctgctttaccaacaaagaatgttttaagcaaaataatttgcacaaagagtcacttatctaccaggccagaccagcaactcccaactgcacaatcctggaacttgccagggttgttaccctcgttttactgatgagtaaactgaggcccagagaaggcaggttcacatagtcactgaagggaagagctggaacttgaactcttgtctgtaggtcccaagtcagtgtgtgctgcctggccaactgggcagtgcctgctccgtgctgggcatgggccaggccttggtcactgccctcagggtggggacagacacactcagaacggacttagcacgtgcctccatcagggcgtgtcaggaagcatgttgtggagaaggtggcgtttactctggactttgaagaacaaggcgaggtagccagggacaggggctgagccttcctggcaggggttacagcctagcaaaagcccagaggggtagttaaaaataaagagtgcttcaaacgctcaataatggaaccattgtgctggccacatcctcctgagaacctcagccgctgagccaggcccttgaagtcggcagtggcttcaggtgggaagctgcatctgtgcttgcagaacctttacttgtctaagttgcctcctctctgataagagcatgtagggtatgaatgagaaagagatttcacatgtgctgagcgggcatcacctcatttcatccttacatgcgtcttctgggggctgtgatatctttagcccactctgcaggttggcatactgaggcttcttacattatctgcaaagtggcagagttgagacttgaacctgggtctggtccaaaatctgtgcttttaagctctctgtcatcccagttctcgaaaagcccagaattttctgttgaactcctggggatgagtttagtgatgtgctcgtacatattgaataaccagctctctggaagaaaaaagaggcttgattggtagcgtattccgatgtccaaggggtaaatactcccactgtggctgacatggagctatcagtgtgacattcttgaatatggagttgggaagagatgagcacagttggttcttgcaagtaggtaagggccagctccagcgtgtcactgggtaaatgtccctgcctcccccccgagcccagtatggccagtaaaggcctttagacatgtctaaggaatggaagagggctgagaaacctgctcctccagctgggggcccgccctgagccctgggaagctgcggttaatctttaagccagccttgcaaacaagtgcggccatttcaccagcccaggctggcttctgctgttgactggctgtggcacctcaagcagcccctttcccctctagcctcagtttatcaccgcaagagctaccattcatctagcacaacctgaccatcctcacactggtcagttccaaccttcccaggaatcttctgtggccatgttcactccggttttacaggtgagggggctgggctgggaagctgatcgacttgtccaccccacagcagaggggcagctagcctagatgcgaacctagatcagtgtagagtaaggctttgctcattcctggtctcctggaaggtatgttgtacccagaggcctttgccttccacattctagggtgctcctcccagctcctctcagcagggacctttgcccagggaatagaagcctgacctgtctgggccttaatttcccatctgtgaaatgggagaactttcaaagaaggaatatggaggcaggtgtgatatttaaagctggacccaggcccacctttccctgtgctaggattccaggacaggtaaggagccaagggtggggtgcccagccccaaaaggatagccctggagcctgcgccagggggtaagaggggagtctttgtggcctaaagcagcatttcctcaatgtcccgtttttctgctacatttcctgccctggttcagaggtacttagcctctttacttacttggaagtgtgactgccactcagatgccctggtcagcccctcctaagcagtaataattagaactaggggacttccgatgggctgccagggatgttttgcccttatgcacttaaaatgaacccgtaactattaaaataaatgtcgctcctccccaccctgtccctcctgccccagcccctactttgagaaactcaggtcaaggctaaagtccaaggcctggttcttgtcagtgcctcagtttccccatctgtaaagtggggcgatcttccgccgctcaggccaggtggtggttaggattaaaccctgaagtcgacctgagcagcttagcatggcgcctggcccagagcgggcgctccacgcccgctgatattattaccaatcgtgatttcgggagaggcggatctggggcgtagaaggtgggtgggttggggagggcattttggcctgggggcggatggggcccgcggggtgcggcgccctggcggagtgggaggcggggcttctgtgcccggtgtccccaccccgcccggacccccagctcgggccgcccctgggtctctcccgggtcaccggcggggaatccgtccccgcgcgcttcctccttcctcctcctcccggctgcctgccgggcccctcctcccagctcgcgcgctccctccctcctcttcccctccccgggccgccgccgcctcctcctcctcctcctccctttctctctcgatctgtctctcccggcccggaatccattccggcctgggagccggagcggccaggccgccgtctgcccgtcccgctggacgtcccgcggtccgccctcccgtgcgtccgtctgccggtgagcccgcccgcccgccggcccaggtgagcgccccccgcccctccgcggaccccccgccccggccagcgcgggggagcccccgccccggaccaccctggcgtcggatcgcgggccggcggggactcctgtccacccccccaattcccaccccccctccgggccaagccgcgatacccaagcgccgggcgggcgcacggggccatgcccggcgcggccttttgttgtgatgcagcggggggagggggctgggcggggggggcgcagggttcctggctgcgtggggaccccctccagctcatgctccccataggatcccccagagaagccagcgagctgggccctagcccccgggccaggtctaggccaaatctgaaatctgagccagtcggcgccgcctctgcctgggctgcccggccctgcgccccccggccccgggtgggaggtggggggatcggcagggcgggctgaggggccccggggtcagggcgccaggccgaactgccaggacctccctgccctcgtggggcctcgggtagggcctggtgctgccggcctggaagggactgggccagactgcgtttggtctcccctgcccacagcccccagcctcgcccctgagcaggcccagctaccagccggctcagaagttggcaaaagttttgggggttggccaccgggccaggtccacctgtctgcctgggctgggattggggtgggtttgagtccccaccagggctgccacttgccctgctgtgtgtcctcagacaactgcctgcctctctgagctgggttcctcattggtggcaggtgggcctggctggaattgctaggctggtggaaggatggggtgaacagaaggggctcacctgtgtggtatcctttcagcccctgcgtccttcaggtggacttaggagtggacag

SEQ ID NO: 3352 - DNA, 6000 bp, Homo sapiens
gaggaacacgtaggttgttaatggctttctgtggagagttttaagcggaggaggcccagttgtctgtgaggtttacagagccgcctctggctgcggggggagggtggactggaggggcccacactgctgtgtccaggcctaggatcacagggccctggcctgaaggactggagatagacagggtggaggggaggaatgcgcttgaggaagattcaggaactaccccggggctccccaagggcagagccccacacagggcttggcacgtggcaggtgctctgcgaatacctggagaatgactggggtgggatgtgcaggggttgtcgctgagtcagtgatggggatgggggtgggggggagatgcaggcttagcgggaggtactaggccacttggggacctgctgagctcaaggcactgggaacgccgagggaaaagttcttatagcagcaactcggcacctctcgagggagcgagccatagtgcaggccccctgtctgctgaggagtccagagcccacggtgaggagtggcttcccgaaggaaaggggccacctttccctgggaacctcaggcagccccattgtggggcccccactgcttccccttgacccccgcaagggtctatctctaccttggaggctgcaagtggcggaagagatgaggggggttggcccctctccaaggagcaactcatggtgactcggcagttgggccccagaaccaggaagtgcaaggatagagctctgtgccagggaggagggtggtctctcatgaggtcccacggcatggaagcagccctccgagactaactcccaccctcactgagtcatcgagtgaagagccgtgtagctttcgagaccagcccagccgacatggtggaaccccgtgtctactaaaaataccagaattagccgggagtggtggcactcacctgtaatcccagctactcaggaggctgaggcagtagaattgcttgaacctgggaggcgaagggtgcagtgagccgagatcacaccattgcactccagcctgggcgacagaggagactctgtctcaaaaaaaaaaaataataataataattagccaggcgtggtattcggtgactgtaatcccagctacttgggaggctgaggcaggagaaccgctggaacccgggaggcggaggttgcagtgagccgagatcgcgccactgcactccagcctgggcaatagagtgagactccatttcaaaaaaaaaaaaaaaaggaaaagaaaaagaacgagagagcttggagtaaaaaaaaaaaaaaaaaaaaaaaaaggaaaagaaaaaagaaaaagaccgagagagcttggagtggcctgagaagatgctctgaacacactaacacataaagtgaaaagagggaggcggcagtgtagaatctcctctgggtatctcagggcctcagtttcctcatctggaaagtgggggccacagtgctacccgcatgaccctcagtgggccattcttgctcaaggacgttctgctcggagctttctcaggctttctctgggagtggggtgggctgctttatcctctcacccctcttccaaggccatctggctgctttgtgagagagatccctgggggtaggaggtggggcctgtgagtttcagcccctgattcccacctgcccagtgtggtggccccttttcactctcacccatgctgtgtgacttcaggcaagttcttcaacctctctgtgtcttaatgtcctcaacagtaagataaagacatgattagtatttacctcctagattatcatgaggagccgatgagtcaatgtttgcaaagtacttagagcaaggtccaattcaaggtctgagctctgggagtatttgaataccacggaatgatatttagtcttttcagtgtggcattgcaggaacaaagtaggatgcaaattatacatccatgcccatttagtcttttgtctattctgcaaatagttccagagcacctagtgggtgtcaggcccgtcctggtctctgggggcatggagatggatcctgcctggccctgacagccgcgagtgcacagtggagggcactgggtggaccccagtttgttgaccgtcttgcgttgctgtgacgctggaaggaaacgcaccaccacacccaggtgtttgtcttctaggggcagaattatggggcattttcttttattttttcttttctttttttttaatcttcttgtagttctcaaagagtccactctgaatgataaaagttaccatttacggaggcctggtaacgttccgtgccatcctgagcatgttccgtgtacttttctcacggattctcccagcagtcctgacacgggtgttattcccgatcgatagagaggaaaactgaggcgaagggcggccggccaggattcaaaccagggagtctgctccagcactccggctcttaacctcaaccgtctgcctctccacaaacaccaggatcaaccaccaagaccaaaaaaacagtctcacaaaccatcaaacattgcacttggtggctcaggaccttagcttcgtcttaaaggtccctgttatgctttttctgagtgccccagtgtggagtggtcttcgtgtttgtgagtgcaggggtcaggggttgtgtcttttcttcttgtccccttccaagaggtgacatgtatccttgatactggaagggcccttaaggtctagccctggctctctgtctcccttcatggcacatcagccaagtacccattctcccgtctttgattacctccagtgacagggagctcactcctcaacatttattttattctaaagaaaattcaggctcttagatagttcttcctccataaaaattttttaaaaaaatttttacttcctcttaaagtctcataaacaagtcccctgctttggggtcctgaggcaggacctggctaattcgtctctatgtccccctatagtgaggagcacagggcctgctagtaggtactataaatgctgcaccaggaagcaagtggctagggggcgggctggttgggcccccatcaatccttgggctgcaggtaaccaggtcagcagttcttgtgggacaccagctgggtgagtgctgatgggtatcgtgacctcaatggaataggttgccatagaaactgactttggacctgtccccaggtccattgacttgtccctcaggagaccatggtaatcccttgagctcttcagcaggtctccccagggcctccccaaccccacattctctgagctgggtggtccccagggagcatgcaaaccatacccccattgtgcagctgggtagcctgaggccccaggggcacaggggacaggctgaaattcacacaggcagggggcgtctcatagctgggctgggcgctcagggcaaacagccttgcccgaggacccagccagtcagggggccttttccccactcatgggttctcagaggaaattctggaccgattcccaggccttctgcctccccaaagaataatcggaacctgcctccctggtgtgtccagaattacacaatatcaataacggctgaggtgacctgtgatgcccctagcaccctacagtgtcttgtgcatttatcacaatgaccccatcgttacagatgaggaaacggcacagagagaagttaagtcacatgcctaaggttacacagctatttaggggtagagccaggatctggatgtggagagcccagctccagagcccactctcaccaccatgccataccctgtctcgctcttgctttgagagggttgaaaagactttgggagggttgaaggatatttcaggtctaggaggctcttagcacgggcctgctagagccatagcctgatgaacagtgatcagagagtgggcgccattatgatttctctttctaatgacatcctcaaaacagtgctgagatgtctgctttatccctgctttgcagatgaggacgctgaggcccagagagggaaagccacttgcctagggacacacagcggggagaggtggagcagggcctctatttcgagacccctgactccacacctggtgtttgtgccaagaccccaggctgcctcccaggtcctctgggacagcccctgccttctaccaggtgagatgatggccctatcagggctcaagatgggtggggagatcccagcgaatctgggtgggagctgggaccagccagggcctgcggatggggaaatgggaggcagagggtggtggcaggactgtgggcgtcagggggagttttcaacttggtttactctgtgtttccgtctctctggacctcccaggtttctggctctgaagtcccttagctcttaaatagtcactcattcgttcagctgtttactgagcacctactgtgtgccacaccccatgctaggcactgggagcacagcagtgaacaagatgaacaaaagcccacgacagtagtcacataaccacatgaattcaaacaacaaaaacaaaacaggaccacatgttatcaaagacagacacaagtcagggggacccagtgaaaggatttggggaacacttcccaaggaggggacttttgagttgagaacggaaggaggcaccagtcaccctggtgaagtggccagggaacagcatttgggcagtgggaatggtatgtgtgaaggccctgtggctggagtgagctcccagccatctctgcttcaaacctcctgctgtatggccttggctgccacttttagcacctttccccagcgttaggcaattcccgtcagccacgtattcattcaacaaaccctcaatgagccccctccatgtgctaggtgcccgggacataggcgtggctcagatactgtccctgccaggagggagggaaacagtgactcagggggaggtgggtgggtaaggtcagggcttctgattatgaggcatttcttccgttcctggcgctggaccgaggaagccctttacggatggatgccatccttacgctcattttacagatgaagacatcgaggttttgagaggctaactctcccaaaaaggctggtgcccctgtcccccatttttttcttttctttcttttttttttgagacagagtattcctctgacgcccaggctggagtgcagtggcaggatctgagctcactgcagcctctgcctcccctgttcaagcgattctcctgcctcaccctccggagtagctgggactacaggcgcgtgccaccatgcccggctaatttttttttttttttcaagtagagcccgggtttccgcgtgttggcccggcaggtctcaaactcctgatctcaagtgatccgcccgcttcggcctcccaaagtgctgggattacaggcgtgagccaccgcgcccggccctgctgcctctccttgggcctcgttttccctatctgtggaatgggtgggagggaggccggccaaggggccccggcagccctgcctgttccagtgtcttctctctctcctgccaggaccatgggtagcaacaagagcaagcccaaggatgccagccagcggcgccgcagcctggagcccgccgagaacgtgcacggcgctggcgggggcgctttccccgcctcgcagacccccagcaagccagcctcggccgacggccaccgcggccccagcgcggccttcgcccccgcggccgccgagcccaagctgttcggaggcttcaactcctcggacaccgtcacctccccgcagagggcgggcccgctggccggtcagtgcgcgggcggcgcggggtcctcgcccacctggggccacggcggggaggcggcggggctgtgtgcccggggtcgccccctctgcgcaggcccttcctctcgccaggggtagcgcccctgggtgacttgggtgtccggggggtgggggggcggccgtacacactgtgaagcgtccgcgccgccgccgctggctttggggtggagcaagcgcaaaagacacggggtgtggttaatgggttctaattggacgcttaagccca

SEQ ID NO: 3353 - DNA, 6000 bp, Homo sapiens
cattttcccccactggtaaatggaggctttgaactgaaagatctcagagagctgttttctgtgatttgagtccttgctttgtagctttgggcaagtcgctgcacctctctgtccctcagtttccccaactctctaaagaaagtgctggccaggcgcggtggctcactcctgtaatcccagcactttgggaggccgaggtgggcagatcacttgaggtcaggagttcgagaccaccctggccaacatggtgaaaccccgtctctactaaaaatacaaaaattagctgggcatggtggggcttgcctgtaatcccaactactcaggaggctgaggcaggagaatcgcttgaacctgggaggtgaagtttgcagtgagccgagatcgcgctgttgcactccagcctgggtgatagagcaagactccatctcaaaaaaataaataaataaataaagtgctgggctactctgacctgggtgctgtgtgtccctgcgctgatcgcttgacatttctgagccagtttcttcatctggggcctggagccctgccttcctcccttgcagggtggccttgggggtcagtgggagagacaagtgtggacaccccgggtgggtgtacaacaaggaggtgggtggggatttggggcatccaaaggcttcttttcttgaggtgggtcttgcctccttactcccgggccctccctccagtgaccccatatggcttgcccccctgcccgagtgtgtgtgtagccatcacagagccaagacaggccacacagccccagtcacacccccttgcctcactccatcaggaggggacacaacaccctctggctcacttcgagccatccggctgaaccccagtgtctcaggtgctcacctgtcctccgacaggtccctggagagctccccaagccctgctccctcctggcctcaacttctccatcttctatatgggctgaagaatatggccaggggcagctcagaagaagtgggagccagggatccaggttcatgttcagattgtgtgactgtaggcaagggcctttctctctctgggccctggcggtgggtgggggccaccctgcctgccgtgtgtcttctcagggtcctggtgaagtacaaaagtggccttggattgagaagagcccagcaagctgtcaagccctgctgcaacctgcagggggtgctcctatctgggagtcaggagcctgggcctggctgtgtgaccttgagcaaagaggcctttgcttctctggcctcagtcttcccagctgtacagtgggaatgagaggggctggaccctagttcccaggtctccctgcccattgacctctcctcactccctgtggaccccgtccctgtccccttggttgctttggatgtgaggcctctgtggctgccccctcgtcccctgtccccagcaccgcctggctctcccgctctctcccctgctctttctgccactctccgcctctcaccacccccatctctgcctcttctctcctgttgggctctcgctctctcctccctcctctgtgtctctggacccccgctccagccagacctggttcacattcagatggctgcaaaggtacttccgcccctccccgctcccgcccaggcccaggggacccgaccacgccgggagctcttcctgccccatccccatcacaccccccactccttctcctcactttcgcatagaagtgccctgggcattggggctctgccacctcaccccctctgacagggctcactgtgtgactttgggcaagtcccagccccctctggcctcagtttccccctgcagatgggtaggctggaggaggaggcctgtagttttcagccgaggagccctttaggtgtgacccgtgatttgggacagaggcaagccttgctctagtttgcagggttggggcctggatggtcactgggtcccagcagggcccctgcttgcctccacccaggtctcaccagctcccaggagcgggcttccaaatctcagagcatggggacactttgtaggtctcacttgactttctctcagccaggaatctcttctattacaaccttacttgcccgcagagacagggggttccctccctccctcccaaggcagctctcggcatcttgagatgtcttggtacatctgaaaggaagtgaatttcttcctgtcccgggactcctcccctatggatttgagcctcagatgaccaaggccagtcctgccctggtccaagacaaagtccatctgatccagctttggcaaaaaggcgtctgcgccagggaggggaggagttccaggccagctggacctggcatgctgtggggactcacgctggccccaccacctccctgggcctccctcagccactagagccctgagcacagcacctaggaggatggtgggcaccgggcttgtggctgacggctcccttctcctttcctccctccttctgtccctgctcagagagggagactggtggctggcccactcgctcagcacaggacagacaggctacatccccagcaactacgtggcgccctccgactccatccaggctgaggagtgagtaccgtctctggctgcctctacccgtcgtccctggacactgccggtgcagagtgcctctcctgggctggggtgggaggtctggctgtccagcgccccagccatatccagggagaagcactgtgagtgggcagaagcctggacagtcagcaccatcctccgtcctcccacccccaggtggtattttggcaagatcaccagacgggagtcagagcggttactgctcaatgcagagaacccgagagggaccttcctcgtgcgagaaagtgagaccacgaaaggtacgagcgctcttgctggccaacggatactgagtcttctgtgagtggtttgagctgggtgttgtggaatgagcaggagtttggtttgtggagtagggagggaagaaccttccgggtggaggtaatggcaggatcaaagtcagggaggtgcatttgaggaacactgagtaatccgcggtggccagatgtccagagaaagatgaggcttagtctctctggcctcagttttctcagataaaagatgaacataggttgtctggaggtctgagtgtcacacagtaacaggctcgttcccagggtaggtgctgctacaatgagccccgcttcttcctcttccccaggggtccctgggctgcactggatgctggaggctggttttgccctcccccaactgcagtcctggtccctgcccctctcctgtccctcccctgagccagagaatgaagaccatcccctttctctccagcccctctgaaagtgggttgcaggcgcccgtcaccatggcagccaagctgagctgcttcctgtgggcctggggctcagcgggagatgggaagcagagcatccatgtcgagccgtgcatttacgagcagtcgtgcagccatgtgcgggtgtgcatgctgtgtgtacatctgggcgtgtgtgtgtgtgcatgtggggtggaattgtctgtgtgttgctgtgtgggaatggactgctgtggtttgtctggtgcctgagggcctagggagcgtgtacttgtgtgagcgtgtggctactgggcatgggcatgcctgtgcgtgtatggacatgtggctggggttggcttcagcctcaggcctgtggcttccacatgcaccctcccgggccatcagtagaaaatcatggttgcctaaggcaggctttgagtccccggatgtgggtttgagccccagccctgtctctggtttgctgggtgaccccaggctggccacttccctctctggacctcatttcttctgtacgctgggattgtaatctcctgaagatcgcagagggggaggtctgtgggctaggatggctgggcttcccccatgcccatgcactgcctggccaggctcctgagaaggcctgtccctggctgctggagcctctgcccctgcctccggggctcagccttgttccctgatgccatttgggcgtctcttggcctctggtcctacccaggcctgctggatgggaggaaacttttccggccaaaagcttttctatgctcaagggaaagaggggaggcaccagggctggccccgtttgacccaggcagccttcaggccacacccagcccgtggtctcctgcccacgacggccaaagcctctgccaaccaccccctcccgcctgagcctgggcctgtcttcagcaaggaggttggggggacatggacagtgcccccgcaagctgacccagagagggaaagcagttaggccagggccacacagccacagggagccactcacaggctcccagcagttattgagtgcccagtgtgtgccgggcccttctatatgtggttgcatggaatctccccagcagccctgggagcacccgcattgtgcagaggaggaaactgaggcccagatagggccagcaacccctccaagtctcatagctaggatgtgcacctgggatatggaggtcttgctggggccaagggtgcgtggcaggacgtactaatcaagtgtctcttgggtcccttggccctgcctctgtggctgccccggggctggctgttgagagacagggtgggcctggggccccgcctgggcctcccttccctccaatgtcaggcaggcacagaacggtgtccagagcagcggcctgcggggggagagggcatggcggtcacggctcccctcggtgccccgcaggtgcctactgcctctcagtgtctgacttcgacaacgccaagggcctcaacgtgaagcactacaagatccgcaagctggacagcggcggcttctacatcacctcccgcacccagttcaacagcctgcagcagctggtggcctactactccagtgagccagcctcggagggcggagggcgggcgggcaaagcctcagctgcagactctggggaggggccttggagcctagaagggtggggacttctgttatcctgcttctctccccacttccccctcccccctcccttcctctctcctcccttttccctcctttccttgtctccttcttcttcctcttctttcccccagcccccctcctccctgtccccctctctccctgctccacgcagtgtcccactgcccgcctttctctgcagctggctggtatggagggggctgccctgaggagccccagagtaagctggaagggaggggacagaggctggtgtcatttgtctctgtagccctaggaccggtctgaaccggttgctgggagaggaggagggggcggccagatcgattgcagcaaagagggaagagagcggcagagggagctcgcggggcttgcgtgctgggtgagggctcgggcgtgggcgcagtgctgtagcccacccacctgggcatccgaagctgactgcagtgtcgggcctgtgggtgcctgtgtgcccgtgtgtctgtggcacacatggcctctgtgcacaggtgttggtccactccccaccccgagcctcctcctcctctcagcttggcctcctgacttcctctgggatcacccgccactctctgtctcttcggccaccgctgtgtagctcattctgaacccctttccctcagatcagaactctccaggggctgtcttggaatcttgggataaagacccccaccggcccctgagtggtctaatcctaactgcctccccacctccgcctggtgccacccttccccacctgctccctgcgcccctttgtcctccgcttctccagccctgcagctgttctttcctcagagcctttgctctggctgtgcccctgcctggagggctcttccctacttaacccctcaccgtcctgcacatccaagctcagttgctgcttcctccaggaagccttccaggccactcctgctgttgcgcgaacagctctccagtcacattcacatctgtggtcctgggaggtgattagggaagtggggctcctccctggactctgagttcctgagggcaggtt

SEQ ID NO: 3354 - DNA, 6000 bp, Homo sapiens
atccctgtgtggtaggagttggggggctccactgagtcagcctgcatccctcctcaacagggacctggaacggtaccaccagggtggccatcaaaaccctgaagcctggcacgatgtctccagaggccttcctgcaggaggcccaggtcatgaagaagctgaggcatgagaagctggtgcagttgtatgctgtggtttcagaggagcccatttacatcgtcacggagtacatgagcaagggtgagtcctgggcggccggggcagggggcaggggcactccggacagggcagggagcatgagcctcatttcctctcatgtctagaatgggcatcttcaaaggtggaatgcagtagagccaaattctctgttgcctgggccggagtgtggtggtgcaatcatagctcacttcagcctcaaccttccaggctcaagcagttctcccacctcagccacccaagtagctgggaccacaggtgtgtgtcaccaggcccagctaattttttattttttgtagagatgggaccctatgttgcccaggctggtctcgaactcttgggctcaaggagtcctcccacttccacctcccaaagtgctgggattacaggtgtgagccacagtaatttttaaactaattagttatttttcaaaattccactttttggaggtatagtttacatatgataaaatacaccccttttaagtgttcagttcagtgggttttaacaactggatttactgtgtacccctaaccataatgaagatatataacatctccatcacccagaaagttcctcatgccctttgcagacagtaccctccagccccaaacccaagcacccactgatttgctttctgtcattataaatttgttttgtttattctagaatttcatacatggaatcttttacatctgggatgcattgtttttttactttttacatttcaattttttattttttgagatgaggtcttgctatgttgcccaggctggagtgcagtggcgtgatcatagctcactgcagccttgacctcccaggctcaattgatcttctcatctcagcctctcaagtagctgggactacaggtgcacaacatcctgcccagctacttttttttttcgtattttttgtacagacagagacttactgtgtagctcaggctggtctcaaactattgggctcaagcgatcttcccacctcggcctcccacagtgctgggattgcaggcaggagccactgctcccggcctgagatgcatccttgttgcatctcccagcagtttgttcctgttgttgctgagcgggactccgctgtctgcattagcacagtttacctgttcacctggaggtggacttctgcttgtttcccatcctgcttgccttttgagtgacaagcactgagtgagactttattcagagatgagtttacgtaaaatctgctgtgctggttaaagcaaggccagccacctgggaggatgggttttgggaatcactgcatcctggcagagggacagggcaggagctggagctgggtctctctctgcccagggagtttgctggactttctcaagggggagacaggcaagtacctgcggctgcctcagctggtggacatggctgctcaggtgagtcagcccctcccgcctccccacacccttggtcctcaagcacccagacccatctggtgcagccagttctggcctcttgagtgccccctccaagaagcctgccttgattgcctccacactcactgatcttgccgcacgtatttaccaggtctgcttacaggtgccctgaggggtgattctgggcagcagaaggcccttacctgggcatcaggggtcactgacttactgtgggacctcgggcctcagttgtcgtctctgtaaaggtcatttagtcgcttagcagacgtgttcatgcttgctgtaggcagtggtcaacaagcctttttttttttcatttaatcctcatcacgaccaggagtgacgaggattggctgttattcccattggacggatgagaaaactgaggctcagagaggggacttgggcagcaggcaggacctggcactcatctgtgtctgggtccgctggggcctctttccctggtcacctcgctttcctggctgcatcggatctcgtgcctcccctttgacctttgccttctgccctctgctctgtgccctgtgctccctactcccgcagagcactgctcctgctttcgatgccaacagcatttactgtgaactgacctcacttgcctgaagaagtgtggggagggtggggaaggggtggttggctctccagccccagagtgctctgtggccctgggagggcatgggtggcacctgagccaggctcccacggttccgcctgcagatcgcctcaggcatggcgtacgtggagcggatgaactacgtccaccgggaccttcgtgcagccaacatcctggtgggagagaacctggtgtgcaaagtggcggactttgggctggctcggctcattgaagacaatgagtacacggcgcggcaaggtgggcaggggctgtgtggtatgtcgcgcttggcctgggacaggtcacgtcccgctctgagccccagttttttcctcagctgtcattcctcatggtgcttatctaacagagcggtcatgacaggaggtcagagctgccctgacctttctcgttcctgcaggtgccaaattccccatcaagtggacggctccagaagctgccctctatggccgcttcaccatcaagtcggacgtgtggtccttcgggatcctgctgactgagctcaccacaaagggacgggtgccctaccctggtaagaaggtcctcatggcctgtctgtggtccctgaatccctctgccctggtggccttgggcaagtcatgactcctgctgggcctgtttccccacccgtaaaacaaagaagttgagcgtctgatgttaggctctctcgatggtccatgctctcagcttcggggacaggacttatctatggtcactcccaacctgtcctaggcaggaagccctcgctgccctccccatcagcttcccccaccccactttcctcaccggagccgggctccccatgcctcgctctgcccacagggatggtgaaccgcgaggtgctggaccaggtggagcggggctaccggatgccctgcccgccggagtgtcccgagtccctgcacgacctcatgtgccagtgctggcggaaggagcctgaggagcggcccaccttcgagtacctgcaggccttcctggaggactacttcacgtccaccgagccccagtaccagcccggggagaacctctaggcacaggcgggcccagaccggcttctcggcttggatcctgggctgggtggcccctgtctcggggcttgccccactctgcctgcctgctgttggtcctctctctgtggggctgaattgccaggggcgaggcccttcctctttggtggcatggaaggggcttctggacctagggtggcctgagagggcggtgggtatgcgagaccagcacggtgactctgtccagctcccgctgtggccgcacgcctctccctgcactccctcctggagctctgtgggtctctggaagaggaaccaggagaagggctggggccggggctgagggtgcccttttccagcctcagcctactccgctcactgaactccttccccacttctgtgccacccccggtctatgtcgagagctggccaaagagcctttccaaagaggagcgatgggcccctggccccgcctgcctgccaccctgccccttgccatccattctggaaacacctgtaggcagaggctgccgagacagaccctctgccgctgcttccaggctgggcagcacaaggccttgcctggcctgatgatggtgggtgggtgggatgagtaccccctcaaaccctgccctccttagacctgagggacccttcgagatcatcacttccttgcccccatttcacccatggggagacagttgagagcggggatgtgacatgcccaaggccacggagcagttcagagtggaggcgggcttggaacccggtgctccctctgtcatcctcaggaaccaacaattcgtcggaggcatcatggaaagactgggacagcccaggaaacaaggggtctgaggatgcattcgagatggcagattcccactgccgctgcccgctcagcccagctgttgggaacagcatggaggcagatgtggggctgagctggggaatcagggtaaaaggtgcaggtgtggagagagaggcttcaatcggcttgtgggtgatgtttgaccttcagagccagccggctatgaaagggagcgagcccctcggctctggaggcaatcaagcagacatagaagagccaagagtccaggaggccctggtcctggcctccttccccgtactttgtcccgtggcatttcaattcctggccctgttctcctccccaagtcggcaccctttaactcatgaggagggaaaagagtgcctaagcgggggtgaaagaggacgtgttacccactgccatgcaccaggactggctgtgtaaccttgggtggcccctgctgtctctctgggctgcagagtctgccccacatgtggccatggcctctgcaactgctcagctctggtccaggccctgtggcaggacacacatggtgagcctagccctgggacatcaggagactgggctctggctctgttcggcctttgggtgtgtggtggattctccctgggcctcagtgtgcccatctgtaaaggggcagctgacagtttgtggcatcttgccaagggtccctgtgtgtgtgtatgtgtgtgcatgtgtgcgtgtctccatgtgcgtccatatttaacatgtaaaaatgtcccccccgctccgtcccccaaacatgttgtacatttcaccatggccccctcatcatagcaataacattcccactgccaggggttcttgagccagccaggccctgccagtggggaaggaggccaagcagtgcctgcctatgaaatttcaacttttcctttcatacgtctttattacccaagtcttctcccgtccattccagtcaaatctgggctcactcaccccagcgagctctcaaatccctctccaactgcctaaggccctttgtgtaaggtgtcttaatactgtcctttttttttttttaacagtgttttgtagatttcagatgactatgcagaggcctgggggacccctggctctgggccgggcctggggctccgaaattccaaggcccagacttgcggggggtgggggggtatccagaattggttgtaaatactttgcatattgtctgattaaacacaaacagacctcagaatctgatcaacagtttattgaacatctactgtgtgctggaaagcgagatggggcggaatgcgagaacaaactaccccttgaggggtctttgggcagcactagtagctggagggcttcaggccaaggcaggggtgacatcagattggagacagctacggcagaatgtggctgtttgtgaacatctgcacctgtgttagggggtgagcacctgggagaaggacaaggcacatcacaggacttccctgagcatgacaagttcaggactcaaatgtccgtggtggatggtagcagtgacattggggagtgggtggggctgtcaagcctgcctagaggagatcacaaatacacgacgagaataccgttgtgtgtgctcttcgtgtgtttcctaggagtgcagggcaggggtgctgggtcgatccacaaaagtcctgaaaacgctgaagaaaaatccaaagacccttcccctcctccctccttccccaccaccgaagcacacagtcttgaaggttgatttgcaaccgtctatacaaacacatttattttacacaaatatacatcagatcacacacctgtgcaccggagtcaactctggccacgacattgcttaattaaaaacaaatttcaaaaactggacatt

SEQ ID NO: 3355 - DNA, 6000 bp, Homo sapiens
gagttggagaccagcctggccaacatggtgaaaccccgtctctactaaaaatacaaaaattagctgaatgtggtggtgtgtgcctttaatctcagctacttgggaggctgaggcaggagaatcgattgaacccaggaggtggaggttgcagtgagccgagattacgccactgcactccaggctccagcctgggcaacagagtgagactccatctcaaaaaataaaataaaacaaaccaacaacaacaacaaaaacaacaaaacaaaaaggtgaatgacaaaaggctttgcaactccctgtacaaatgagagtgactattatcaaatatcccatctgtgttggaagcaatactgcccagtggttatctaatgcaggcttgtccatcagaaatagaatgtgaggcacatgtgtaatttaaaattatttattggtcacattagaacacagtaaaaaaaaacagtgaaatagttttaataataatttcctacccctaagtgtgtgtgtgtgctcgcgtgcacatttctgcatgtattggggtgttgtccctggtccccaggagagacagccaggatcttcacagtcagtgtaactctggctccctactgggaccctctgaatcttttggttgcctaaagaccaccaggacccagaaacccaagaatacctttttagaagcactgggttggaatctgacagcggttgtatggggcaagggaaagtggaagtgatagctgcctttgggaagaggaaaaggaagagtaagggcaaaaaacagaaacaaaaatcccccagaaaaccctcctgtctctttttgggttccatagaccttgggaggatcccacggaatgggagcaacataatacttttccactgagcctcacaaaaggtggcagagacctgagggctccttggaaaagacaggtgacactacatctgggtgatgcaaaggcagaagtcaagctcctgcggcaggcgggaggtgggggtcccctgattcaggaccctccctggcagaacttgcctctgaggcccttgagaccactggcctctgcttagcgactccgcatagtacgatccggagcccaccgagctttgaagctggaagtttcccgctcccgcatcccgcgtgctgctgcgcctctccaccaacacacacgcgcgcgcaaacagcacacgcacgaacacacccctcccgcacgcctccaacagcacccatgcgtgcacagagacgcctcctcgctcaccaaccacctgcaaccctcagggaaataacgccgaaggtgaacggcgcaccttcgggctgaatgaggatgccaggaatgccgctctggtttccaggcgtacgggaggacacgccgccgggcctctctggagttattccctcggctgagtgggggccaacgagggcagcgcggcaaacctcacacctggcggctggctgtgggctccacgctcccttagggaataacctcttctcttactcctaccccgaatgctccaaggctctgcagcggctcggaccctgcagagcttcctccatcaccatttgtagctaaagaatcccgaggcggtgcgtcccagaggcatagcctctggcccaacctggcgtgggtagagaggaggtcactcttgggtaaacaccttaaatgggagttttggcaacaagctgttcactagaggggctgtggctgccgcaaaatccccgactttccttcagtgtgccttgggactccgtgcatttccttcagtgtgccttgggactccgtgcactgctcgcgtgtctcctggcctccctttacttctcctcgacccttcacttcttccaccgttccttcttttactttttttctttgagcgtgtcggactcccagtcaataggtatacagcagcaatccctcaccctcctcacctcaaccctgcctacgttttagggatagggtgaagactgcgggcactgctgtgtatccatgacggggagccgagcctggcatgctgatccagagaccccagagatgagaagcggcatcccgcgacagcagtcggaagttggaggctatagggcctggggctccaagtcagcgcagcagtaaccggggtgggggaggccaggccacgaagtggggccggctgcgcagcagcggccttaactcctcggccacctgcatgtctccgtcattcacccacagcctggcaggggtagggctgtttccaacatttttttttggtggggtaggttgtggggtgtgcagaggagggagtggctaagctgggagaggggcagagaaacggatttgggtggggaagtgagcctggggatggacagagataccacagtcaaagcccaggcgaagggagtgaccacaacagagacagaggcacagggacaaagaagagcgcggttgcccaaagcccgagtccaagagaccctgagtcggaggcaggccgcccgcaggagaagaggaggttcggaaccgcagacctggggcctcaggaatccccagggccttaatgggccacggaagtcttcgacggccagtgtcaggcagagccgaggggacgtatgggcgggggtggagtgggtcacagcttggcctgtccatcttggtgcccgcgcagaagtccacagtggcagaaacactctgggagccacaggtctcttaggaccctgagggagggtgctaccagctctagtccagtcgggaccaagagagtcaggcgtgcttgtcccgccctggccgcctgaggccggagccatacatagtctgcacagatccgagacacccggtcccgagtgatctggaaacgagtgtgctctcactgcgttcaaacaagacgaggacatttacaaggtgcgagtccccaacccccagctactggcaggggctgcgcagcggcaccgcccaggctctctctccaggcggccgactcatttctgcggagagcacgcttctcgaagagggttgtagacgcgctcttccagcatttaatttgccaccccacaagattgagttaagttttagttaaaatacactcattttattaaaaataggcggcccaataccacgccgtaccccagcctctccgagggcgcaagagaatagagagttttcagattaattggaggcaaatattttaccttctaacatttaaaaataatctaggcgcgtctgcaccggtgtggctcacgcgacccctacgcgcgaggtcagtcgggctggtccagcgcagacagcggccgggactcactcacccagtgcgcgcctctcctgcctttcgctgcgcgcgcccaaagctagaaagaagaaggtgacgcgggaggcgggtcgggtctccgggtccagcgaattcgcgatctatccggtttcggcgcctgagccgaggtctcagaaagaacccgttaattctagccatcctggatctgggtagggagggtgcgcggctcccaagcccagtctggatgcctagtgcggtgtgcttcggtctccccgtctgccctccggggaggtttctcacccggtggccctgggccgcttcactgtggcgcttccacttttggctaccggccttcctccgcccaggaccttccggcccagggagcagccgacgggcacccccgaacgctggggcacggaatttcaacggggcgaccagagcggagctcgcggctcgaggctcgcggctgagtacgaagacgggacccgaggacctgtacatcgctcgaggggaacctgtcctgggctctggtgcacacatagtatgcgttctgggctggcttgggttgggccaggtaggggagacctggctgggtacgaggcgccgtccaagccttccggccgtgggccgggcggtcgcggcgcctttgcgcacagtggccacttggggtcgcactttatgcctgtttgagcctctccgcggcgggctgacgccgggatctgcttaatcgttacaaaacgttcaaacaaaaacagggccggctccccagcagtggagagctactcggagcaccgtcccgggccggcctcggccccgaggctccgggggctcaggattccgtgcgtgtggcggggaagaggaattcagagcctttgggctgctgcttttcccgtcgccttcactgtgaacattgtgcggtggggtgaacgcggggagcggcggggccagtggagtcgaacctcagggctctgcgactgcacccgccaggaggggccctcgcttggcctgagaaaggtcccctgaggttaagagttgggtctgaacacaactctcggagcctcgagcccgccctccccaacatacaaatacgcgcagatctccagaaacaggaacgcacgacacacacggccagaagccgcgaggacacacagagcgtcgcccactgggcgggggccgcttgggaacaaagggcccaggaggcgttgtcccggcgctcattctgagcctccttgggggtgacacgggatgggggtggggtgcaaagggaactgagggaggagagtgcgcgaggaggggaaagcggtgatttggcctagaggtggggcgcgcactccaggcgagcgtgcgtgggccgggacctgcagggtacgggggtgggcccaggctggccgtcccactccgctccagcgctccgccaggcctccgccgctccggggccgctcgggccgccagtcagctgacgcggggggcgggggagctgtcaggcgcgccccgccctgcgccgctgggccgcggaggccgtgcagctattggcccgcgcaccgggccgcccgggcccccgcaccccagtgacatcaggaggcgataaaaggctgcggcgccgccggatccagcacagctgcaccgccgagctgcgagcggctgcgagcgagagagcgtaagagcaagagagctagagagcgagcaacgggcactcgccccacgcctcccctcagccccaccgcgcgctccgcttgcctctccaccccgcccgactctacccggcccggtccctgcgcgggcacagcccagagctctggggcggtgcaggcagcctcgggactctccggcgcgccgccgcgtccccagacaaaggcttggccggcggccccggcccgctgcgccctcgctccccgcctccccagctcttctccgctcttcccccccgcgcttggctcggcgcgctccggccggccgcaaagtttcccgggcggcagcggcggctgcgcctcgcttcagcgatggccgcggagctgagcatggggccagagctgcccaccagcccgctggccatggagtatgtcaacgacttcgacctgctcaagttcgacgtgaagaaggagccactggggcgcgcggagcgtccgggcaggccctgcacacgcctgcagccagccggctcggtgtcctccacaccgctcagcactccgtgtagctccgtgccctcgtcgcccagcttcagcccgaccgaacagaagacacacctcgaggatctgtactggatggcgagcaactaccagcagatgaaccccgaggcgctcaacctgacgcccgaggacgcggtggaagcgctcatcggctcgcacccagtgccacagccgctgcaaagcttcgacagctttcgcggcgctcaccaccaccaccatcaccaccaccctcacccgcaccacgcgtacccgggcgccggcgtggcccacgacgagctgggcccgcacgctcacccgcaccatcaccatcatcaccaagcgtcgccgccgccgtccagcgccgctagcccggcgcaacagctgcccactagccaccccgggcccgggccgcacgcgacggcctcggcgacggcggcgggcggcaacggcagcgtggaggaccgcttctccgacgaccagctcgtgtccatgtccgtgcgcgagctgaaccgccacctgcggggcttcaccaaggacgaggtgatccgcctgaagcagaagcggcggaccctgaagaaccggggctacgcccagtcttgcaggtataaacgcgtccagcaga

SEQ ID NO: 3356 - DNA, 6000 bp, Homo sapiens
cccacatgtgccagacagacactgttgaactgttttcatgtatagcctcattgaatcggcacagttatcctgaagacaattatccatgcccaacctcatgaataaggaaatggagactctttggagtctgagggcccagcttgaggtcacccacctaggacattatgggccagtgttttgaggtggtaagagtcaccattacccttatcaaggccaggatgggatacctcactccctgcatagctttctgacctcctgagcaagccatatttttatttgttggtatgagaaaccacaaaccctgtcctggccccaggacacatacacctcctggatgcttttacagatgtccagcagatgctggataaccacaagtgaagtggagtggagtgaggagtcccagttagagagctcaagaaggtagttcatgttatttactcaatcatttactcattcattcattcattctgcaaacacaaattgagttcttattatgtacttaacactggagatataacatggagcttagagtctagagtctcaaagtctggtccctggaccagcagcggcatgtgagaacttttagaaatgcaaattctcaggccccacagcagacctattgagtcagaagctctgggaggtgaggcccggcaatctatgtcttagcaagcctccacgtgattctgatgttaaggtttgagaacaactacactcaagggcacataagacgacaggttgtgataacaattgggacagaggtacttgacagcttggggctctgactgttgtaaacagagcccagaattgcatagagatgtccttgtcacttccatcatgtctgggcatctggtcttttcttgccccccagactatgcaaaaagtgactcacagcctaatttagcctgggtaccctggtcttgctaggagcccaaggatgccttgtgggactatggtggggacagctgacaggaagagagtcaactgggcctcaaaatagcaagttccttcttaggtcatatctccccttcattgaggaaggatatttgtaagtcaaccagaatttgcaataatcaatgtttcagtttggtggcataaaaaactgggcatggggtttgagaaatacttgggatgatagttcacaaattttagtgtgcaaacaaatcttacagggagtttgtcaaacagactgccaggccacacaaccagatgagtctggcagatctcggggatgcccagaatcatataagccccgggttgatctcagggcaggtggttggaggaagacccttggtgaaatgtagtcttgtgagatatgctcacaggggccaactctcagcttgagctacatgcccaggcttctaacccgaccacccctggattctggacacctggagacacgtttgtggttcagtacggttttctcggaagctgatgagtaactattctcatcttatgggtgatatcagggattagaaaggactttagcttggctggggagcggttaatagccctttatgcagcagaaaaacaatgaaggcattctcgttttataaaagtcgctttgaaatctaattagaatatgaaagttgagatcttagtctatttttaagcagagcatgagttcagcaggaataatcaatgctgaagctgtgagccgcccgtcagcctttcactggggcaggcaacaagcttccttctggaagtgtccttggtaacgggacaagtagatagagaagtaagggacaagaatcagagacagatgagggctctacctatgcgggaacagctaggggcagagatggggaaggccgtgaaatctccagaccctctcaaatgtcccctctgacacacctgaaggcaaagagtgggtagctaatgtgtggttggtgtgtggactcctctgttggattagaggaagcaaatacatcttattttgactgtcaaggatagctgtgggggtggttttgcaaaaaaatgaattgttggaggcagatcctaaattgaagctcagccctgctcactgactgtgtgatttggcaaatcttgaaatctttctaagcctcagttttcccatctgtaaaatgatggtactaatactgaccttaggaatgcttaaatgaaattataatagcaatcatagctaatatatattgagcatttactatgtgctttatgtgcacacattatttcagttggtctttacaacaatcctatgaggtttagggaggtagagggacttgccttattaatgcaaggaaagcattcaggatagtgtctggtacagaatagatactcaattaatattcatttcctttccccctcccaggggaagttaaggaggctcatttttggagaactgagaactctctgctgcatttccccagcaggcagtgacagccaattgcttaagtctcctgagccatagcaagggttgcaaaatcactggtggggtatttctgatcctgggactgtcaaaggcatagcaggcagatttgttggcacctgcatgagccagattgcatagaacccagagacactcatgtgacaactgtggggacttgtcccaggaacatcccacccagatttgccttccttgaagaaaagtaatgcaaaaggccatttttcacttttaaatagctttcattctacgtcttaataaatgcacgtttgttgatttgtgtaagcatgatgtgggaagtctgcaaatggatgtaatctgcacccagggcacatgtaagcaccagcaagcacttttgaataatgaatccctcccgtaaaagacggacgctattcataataattccttgcttttctcattttgctgcgtacagtagcgattaatcaatttgcaatgttatgtcacccgcaacaaattgctagcaccaagacaaatttattgctttatgataaaagaacttgtttaggtagaaataaattaaatttgggggcttgtgatttgggtttgatgttcatatagatgacccatggagagtgggctggggaggtgagaggtccaggtgattcctgccttgacctggcacccaggagaggcgtacaaatgcaagagggtgtttgctcagttacggacccagagacagtgcagctctgatgggagagagtaatgccgagagcttgcggtagttctcgggaacgtctgccgggctctccgtgtcagtcagtgtaatttacagcttttaacagagagatatggacaatcagcagtgctcaagggaagtaaccctcttctccttctaggcttctcctgaatcctaagatcccaatttacctcaaagtgacagtgaaaggaacctacatgataagaactgggaatgaggatcagaggttagagggtcagagaggtcctgattcctttatttatctatgcttctggaatattaaatatcacagaaaaagaggcgcaaatggtattatcaaaattgtggtgtaataaatattacatttagccaatgaatgcttttaacacacgcacacaatttaattctgtataattattgccgacactgtcaaatcttcaatttgaggcctttcctggttaaaaaaaaaaaaaagctggactgaatggatgttgtggtcccggccatggcaagggggatttggggacatgcattcccattcctctatatcagattagtaggaaagcagctcagggaagcactttgcctgaggacccagaatcagggggtgtcacagtagcactgggcttccaggacgccacacacgtttgtcattaatttatactccattaatttggaatctgcagtggaatcaagggtggatgcattaattctgccctctcccaatacacacacacacacacacacacacacacacacacacacacacatcactctcaggaccagggctttttcttaagccatctgatagtctaaatgatttgtgaaaagcaggtttcagttaggaacaacatcagttccattgcccatggaaatggatttctctgccccagctcatcaaaatccattcctttctgttcttaaagcaggccctgggatcacctccctaaatgccttgatacaccctgtccaactgccagggagagagccccagtgaaattttagggccatggactctgtcatcctagtctggtttcagcctcgagggaggggggtgtgaaggcctgctgcctgcagaggcttctgcagcctttctacaggatctgggcaatctcttggccgctctgaaacccgacgtccacatccagagcttcgtgaacaatgcggggcagagcactgaagccctctggcagcaccctttccactgccttgtggccaggggggcccacggcagcctccgagggtgctggactcacctgatgacggcttcttttattgtcttcccttctgcctgcttgctgggctccagccagcccaagttccctcatgcgcctgtctgggcctgcccaatccgtggccacctcctcagctggtcctgcacaggctccaaccctgttggggttgcatatcccctgtttgtgctgcccgccagctggctaattctgattatttctccttctccttgctctcttgggcgcctttattcctgattgtgcattttctctggactcaggattaaaaaaacccacgctgctgatatccttgtcagccttttcctgaatcattgctgtgcagctccagggagccacgggccggtgccttctgaccggcagactccgtccatgggccttcctgtccttggggtcctggagctctctgtctgagcctccttggccactgaagcaacacccagaggcctgcatcctctaagaaatgccagccagggttgcagatggagccaagaattgaaaatctggccgagtctttccatctcacaggtgatttctctcaagcaccagataatttttaaattttgaagtgcttttctccacgtgatctcatttgctgttattgtccctgttttacagatgagcaagctgaacctcagagggcttagtgatgtggttgaggcacagccaccaaggatcaatgactgaggtatgggggaaataatcatttctacctgacagatgaggaaactgaggctcacgttgctcaaagggcttgtcccaaatcatacagcagtaagaggtggtgatagaagtgggtttcaggcactgcagcctccaggccagaggtacagagtcaagctcggttgcccacaccagccctggtcacaggggcagtacccaactctggacagggttctgttctgcattgtgcataaaaaatcaggtcagtccagcagggaaacacccaccaggcagtattcaagagccccaagtccaggagtcagaggtggccaggggctgtcctggttactcccatctcctcctatgaacacagggcttggtggggggtttgtgtttgtatttcgggggaagaggctggttaactcctcagcccatcatgctgcttggcctgtctcaaactgctctggggacgacagaataaatatgactgggtggtaacaggggtttccacacattatggttcaggtccagcccatgagagactcaggaggaaggttccatgtagcaaatgccccttcgtccaggcagcccttcctgactcttcaagacagagcagatccttccttcccggtcccccggaacctacttctgtgaatcatgacattcccactgatgggaccaactgttcccccatcatccttcacctcagctgagtcataggcacaaagacctccatgggtccatagatgctagtcctgggaccagccatggtcactcatacacatgcccacccaccctcatcctcacagagagacacaactgcagagagacactgtcccacacatcactctcagatgctgtgtgggcacatacgtgcacatgcacacacacacactcacacacacccctgcagacaagcacagacccacttagagacaaagtctgtccatgtctatgcatagacagacatctgttcctacacccggtattct

SEQ ID NO: 3357 - DNA, 6000 bp, Homo sapiens
tcatttctggctggtcgcagtggctcatgcctgtaatcccagcattttgggaggccaaggcaggcagattacctgaggtcaggtgtttgagaacagcctggccaacatggtgaaaccctgtctctactcaaaatacaaaaattagcttggcattgtggcgggcagattcccaaatgtgcgcctatagtcccaactatatgggaggctgaggcaggagaatcgcttcaacatgggaggcagaggttgcagtgagccgagatcgtgtcattacaatccagcctgggtaatagagagagactcagtctcaaaaaaaaaaaaagaaaaagaataaatcatttcctgtacactagtcataatgtagcttcttgtaggtaaggtctacgaggacagaagtccattttgtctagatcggggtcagcaaacttgctctgaaaagtaccagatagcaaatatttttgggtttgtggcccatcaaggcttagttgcaactattcaagttggtcattgtagccccaaagcagcaagacagtaagtaaataattgggtgtgactgtttcagtaactctttatttacaaaagcaggaggcgggcaaaaaggccacagtttgcccacccctggtctaggcaccagcacccagtctagcacctggcatatagcaggcactctatgaataaagaaaactaccaagaaaaggccatttgactttggctattagatggaaactggtaccaggggaaggtggttttagtggcatggcagggaggagctgagatgacggagggctgaagagtgagcagcagttgcggaagtggtaacttctctttcaggagttccaccatctgagcagtaggttggggaatgggtgctcttgtggtggagtggggtggattcggaacctgtgtgcaggctatgacaagatgatagggctgaggaagaaacagggtaactcatgaagaggtggggctccagagctcaggggcatgtttggggttggtcacaaaggaggaagccaccttctaaaactgaggaaaaagaaacaaaaaaaggcagaagaaagaaaatgaggagaaagccttgtatgctattttccctgtgaaaatgtgagccaaatctcctggtgcagagagtggactagaggcagctcaggagccacaggcatctggcagattgggagctactggcaaaaagggaacagtggacactcaggatggggcgtgcctcaccaagatgcatgaagctacacccttcacttttctctcttcttatttgagagagcacttctagccaaggtggtgtctgggtgtcttgtggattttaggttttcagctctgactcagtgtgaagtgtatcactcactgaatcaccagcagtacttgctgtcacttcccaacacttcactttcccatgcaggtagggacaggcaggccctgagaaggatggggtcatgttttacatgtgtcatacccagctctttcttaaaggacacggaaaagcattttaattgcagaaacttattggtgaatttcatccccatgccttcaaatgtgtaggagacccacagggtttaaaaaagcagataggcggccaggcacggtggctcacgcctgtaatctcagcactttgggaggccaaggcaggcggatcacgaggtcaggagagagagaccatcctggctaatacatgaaaccccgtctctactaaaaatacaaaaaaaaattagccaggcatggtggtgggtgcctgtagtcccagctactcgggaggctgaggcaggagaatggcgtgaatccaggaggcggagcttgcagtgagccaagatcgcgccactgcactccagcctgggcaacagagcgagactccacctcaaaaaaaaaaaaaaaaaaaaaaaaaaaaaaaaaagaaaaccagccggagtaacatggtgcaactctatctctactaaaaaatacaaaatttagccaggtgtgatagtgtgcatctgtgatctcagctacctgaggtggaaggatgacttgagcccaggagattgaggctgcagtgagccatgattgtgccactgcactccagcctgggtgaaaaaaaaaaaaaaaaagcagacaaaaaatattgaacacataggcgaggtgtggcagctcatgcctgtaaccccagcactttgagaggttgaggtgggcagatcacctgaggttaggagttcgagaccagcatggcaaacacggtgagaccttgtctctactaaaaatacaaaattagctgggcatggtggtgggcgcccataattccagctactcaggaggctgaggcaggagaatcgcttgaacccgggaggcagaggttgcagtgagccaagattgcgccattgcaccgcagcctgggcaaaaagagcgaaactctgtctcaaaaaaatccataaataacctctgacagcaggagctcataatttctcaggggacaatcttatggcagtttctctcctgggctgtaaaatatttctctattagtcaaagaatgatctgcatggagcacaaaggccaattttatcctaatgatggataacatagattttttctttaaatgctggaaaccatttgagggtttgatgattaaaactagagcacagcacctatttagttttataaggttaacataatattaaagcctataaaacacaacttcttatgtagtcaaaggattagtattgcaaaatgaaaagttttcttatagcgtcaaaaacatatgaacaatcaactttacttatccatagaaccagagaactgaaaaaaccttccatttcaatatgaatttattaatttattattactaccagtacaggaatgtgtaagggttcagatctcaacctactactttcaggaaggacaaaaaccatttaaatgtcttttacttgatatgcctgaaagaatagcaccaggatctattttcatctgccttatttcaaggtgtaattgctgttgatatttatagaccgaagcttctgtgtctgttctaataattagtagaactccaattcatatttgcattttgaagttctcacccccaacaagtccgaagataattttcctaaaatacacagatcctcactggactctttcaagtccttccagagatgatgcgaaccagcgactcagaattcaatgactacaaagcgcagggcctacacctgtaacacactatgtatttggaaggattttcaatgcacctttagatgtgtatcaaataaaagtctcttaccctattgttgggttgatgtttggatcaaaactgtcttccacaaaccgccacacaatactcgatttacctacacctgtatcctgaaagagaacgagatgagggactgagaaaaagtttaccttttggcagacaccaaaaactactttgtggcataagttcaggattttagaaaaatcaccctagacgtgtaaattttataaacggaggaacacaaaagcggttgtcataaaaattcagtagagtaattaggaaattccaactgtactaaaagggagaggtttttgccgttaagacagattaggaccttttgagagacccaaagtttctgcttcgtgtaaaaagtaacaagtccacttgctttttaacatatgttagtaaactttgaactcctgagttacctctgagtaatccctgatgaatcctagccccaccctatttgggggaataaagattagttattggagttcctgccgatctttaaggcagaaactctggaatgacagcatcaatttcagaaagaaggctttgaaatggccaacaccttgtctttcctgacaagacaggaagctgaagcttcaaactagtctttggggcttcctgatttgaacaccccttttctccacaggaagagttacttggcaaagtaactctttggacaagtggcaggggtatcccacaagttcaaaaacacccaagagacaaagtaggctaatgctgcttgtaaaacctaaagacctgttattggttttactttggaagacttggccaactcccaactaataccttggtaagttgggagaaaactatttaagaacctctcttaacccagatgcaatagagaggcaagggggggctgtttgctctttgtggggcgggaagagtccacgggctccagggaggggaaggggaagggtcccttcggcctccaggaccttttcgagagtgcaagaggtgggcgggacggctcccgagctggagggagggtccacggggctggcagacagcgtcttggacgtgggaggggggaagggatgaggggacaggggggatccggggtccccgccagcccagcctcccgtggccctcccggccggacccgccgccactcaccccgagcagacacactttgagctccctcagcgccatggcccgggagccaggggcgcgggcccgccgccgccctaagttgagaagggagaggccaggcccagcaagagcatcccctggcgccgctgccgccgcacggcccagccccggtccgcgcagaggcggctgccgcccgtcctccggccgtaggtccggcctgtccgctgccagccgcgtggggcccgccttagcagccgggacgccgccgcggccttccgggagccgccgccgccgccatcttgggacgccggccgcgtcacctgacctccccgcccacctcggcagccaccttcgctgagagggcggggccggccggccggcgcggatcgggggcggggcccgaagccgacggccccgcccctgtctgcagggccccgcccctgtctgcagggccccgcccctgtctgcagggccccgcccctgtctgcagggccccgcccctgtctgcagggccccgcccctgtctgcagggccccgcccctgtctgcagggccccgcccctgtctgcagggccccgcccctgccggtcccgcctccatgcccatcccaagatggcgggtgagtggggctgggctcgggggatgccaggggtgcccctctctctctcgccccgtgaccaccccgcgaggccgaggggcccctgcccgaccccgtcccctctcgccgcagccccctggtaacttcttgtgtgtttcttggttttcagagatccccctgtactttgtggacttgcaggatgacttagacgactgtaagtaagagttggggcacccctgtccctccctgggaccctctcaaagaattcagagtgcacgaagcgcggggcgggggaacctcaagccaggcactccttgtcgggaccagaacagcgggacccccaactgcctagatccactggtggcggtccctcctccctgggcggggcgggctgagggtgggagcccttcccttccctcgggggaaggatttttgttgttggggaaactttggactccctgtcacttcttttcttcctgcgcctgcagctgccgtgggatgggcggagggggtagtcccaagtcctagtcgaccctgggcgggcggggggtccgccacctgggaggtgggtgacttccctctcagggccttgcccttttcctagggactttttaggactgctggggggtttgggaggtccccctctcggtgtggccggtcacggagttgcacggacttctcaagtgtcctggccacaagcccggctccatctcttatcccatggagcccattggcccccgcatttcttgggtgggacccttgtcccttcttgccctcttttttggaatcatgttaagggctggtagctgggggaggtgtcatcttagaaatccaagttcgcatttctggtgaaggaaggaagcgttttctctcctgtcaagaaacttactgagcagctatttgctctgggggccacgtgttgggctccgaacctgcaaggatgtgttgaaaacagctctacacgcagggagctcacagggtgtggggagagcctacttgtaaacagaaaattaccgagcaccggagtgcttgctggtgaagaagccctatataaatcatccaaatag

SEQ ID NO: 3358 - DNA, 6000 bp, Homo sapiens
cacccaacaaaataattattaatattatctaatacccagtccaactcaattttccctgtctcaataatgtatttttatagttgatttgttcaactaaagatccaaatatgaccacatattgtcttatgttgataggtctcttaggtctctttacatttgcaataggctcccctcattttttattcaccagctctctttacatttgcaataggcgcccctcattttttactcacccatccctgacacacatttaaattctaattggccaagcaaaccttatcaacaataacacctcttcagcctccatatgctataagcaaaactagacattcataggcctgcagctgcttaggcatagacatacagctccaccttccatgtgtaattcaacatggaaaccaatatgtcaggccatcccacacactttccgctttcaagagaagaaatttagattgcttcagcaagccaattctctgaaatgaaatctcttctgtgctgcaatggcctgaagactctgaatgatttaaaaaataagacatccattcattatggctcccttttgaaattagccaaacataatcaagaatcacaaagtaaatcagacaaaagcctcataattcgttatcgttaacattaacaacattaattgagcacctagataatgcgagacattggattatagaaaggatggcctgtgtccctaccccaagggacctacagtctaaataggcatcgcatcatttagacacaaatgccccaggaggacaacagtcacagtaccacccaaactgacatccatctcctatcccctaggttaagaatatttatgagattgatccatgtggtggaataaaaagaaaagagcagaccaggcgcggtggctcacacctgtaatcccagcactttgggaggccgaggcgggcagatcacgaggtcaggagatcgagaccatcctggccaacatggtgaaacgccgtctctactaaaaatacaaaaaattagtcaggcgtgttggcgggcgcctgtagtcccagctactcgggaggctgaggcaggagtatggcgtgaacccaggtggcggagcttgcagtgagccaagatcacgccactgcactccagcctgggcgacagagtgagattctgtctcaaaaaaagaagaaaagagcagaaggaaccgcatttgactgtgaattccaccattcatgagctgtgccacaatggataagttactcaacctgattctcagttttctcatctgttaagaggaataatcccacctacctcacagagtagcagctgttaacattgaatcataagctcttacataaaaatccagcaaagatgatgatgatgataaaatcactgaatactttacaaagcactagactagaatgttttctggctatccatctaaccctcacaccagtcctatgaagcagctcccattctcatgccattttccaaagaattgaacagaatggatgagtggtccacccaacgtaacacagctacaggtgtgagagagccaggatgtagaggataaaacttcagggttctttctgccaataatggtatgataatacctcccaatactaccatggggaggtgtaggggtagaagcagggcgacacgaatgagcatgccctcccgtacagatcaattatgttataaactcctaaggtacagcactccacagctcctacccttgcccaaacaggaagcccccaagaggctgccaaggttgtcctacccaaggtgtggttaagttcagagccataacggtggtttccttcctcattggggcaagtcttcagctgtctgctgaagagtacttaagtctttataatcacaagtctcaaacacctaacatttgttcaaatatttgtccaaagtaagatcataattttttcctatataattccttacttccttttttgtacatacataggtgaaaaaggactgaaggaggggagccgtcagaaaagaggtgcaactaccctgtggccactatactgtgagaaggctgacctagccaagtggaaagggcacctcgcggagaactgaagtcctggccaacagccaggacctatgccacccacataagtgacatcatttcggacttccccaactgaaaccacattaagcagaagcaccacccagtctactcacagatttgtgggaaatcaaatgctgttggtttaagccattgagttttggggtggttagataactgaagcagctagaaaatagctttccagtcagaccaaataccacatctatgaatgacaagcaccatcatggcaactaaacattgtttatccgttgtatcaacggaaatgatacaactccttcaatctgagcatgcccatcggctgaaacattcagctgggtaaacctggatctatactgtaccaggctcaacagtgttaaataactactaataatgatcacatgaataacggtaacagcagccattatttaccaactgtttattacatactaggcattgtgctaaatcctttattcatttaatcccttataaaagccttttgaggtgggccactataatgcccattttactgatgaggtcgctgaggcatagagtggtacagcgacttgcctgggatcacactgacagtaaacagtgatacgggatttcactcttggccatctgattccacagacaccgggctcttaactatcagcttgctttaccccttcaaaagtgttatgctactttaacaaaactgccccttgttggtttgttttgttttgttttgtttttttgagacggagtcactctgtcgcccaggctggagtgcagtggcgttcactgcaacctctgcctcccaggttcaagcaattctcctgcctcagcctcccgggcagctaagattagagacgcgcgccaccaagcccggctaatttttgtatttttagtagagacagggtttcaccatgttggccaggctggactcaagtgatctgcccgtctctgcctcccaaagtgcggggattacaggcctgagccaccgcacccagccgaaactgcgccttctgagttaatgtgtgtaaagagtttaagactgggccgggcgtggtggctcacgccagtaatcccaacactttgggaggccgaggtgggcggatcacgaggtcaggagatcgagaccatcctggctaacagagtgaaaccccttctctactaaaaatacaaaaaattagccgggagtggtggcgggcgcctatagtcccagctacttgggaggctgaggcaggaaaatggcgtgaacccaggaggtggagcttgcagtgagccgagatcgtgccactgtactccagcctgggctacagagcaagactacgtctcaaaaaaaaaaaaaaaaaaaaaagagtttaacgctgtctggtccatggtaagttttcagtaaacaccaactcttactattaggaaacctgaagatgtggaatgaaagatgagaggaagtactgtatatgactggcgtacagtacgcccccaattaatgttagctatttggatgatttatatagggcttcttcaccagcaagcactccggtgctcggtaattttctgtttacaagtaggctctccccacaccctgtgagctccctgcgtgtagagctgttttcaacacatccttgcaggttcggagcccaacacgtggcccccagagcaaatagctgctcagtaagtttcttgacaggagagaaaacgcttccttccttcaccagaaatgcgaacttggatttctaagatgacacctcccccagctaccagcccttaacatgattccaaaaaagagggcaagaagggacaagggtcccacccaagaaatgcgggggccaatgggctccatgggataagagatggagccgggcttgtggccaggacacttgagaagtccgtgcaactccgtgaccggccacaccgagagggggacctcccaaaccccccagcagtcctaaaaagtccctaggaaaagggcaaggccctgagagggaagtcacccacctcccaggtggcggaccccccgcccgcccagggtcgactaggacttgggactaccccctccgcccatcccacggcagctgcaggcgcaggaagaaaagaagtgacagggagtccaaagtttccccaacaacaaaaatccttcccccgagggaagggaagggctcccaccctcagcccgccccgcccagggaggagggaccgccaccagtggatctaggcagttgggggtcccgctgttctggtcccgacaaggagtgcctggcttgaggttcccccgccccgcgcttcgtgcactctgaattctttgagagggtcccagggagggacaggggtgccccaactcttacttacagtcgtctaagtcatcctgcaagtccacaaagtacagggggatctctgaaaaccaagaaacacacaagaagttaccagggggctgcggcgagaggggacggggtcgggcaggggcccctcggcctcgcggggtggtcacggggcgagagagagaggggcacccctggcatcccccgagcccagccccactcacccgccatcttgggatgggcatggaggcgggaccggcaggggcggggccctgcagacaggggcggggccctgcagacaggggcggggccctgcagacaggggcggggccctgcagacaggggcggggccctgcagacaggggcggggccctgcagacaggggcggggccctgcagacaggggcggggccctgcagacaggggcggggccgtcggcttcgggccccgcccccgatccgcgccggccggccggccccgccctctcagcgaaggtggctgccgaggtgggcggggaggtcaggtgacgcggccggcgtcccaagatggcggcggcggcggctcccggaaggccgcggcggcgtcccggctgctaaggcgggccccacgcggctggcagcggacaggccggacctacggccggaggacgggcggcagccgcctctgcgcggaccggggctgggccgtgcggcggcagcggcgccaggggatgctcttgctgggcctggcctctcccttctcaacttagggcggcggcgggcccgcgcccctggctcccgggccatggcgctgagggagctcaaagtgtgtctgctcggggtgagtggcggcgggtccggccgggagggccacgggaggctgggctggcggggaccccggatcccccctgtcccctcatcccttcccccctcccacgtccaagacgctgtctgccagccccgtggaccctccctccagctcgggagccgtcccgcccacctcttgcactctcgaaaaggtcctggaggccgaagggacccttccccttcccctccctggagcccgtggactcttcccgccccacaaagagcaaacagcccccccttgcctctctattgcatctgggttaagagaggttcttaaatagttttctcccaacttaccaaggtattagttgggagttggccaagtcttccaaagtaaaaccaataacaggtctttaggttttacaagcagcattagcctactttgtctcttgggtgtttttgaacttgtgggatacccctgccacttgtccaaagagttactttgccaagtaactcttcctgtggagaaaaggggtgttcaaatcaggaagccccaaagactagtttgaagcttcagcttcctgtcttgtcaggaaagacaaggtgttggccatttcaaagccttctttctgaaattgatgctgtcattccagagtttctgccttaaagatcggcaggaactccaataactaatctttattcccccaaatagggtggggctaggattcatcagggattactcagaggtaactcaggagttcaaagtttactaacatatgttaaaaagcaagtggacttgttactttttacacgaagcagaaactttgggtctctcaaaaggtcctaatctgtcttaacggcaa

SEQ ID NO: 3359 - DNA, 6000 bp, Homo sapiens
gtcaggagtttaagaccaccttaggcaacatagtataaccctatgtctaaaaaaatataaaaatcaaaatactagggcattgtggcatgcacctgtagtcccagccactcgggaagctgaggtgggaggatggcttgagcccaggaatttgaggctgcagtaagccattgattgcaccgctacacttcagcttaggtgacagagcaaaaccctgtctcttaaaaaaacaaaaatcatgtttattgttgtcctggatgtaaatagcaggtacccagatggatttttgaaaggcaacataaagccagttgggaatttttcacagctcaagctaaaatgtctaagtgtgtggtgtcatgagtatgttaaaattactgctatctttttgtgttcttcactttagtggtattaaaaacaggaaagtaggccagacatggtggctcacacctataatcccagcactttgggaagccaacatgggtggatcacctgaggtcaggagttcgagaccagcctggccaacatggtgaaacccccatctctactaaaaatacaaaattagctgggcgtggtggtgcatgcctgtaatcccagctacttgtgaggctgcggcaggagactcgcttgaacccgggaggtggagattgcagtgagccgagatcacgccattgcactccagcctgggcaacaagagcaagactccatctcaaaaaaaaaaaaaaaggaagatagtaaactataccaacaatgaaaagtcttatataaaaactagtatgtacatattcaatttaactgtgaaaaacaaaacctatatgttcacaaagattagaaaaattgggagagatgtacatagactttcttgttcactggcttagtaaaactgcgtgagcacagtgcctggcacactgactttgtattgaagtataatagacatacagaaatgtgcacgtatcagaagtataaggctcagtgaattttcacaaactgaatatactccggtgcttggcactctggttgggacatggccgttcctacacccaacggtaaccatcctgatactaattcttcagattggtttatctggttttgttttacatatattttgtactttatatttttaaaaacactctgtttcctcttgtgtgtctggcttctttcattctgcattacatttttagaccatccatgtcattgcatctagctgtgaatgatccactctcatggctggtttgtgcgtgtgagtgtcagagtccgagttgtgcgggtaagggggcagtgaagaatacccacaatataattatccattctgctgttgatagacatttgggtagctgtttccaatttagagttattacaaacagtactgctctaaacattctgatcgtattctttggtgaacatctgtacacatttttgttaggtatatttatacccacaagaaaaaatgcttgtcattgagtatgcatgcattcagtacagctttaccgccaaccagttttcaaagtggtagttgtactagttgacaaccataccggtagtgtatgagaagtccgatcaccttctgtctctggtgggtagtcagtgatctccattttcatgacagttaatgaagtcgagcacatttccgaatatatgtttacatttgtcgtatctacatatcctcctttgtgaagggcctgttaagtcttttgcctgttttcctgttgggttacctgcctccttcttaatgttttatagttctttattttggagatgagtcacttattgactatgtatattggaagtatcttctactgtatggcttgcctttgatttttttagtcaactccttcgatggattgaagtttttaatcttcatataatctgactgatccttgttttcctttatgtttagctgcattaggtttttggttgctgttttagaaatcattacctgttcccagctcatgaaaatattctcctcttatttcttttaaaaatattatttgttcaacaattttttgatgtcatatttcacagatgtctcttagataccagctatatttcaatatccatttattgagaataatgacaagaagcttgggtaaagcttttaaacagatttgtagtatattcacagcagtgtctagtcatttgaaaagtagttagaagacattgggagatactttctcaatgtagaaaccatgctgtgtactccccacacagatccgcagacaactcaaagtggtggaggctcaaggcttgagagaacctgagtcagcggagaggccatcttagccttgttaatgtcaaaaggtgtacatgtccatttattccatgtttacaaaatacttctgtgtcaggtattgtgctgataagatactggaaacataaagatggacaaataggatctcttccctagaagagcttagggtctaatgtgagggagatagtcatgtaaacagatatgagatatgtgtagtaacctgtttctggtgtcctgattgattgtagtgtctgggatgttacagagtaaggaagtgggagggtgtcaggaaagcctttgtacaagaagcaacccttgagttatcagccaggtaggtagatgggtgatttaaggattctcttgaaattgtcattatgcttcacggagcagtgaagtgaaacctgttcattctcatgcattgttggtaggagaatatagtggcacagcctcttcagagagtaatttggcagcatctgtcaaaatttaaattgcacattcttcctgcatttgtgctagatagacactggaatacaatgtatgtgtcagacaaatacccaggagtagaataccgtgacctagctcttccactccgggcattaatcctacacacatactcgtaagttcagaaagatgcttcttgcatctttgttaataacatcaaaatattggaaacaaactaaatacccatcaatagagaaatggttaaatgaatggtggtacatctacaaatgcagtattttagagctgttaaaaagaaggcagcaggccaggcacagtggctcacatcagtaatcccagcactttgggaggctaaggcaagcagattgcttgaggtcaggagttcaagaccagcctggccaacatggcgaaacctggtctctactaaaaatataaaaattagccgggcgtggcggtacacgcctctaatcccagctactcgggaggctgaggtgggagaatcgcttgaacctaggaagcttaggttgcagtgagccgagatcatgccactatactccagcctaggtgacagagccgatagcctgtctcaaaaaaaaaaaaaaaaaggtgacggctctttctccatgtactatgatgccacaatccccaggatgtgttgagtgaaagtatcaaggtggagaatggtgcatatggtttgctttatttcttgccccatttggccttggaaaggggagatgggtagggatataggtgtgcctgagtgtttgtgcatatatgtctctggaaggctacacgagaaatgggccacagtggtggccttgtcatgagacagagggacaaccatgttctgactgaactttttaaaaaacaaatcctatgtattacctactcaaaacaaaatgtttttgatgtgtggctttttttaattaaaaaacgtttactaagtgctgtgtgatatccttgtttggatcctggggcagaagcaggacatgtagaaaaactgatgctatctgaaaaaagtctggagttaatagtgatgtggcaatgttgaactcttcattttgacaaatgtcccatggtaatatgtcagcactgggggaaactgggtgggaggtacacaggagctctatcatctttgcagcttttctataaatctaaaattattcgagtataaaaagtttattaaacttttttttttttttttttacttcagtgaaacctgtcaaattgcatctgcaaaattgttgtgtctgagaaagttaaagctcactcccttcccttttctcatcttggtttaggtcgaagaattccatccactgacgccaacctgccatctggcggtaagggcttcaaactccgaagacagccttcagagccaaagcggagctgctgctgaccgaacctcagcctctcagacttgatgatgaagtaggtggtcctgaaagttaacaggagggctggggtccctgccaccagttttcacctagccagtcttgagtcttctccgtgcaaaaaggattcacagaaatggaccagttctgttctccaaagactgcagcaatgatatttcagtctgtgaacttctattatgtaaagaatctctagtgtacaaagggactacatcgttggcttttgaccttgctgaaaaggaacatataattgtatggatggtaggattaagttgttgagtagttttgtaatcaagattttatgtaacatttgtaaagggaaaattagcacttttgtggttcttaagggaaaagaaacagaccttgtggagattataatttccttggtttctgttaccactgttagagggagttgtatcatttaacatatagtaggatagtttaagtgtagggaggacaattattgtctgaagctaaaatgggttatttataggactgatggaaatgatttcatctctgccatctctaaagcacttttcattgaacatgttagcctaggatacgtacagtaaattaacaatgatagcagcagatgcctagctcatcctgggtttgcttctgaccttgtcatgtgtgtgccaccaaacacgttattggcacctttttaaataagctctcatgatcaagatggtgatggtagagaagctgcccggaataaactgaatttcatatgttctaaaatgactagcaatggtttaaaaaggaagaagagtggaagtgaagaaggtggtataaatgctgtcaatttttttttaacccaagtattttggtggggaaaagcaagtatctattgcttagcatatgtaaagttgtagtctatatttatggggccattgcttaaagattataaattatgtaaatacattaataaattctaagtttcatttgacattccattgaatctcgcacccagtcttgcgtatgcctgcccagttttcagcctcttaacgggagactcaagcacattggtattgtataaaggtatagagcacttagcttacaatctttaaaggtttctctgccttcccttctacccacccgcctcccaccagatcccatctggaaatcataataaagacatatgccactttgacaaacctgactagtccttactagcctgagggtaaaagattaagctccaacctcaagtcatttacctggtcttggtaataagtttcttttagcttgtacagcatcctcagaccaactgaggagctttccttgttaacaatttagcttatctttctgtttcctttatttttcccctgcctctgttagtggttaacactcttttccctcagggagcctaatgaggtttttaatatcatctaaaaataaagcattgaagtgaagttggtgaaaatttgttcctggtctaatttggcacccttccaacctgagtattgtaggggaaggaaatttacaagatttaataggaaatgaaacagcttgaatttcaaactaaattgtattttcagagctatcctgaaactgaacagctgaaactttaaaaaataattggtattattttgtgccccccacttaatatggatagattttaatgggaaaattataattcagattaaataaaaaacaattcccttttccctgttgtatatcttaagcatttggaattttttttatcttctgaaatcatataaaaagaatgtcattagtaaaaattctaacttcgttttgtttaaaagacatgtggatgctccatgcccctaggattttgcttcctccccggtgctaaattagcaagctcctagagaagccatgtgattcccagagccaggcgctttacacctaaagtagtttgactttctt

SEQ ID NO: 3360 - DNA, 6000 bp, Homo sapiens
ttcacctagccagtcttgagtcttctccgtgcaaaaaggattcacagaaatggaccagttctgttctccaaagactgcagcaatgatatttcagtctgtgaacttctattatgtaaagaatctctagtgtacaaagggactacatcgttggcttttgaccttgctgaaaaggaacatataattgtatggatggtaggattaagttgttgagtagttttgtaatcaagattttatgtaacatttgtaaagggaaaattagcacttttgtggttcttaagggaaaagaaacagaccttgtggagattataatttccttggtttctgttaccactgttagagggagttgtatcatttaacatatagtaggatagtttaagtgtagggaggacaattattgtctgaagctaaaatgggttatttataggactgatggaaatgatttcatctctgccatctctaaagcacttttcattgaacatgttagcctaggatacgtacagtaaattaacaatgatagcagcagatgcctagctcatcctgggtttgcttctgaccttgtcatgtgtgtgccaccaaacacgttattggcacctttttaaataagctctcatgatcaagatggtgatggtagagaagctgcccggaataaactgaatttcatatgttctaaaatgactagcaatggtttaaaaaggaagaagagtggaagtgaagaaggtggtataaatgctgtcaatttttttttaacccaagtattttggtggggaaaagcaagtatctattgcttagcatatgtaaagttgtagtctatatttatggggccattgcttaaagattataaattatgtaaatacattaataaattctaagtttcatttgacattccattgaatctcgcacccagtcttgcgtatgcctgcccagttttcagcctcttaacgggagactcaagcacattggtattgtataaaggtatagagcacttagcttacaatctttaaaggtttctctgccttcccttctacccacccgcctcccaccagatcccatctggaaatcataataaagacatatgccactttgacaaacctgactagtccttactagcctgagggtaaaagattaagctccaacctcaagtcatttacctggtcttggtaataagtttcttttagcttgtacagcatcctcagaccaactgaggagctttccttgttaacaatttagcttatctttctgtttcctttatttttcccctgcctctgttagtggttaacactcttttccctcagggagcctaatgaggtttttaatatcatctaaaaataaagcattgaagtgaagttggtgaaaatttgttcctggtctaatttggcacccttccaacctgagtattgtaggggaaggaaatttacaagatttaataggaaatgaaacagcttgaatttcaaactaaattgtattttcagagctatcctgaaactgaacagctgaaactttaaaaaataattggtattattttgtgccccccacttaatatggatagattttaatgggaaaattataattcagattaaataaaaaacaattcccttttccctgttgtatatcttaagcatttggaattttttttatcttctgaaatcatataaaaagaatgtcattagtaaaaattctaacttcgttttgtttaaaagacatgtggatgctccatgcccctaggattttgcttcctccccggtgctaaattagcaagctcctagagaagccatgtgattcccagagccaggcgctttacacctaaagtagtttgactttcttctgtatacatccagatggatcccaggcatccgggcaccaccctggtgtgtccctagaattcccactgctgggcctctatctccatgacaacaaaataaaaacagaggttgcttgactcattaccaaagaggcaaagcatgtgcgaccctttctgtcttattttaccaaaagatggtgcaaatctatgaccttcacattttttccaccacacccaccagtagctgttggtgattgcatggtgtctcggtgcatggggaaaggcaaggtcttctgagctcatcttaactggtgaggcatctggatgtgtctgatcttactgtgatgttttactgtaccgagcccaatgtgggtccatctcatcagccctttgctgatttcatgatttctcaccctccctcccatatgtagggtgtgattctgttttattatagccacatgttttattaacagaatgagtgatatgaagcttgtacttatgcatttctcgggcctcttccctcattttcatcagtctgtctaagaacttgactcggcactgtttctcgtgtaatatccttctaatgcttagcaacaacaacaaaaaattgctctctcagatccataatccatactcagtgaaagcagggaaaaaatattttcacttattttatttgcttctaaaatgcaaagatgaatactaaagtcagaagcagtgtttcattttgaacacattttggattattaagctgactaagcaatgatctaatacacatttcatattttctttataataatttcttatggagaagaggctatatttcaaaggaattgagacatactcccatctataaacatgtttggttttcttacgatacagggccatttttttaaaactctcaggactgaacagaagagaaaaattattaattagctgctactgtatgttgattcttttcggagaaattgaaataagctctttgcaggcgtccaatcctagaaaccaatggtctccagaactctcacacaagtgtttttctgattctatgataactaattaaccatcatctggtgattaaaagaacataaagtaagattatgattaagtgtccatcacctgcctgtcagccgtggtcagaataagttttacacgaagcaggtgaaagatttagttcttttcaaagtaacttattttcttgtgacccgtttatgatgttgtttgaagtccctgtttcccattgtgtacgcactttctggatgtctggaaggatcgggacttttgtgtgagaggcttgagcgcctcctctatgtgggctggtgtccttcttgaagttgtcaattcctcttattcttaaatatctaaagggaaaggaaaccaactttaatttcagaacttctctttacgtcttgtatgtatttcttttctgttctcaaggaggaaaattggtctaggaagccttctaaattaaactctgggaaatatagtaatgaaaatatcctttagctaactttcctgtaactgtcaaaccaaaatgtcagtatttttagggcattgtgttaaaataagcagtttagattccgacgacactgcactaattggcatgtcagcctccagctcagaaaggcatttgctcatggttacaggcatcttttagattctaagagtgagttacagaattctttttggtactttcacttattctttcagaatacatcaaggatgtgatttatgggcccttaagagtataagatataggtgcacagtatgttacttaagtaacggatgagcccccctaaacatccacgtgtctctgcaggaacctgtgtaagtattgtgaaaacccttttcttccagggaaaaattattggaaattccttaactgagctatacttggtacttgctctagaacatttgggaaatgacaaactcaggctggctctcctctctaacctcactgggctataaatgttccttctaactctgtaatgaaagttcagtgacaaactagatagtgaacctgtgaaagtcattatttacatttgctttaaagggacagttttaccgttcaacttcaagagtttttctacctctttaacagttaatattttttaaaggaagaaatggaatgtaccttcaggggtcaagctgttaactgtatacctgcctctagttagcttggtttatcaaaaggatttttaaatgattcaaggtaatgtttaggatatttgttttaactcctgctgtgctgtgatttaaaaaaaaatagtctaagaaacaaatttatccatgagataaacatcatattttatagttttagaaaaaagggttgggggtggaatttagcctagaacttaaagaaacaacctctgcgaatttctcttgacagcggagttgcttgtcttgacttctaataatataaatccaggcagtttgattatccgatttgcaagaaactttaatggaattctggggcatttgtcctgttttatgtgcaaatgaaagtctaaaaaatatgaggaagatattacatttttcaggagcctccattttttcagtctaagagaatgataagtgagaggcctattgtgatgaagttgcattggacataatgtgggaagtgaataaatagaaccaagaatcttcatctatctctgttggtctttcaggattctcttagcatataggaaaatgatttaccttccagatctcgaaggacttccaatagcatagatcaggtttaatttgatggtctataccatcagaaataactaatatctgttttctttccttttagagtataatcaattatggataggccagaatatttttggcttcaaaacaaaaggattcataagcttaaaaaaacaaaaatcccaaaccttccatctatcccttttattacgttgaacattttagatagtaagattaagatgtatcattagtatatggtgaaattaaaaccgtggtgtctaacagatttaacaaaaagtgtttaatttactgcaagttcatttttagatctgtatggtgcccagtactccacaaaatgcatcataattgaaacaacaaaattattttcatgagcaagaattcaagtatcaaggcctatcagccaattaaaagccgtaagatagtaatgattttttttctttttttttttttttctttttttagatggagtctcactctgtcgcccaggctggtatgcagtggcgcgatctcagctcactgcaacctgtctcctgggttcaagcagttctcctgcctcagcctcctgagtagctgggatgacaggcgtgcaccaccatacccagctaatttttgtatttttagtagagatggggtttcaccatgtttgccaggctggtctcgaactcctgacctcaggtgatctgcttgcctcggcttcgcaacattctgggattacagacgtgagccaccgcgcccaaccagtaacgatttttttaaagggcctttcttaattgacagttttaagctgtagacattaatattataacaaacaaaacatgccagttttactgattccgctttttgcttgattcaggaacttttcattgtttggggaagcttttgaatgcagtactgtggaggaaatcatccttaaaatagcatttcacacatagggccaaaattgaaattgtcaaggaaacccctcagcatctaacgtcatcttgtagaagagctgggcatacctcttcctctaggccaattcagaggccactggccacccaagtagagtggggcccactggcatgagtagtccctgtgcccatgcccatggtggtgcttgactttgctttggggcttaatcctagtatcatttggccattaatttttaattaagtttatacttgaataatcagttttactcctgaaaaattttgaagccagcactgactttgtttatattcacttaccttgtatatgaacttatgacattagagtttgtgaaactgtcttaacgtggctcatacacgtgatgtcagagggactggtcagttctttacagggtgaattaatcggcagctggctagtcagagcaactgatgggtggcttttttttctttttttttttgagacggagtctcgctctgtcacccaggctggagtgtaagggcgcgatctcggctcactgcaacctccgcctcccaggttcaagcaattctcctgcctcagccacc

SEQ ID NO: 3361 - DNA, 6000 bp, Homo sapiens
tgcactgagtgtacatcccgagtgtgtgtgtcggtgggtgttgaatttctaggcacactgagtgtacatcccgagtgtgtgtgtcggtgagtgttgaatttctaggtgcactgagtgtacatatctgagtgtgtgtgtccgtgggtgttgaatttctaggtgcactgagtgtacattccgagtgtgtgtgtcggtgggtgttgagagtgtgtgtgttttcagacctgccctcttcctgtaactggccgtgtgagattgggcaaatgacataacctctctgaacctcacttcccacacattagttaaaaaccaaggctgatttctgtggccattctccagttctgaagtactccaaccttgtggtgttgtcttagcttaacgatatgagaagaaattggggtgggggaaagtgaggctacccatagttacgtagcactggacaatatataagcatgcatatataatatgaattagaatgtatactgacatactatataccattatatagtttatattatatagtatatataatatacatgtggtatggtaaataatattgaagaatatttcccaacattaaattagccagcatatggttaggtttgcaattagggagatttattttaccatctgcaaggggcttcaggaagagtcacattcagtactgtcactttgaaatcctaatgaccctgcaacctaaaggttagactgtgataccaggaaaagtaagctgttctctacacacattgatttcttttccattgtcataaaacagtagcaaatcaaaggaagaaaaccccatatttttatatccagattcatgtagtgagtatccaattgactggccaacatcttctgaaatacagatatccttttaaaattgactatataaaattcttatatgcttttagaagaaccacaattttatacatgtatatacagagagaaatatatctttttggtattatgcttttgcatagatttggctcaacggctcatcatgacagtcttctgagtatataccttcctcatttttctgctaagaatctatcaagaaaactagtaaacccatatcggaaacatagactaatatgttgttgactgccagaaaattctttattctatctaaccaaaattttccaagaaacggtggcaatttaaccttatctggtttctttaatggaagatcatatattacatttatgttacttacagccacagatcacaatggtgtcttgaaaaaggcagctcggttatcaacgagatatgcatacctgctcagtttattttgtatggcagaaaagtgaaagctggtctcactatccgtcacaaaatatcataacatttaaggatggcctaatgagcagccaaccccgaaaacaataggaatgcctttggaatgaagtaaaattttgcaaacggcattgacttatttttattatatacaattttttccccttttttggatttttatgactctgcatacataataaaattccaagcaagtactttcatttttttcaaaaatgagaaaatggtactagaagaatttaggacctttttcaactctgcttaagattaagatgtcccagggtgaaatcttgatgtgcccactactttaaagcaccgccctgtaaacattcacagttgattccaaacatgctgaagaagccaagctgccagcatgcaggtgttcagagctgcatcctggttctacccaagggcttgacccagggtcgaattccctgttgccctctaaagcccggtactcagtgagaaagaagaaaagtgaattggatagtagacattttccatactcctctatttaacattcggggggcaaatgagccttttaactgaacacagatacaggaaactgaagacataaagtattcattttccccagcttgaaagtttatatcggaagttcctatatttcatgcaaaatattgctatttggcacatgaggtctgatggtttcagaaagtaagaattagatgttccttcgatctagcttgtaagtgcatccaaaccacaccctgaatatgataatgcttctcatttcccctgtgccttggtgtcacagctctccagcaccattgtgagcctgagggtcaagacccctaccaaggcaataacgttcctactgactcccaggaacacacgtggggagagtggaatgggctcttccccaatcctccagcattaaactcagccctgagactcccagggcttagaaaacagcttagagtgaagaattgttttctctgagagttatgcctgaacacttctgctaaagcagacagtcatcagttaatctctataaatgactacaattttggcaggtatcagctggtatagaaattgctcacaagttaaagctctcatttctaagtatatagtaatgagggggactaattaaaataaaaaacaaagaaacaaacaaacaaaaaatacctcacgttgtgcctgaccacaggactggcttacctggaatgatgattcctgttgggtgtctccgtggcacaggtccccacgcttgctggctaagagagacacaactgccaagagctgtttttccaagctgtggctgtagactctaccacgtcaagtgctgtgtattcagaatgacctcgctcacatcactctcctgggtcacccactgtccttgacacagtgttcttcaaaaatgccactaagtgcctgaggaatgtgaagttttgaaatgagcacaaaacctgccggcagcctttgccgactggcattatttctgaggcagatagagctctccacaatcattgttcctgccttcttctttaccccaactcgtaatgccaggcattagactgtggtaggaggttaaagggctgagttattatgttttgaatggttgttccattggaattgtttgtttttctgcaagaaaactgcagatttttcagtttgatcatcaggaagccaaggatctatggcagagataagaggagggaggagctaaggaaggcttcatccagaggcactgagtcacaccatggctgaccaacacagagcgctctagaaaaaagacattttcatacttctgagggaaagggatgatgggggttgctgcaagacctggccccatggcctttcatccacaaagccggtgcttaaaatacgcagccaagaacaggcctcccacatgcatgctgagcctgcgtgactcaggctgtttgcgttcaagtctcctgttgtgggctggagcgctgaatcagagtccagatttgccttggtgacacatgacaagaggggccattgcatttgaactacataaatattatgcttaagtgtttttcctcattttggagccaaacaggtctcgttaatgataaaatcactgcaatatagtgggccctttttttctggtctggaatttgagacaatgtcaactgtgccaaggggcctggcagcaggaagaaatggccagccatggagatttgcagccatcatgcaagttataccatttaattttataattgtagccattgggagctggactacagtgcacttctcgtggtctgctcttaccccaggctgcgggagtggaatcaagggggcctctttctagtctaggattgggtcagggcatgtgaaatagcactttatgggggcagcgggcaggctgtttctcagtctggctttggggacatttggcaatagggaacagaggttgtgcaatcgatcaaggactctttattggaaccataaggctgaggaagcagcaggaggccattgtctttaaaagagaaatgaatggcccaggcctcctgtggctacctccctaccttggagcctcagctttgcacgacaggactggctctggtttaaggacattttgagaaaaccgtaggccccagtcccccatgagtggcctctgcttgctgcttcctggtgacggttgttttggtgaagagcatgatgaggacacttgctatctatatagacactgaggggcccaccatcccaccctatatagacactgaggggcccatcatcccatcccaccagtcctgagccccctggggaagctcaccagataggctgtagctacctctgggctccagtgggcctattctgctgggaatattggacaagacacaggcgaggccttcctgtcaactcctccttaggggtacatgggggagtcggcttcagggaagaaggaatgcttgtgaaaagcctgtgaggagagggagagggagaggggctgaggggctgaggatgccctgcgtgtacctggaaatgggacctccccagaggctgtgggtttgcagccacgcctcatttcctcttggaaggggccctaccactaagctgcggggcccactttgccgcctctaaaacgtgccagtggctgggtttgcagtaaggaacagccgttctgatgcccctgggaggccacctttcctggctgccacagcatagcccctggcatgtggccatgtgccaacaattaatgcgcctctttccctcccggcatcaccaccaccgccaagttctgtatctcagtgagttgtgcccattggaagtgggtgtagagggttggggagggtgccaaggcccagactgggggagcactctgtggccgaggcggtgaaagggggcccattctgctgagaggacagtggccccaaattcagctggcatatctctagcgagtctatgttggggtgaggggagagagaggggaaagacaagaaaagccccagttttaggaaatccacaatactttttctgatctcttccctccctccttccctccccccatcccctcccctccctgctccccacaataggacatcggcagaaactagatgatcagaccaagcccgggagcttgtccttttccgagcggctcagtgaactggagcagctgcggcgcacagccatgagggtcagcccacaccacccagcccccacgcccaaccctcgtgcctccctgaaccactccactgcctttaaccctcagcctcagagtcagatgcagggtaagtaccagatggagcccactgcccgcctctcctgcacctgggccaccacccacaactggcccccatgtgcacacaccttcccagaccaactggggtttccccttgatgctcagagaaaggcctcgaaccaacagcaccacctgggagctgttggaaatgcagagtcttgggccccacccaccccagacccaccgagtcagatctgcattgtaaccagatccccacaaggaaaagcactgctacagaggatacgaggagctctgggtatggatatccatattggatagatagctctcttgaattttttaagagttagctttggctatgctatttttttacctacccattaggcttgaagacacacacgcagacacacacacacacacacgtcaagcaaagtgaagatgggatgtttcaagttctcgctattgccagattatttgtgggttttgtatctagtgtttttttattattaagaaatagttgaaatgtatggatgtcatcacatcaagggtgttatttgcaaatcaatagagaatgcaggtccccccagcccatggggctagctggcaattactaaagcgctgtaagatgcaataattgcctaaggcccactgtgccaaattagataatacaagaagttcatttacactgtagaccagtgacgtcaatgactgtttgctctgtgataccgtttcaaaaatccaaaatgcagacttttctctgtgccatgcaggatgcagctgtgtgtgatatggtttacagtaatatttctttctcaaagtagcaggcttgttaaggaaaagataagcaacacatctggggaaaagggcaggtggccagcaatcgatgtggtagctctttgcccctctcggacagcaggaattagcttccccaggcattttctgtatgtgagttgtattgtgggatgtacaaatatcatctgttcctttgggtttccaggccagta

SEQ ID NO: 3362 - DNA, 6000 bp, Homo sapiens
gttgtagaagaaaaacgtcaatgcactgttactgttttccaatgaaattatttttcttccaactaaccaagcagtactttttaaatccactgcagaaatgtacatttcattcctgttgtgagccgttttcaattctcctccctccctctccccgcaacaaaatttggaaaaatctgtcacgtagcatccgcccaacgtatcgcttcgttgtattttttttttttttaattttgcattatgacaaaagtaaattctagcattactccagggaaacactgggaatgaacctggtaatgtttcctttcctttctcccttaggcaaaggaaggggaattctgtattgtcgctaaaatgagcgctcttggtggaaaggaattcctcacttcgtacacgctgtggctgtccttgaaagtgcaggctccgtaaaatgcccggccgactaaggggttccctttccccggagcccctgcctctttccattcattttagatcctcagtaaggaagggcagaggttggtctgtttcttcttttcaagagggcaccgcgctgcgcagttaacagcctgcgccgctccggggaaacccaaatgtcccgcgatcccatcgagtcaaggagcaaaagctgtgattgctatcagctttttgtcgggcttcaaactcggggtttatcggttgaaactcctagctgagcagctcccacgacgctgcctctgacggctaaactcggtgcatgcaaggctgggaccaactttccttactcgataaaggaacttgactccctcctgggagaccgcagcccgagtccgactcgcagcccccgtcgcggggtttagggttttaggcaagcggcccgagacccagaggagcctccctggacctttccgaggggcaaatcacccgagtctgctatttcccctggagtcaaaagcctacttttggagccgccacaccctcgtgctccctcccgcatctcgggggttccgggggatgcacgtgggggtggccccaggagccctgggtgggatctcggggaaatgcattggagaccaggcgaaaaggtttcccttgcccagaacttgcctctagagcgggccgcgtccgaacccgcaggcaaaggcgctgcggcccctgcgggcgggcgggcgcgcgcgatgcactcttctcagggacagagttagaaagtggacgtttgggcggggggagggggggatttacaactggaattaggcttaaaaaaatcattttaaaagaaaaatgtagtaagttttctttccgagaccccaggtccattaaaacaaaactgaactcgggtgctggcagtgcccagggggagcggaggcggagagggttgaggccgcgggccgcccgccttagccccccggaagcccgggctcctgaagcacagatagccaagagcggcccgagtcaagccccaggaacaggggcttcgggaagagaccccgaccgggccgcacagcggggaggcctggtccgagagtccccacctggccggctgcgactctatattggaacctcggaaacgcgccttggccgttccagctcaagtgggctctggggcggcttcctgtcttttatcctcgaacgctagttcttcccgggcgacccgaaggccacgaggcgggccgcacagccccgcgccgtcgggggcgttccgggagctccggggactgcgcgcggcgtccagggagggcggctgctgccccctggcgtccgccagagcccgcggcgcgtcccgacagctccgcgcagtccgggcccgcccgggaaaggcctccacgccagtcaaccccggccccctcctgcgtccgggcccgcggcaacgcccggggacagtccctgcgcggcagcggccacagcaccctagccctgggggagggaggagcgggcgtcaggggccccgtgaggtcggcgagggacccccgcgccggggagcttaattgaggggctccgcggggaccacaaagcagcccgcggtggaacggggccgggatccggggactgggttgcagccccggggtggatgagaggccccgggaggtgcagggcccggcagggagggcgtggagggactcatggtgacgggagcagcctccgctgggagggagccccgccgggcggggtcggagttggcagcgcacgccggaccgggggcggggccctccgagctccgcgaaaatgcccgcagcaccgcggggaccggcgcagggggaagcggccgcccgcacgcgaagccggggtgggttccgcacctggggccgctcgagcgcacgggggcggggagaggagcgggggccgcttccggggagccggaggggagacgcggggcccgggcaggctgtccggctgctgcgggtgccggcgctacaaggcccgggagcaagccgcgtggctgctttcaactttccttccagccgcgcgttcttggggtctttcctgactaggaaactcttcgctggccgctgacgcacgcagcaagtgagacgcgcggagggatcgagccgcggcccgggcgcagcggtaaaaaacacccattacagaaaccgacccaagggaagacgctgagagcaaacggcacgcgcggacgccgtccggcctcatgcaaggaatcagcgccgcttcgccgcagctgccagccggacggtgcaggagcgcggagtggctcccccgggccccgcggccaaatcgcacccccgccctggaagcggaggcctggccctgggcggccgcgcaggatctggggccgtccgcgggctgcagcccggttcgggagcctcgtggcggccactgcgcctgcctgcagcggctcgcggggccgggcctctccgggtgcggcgcgccggccgggtcctcctcgggccggcggggcctgctttctttttccaggtctccggaccgtggccactcgcggagccgcacaagcctgcgtgtggctgcggaaaggggtccgcacgcgggcggggccccgggccagcatgcaggcttggatgcggggcgcgggggtggcctccgactccccgcccgggctgcgtacagtagcgcgcggcgcggcggcgggggcgcgcgggccaattccaggagccggcggcggcgagccgcgccctggctgataccggaaaggcctgtgattggccgccggccgcccctatgcaaacgagctgagggaatggaattcctccggccgggcttacagtaaaagcacgttcatttccaggcactctcattcatagagccagcgggcgcgggcgggacgggcgccccgcggccggacccagccagggcaccacgctgcccggccctgcgccgccaggcacttctttccggggctcctagggacgccagaaggaagtcaacctctgctgcttctccttggcctgcgttggaccttcctttttttgttgtttttttttgtttttcccctttcttccttttgaattaactggcttcttggctggatgttttcaacttctttcctggctgcgaacttttccccaattgttttccttttacaacagggggagaaagtgctctgtggtccgaggcgagccgtgaagttgcgtgtgcgtggcagtgtgcgtggcaggatgtgcgtgcgtgtgtaacccgagccgcccgatctgtttcgatctgcgccgcggagccctccctcaaggcccgctccacctgctgcggttacgcggcgctcgtgggtgttcgtgcctcggagcagctaaccggcgggtgctgggcgacggtggaggagtatcgtctcgctgctgcccgagtcagggctgagtcacccagctgatgtagacagtggctgccttccgaagagtgcgtgtttgcatgtgtgtgactctgcggctgctcaactcccaacaaaccagaggaccagccacaaacttaaccaacatccccaaacccgagttcacagatgtgggagagctgtagaaccctgagtgtcatcgactgggccttcttatgattgttgttttaagattagctgaagatctctgaaacgctgaattttctgcactgagcgttttgacagaattcattgagagaacagagaacatgacaagtacttctagctcagcactgctccaactactgaagctgattttcaaggctacttaaaaaaatctgcagcgtacattaatggatttctgttgtgtttaaattctccacagattgtattgtaaatattttatgaagtagagcatatgtatatatttatatatacgtgcacatacattagtagcactacctttggaagtctcagctcttgcttttcgggactgaagccagttttgcatgataaaagtggccttgttacgggagataattgtgttctgttgggactttagacaaaactcacctgcaaaaaactgacaggcattaactactggaacttccaaataatgtgtttgctgatcgttttactcttcgcataaatattttaggaagtgtatgagaattttgccttcaggaacttttctaacagccaaagacagaacttaacctctgcaagcaagattcgtggaagatagtctccactttttaatgcactaagcaatcggttgctaggagcccatcctgggtcagaggccgatccgcagaaccagaacgttttcccctcctggactgttagtaacttagtctccctcctcccctaaccacccccgcccccccccaccccccgcagtaataaaggcccctgaacgtgtatgttggtctcccgggagctgcttgctgaagatccgcgcccctgtcgccgtctggtaggagctgtttgcagggtcctaactcaatcggcttgttgtgatgcgtatccccgtagatgccagcacgagccgccgcttcacgccgccttccaccgcgctgagcccaggcaagatgagcgaggcgttgccgctgggcgccccggacgccggcgctgccctggccggcaagctgaggagcggcgaccgcagcatggtggaggtgctggccgaccacccgggcgagctggtgcgcaccgacagccccaacttcctctgctccgtgctgcctacgcactggcgctgcaacaagaccctgcccatcgctttcaaggtactggcccggagagggtggtgggaggacaggcggaggccggcgaggccgggggagatccgcgagggcagcggccaggcgggcggggccggattctggaaaggggcccccgcagccccgggtcggtcttcctagcttgggatgtgggggatgctgtgttgccgtggcgaccctcgggaggcactcgtctcagctttctggggcggcctcccaggagggctgaaaacatcagggtgtccccaaagatatccactgggagccggtcgggacctccctggcaggggccttagctttgatacaaagtaggaaaagttataacccagcccggcagagacagcccgtctgctaacttactgctgcccctaccgctggattaacacccaaaccattttgtcttcctcagatgaaaggatcaggaaataaaatagtaagacttttctgccttcaagtcagtgaaaagaaactaactagggaaactgtcagggattttttttccccttctctaaccgccctataggaattagcatgtccaaagtccacagcgggcgtagttaagtttgcaaaagttttctgaagagttctctgagctttttagcctgctcctgccagaagccgcaagtatcgaatcctgtttcttttcccggaaccgttctgaatgctatcatcagctcacctagattaagccaggggtagcgaaaggtgacgaggctgttttcggagagccaggggtcccagcggcccgctttcctgctagaggagggggcggcgcgtagccggagacttcagcgcggcggctccaaagatctcccttcacttttcacccctgatcatccccaaagctttgagctgcctttaaaaaccttgaccttcaacaggggtatgaaaacaaccccaggcgtttctaaacaa

SEQ ID NO: 3363 - DNA, 6000 bp, Homo sapiens
atatacaaggctgatagagtaatttcaaattcacaacattatatgtagatattcaaaggaaagaaaaagagcttcatgtgactttgcttaatgggtttacctatagttgtaaatgtatactgtaagtgatccatatttgggaattatcatgtaacaattatttctaataataattgatataatctattagaacttgtgagaggtttcgatgtaaataatttacctgcctagcagagagaagggaaggagagtaagcaggggaaaatgtttctaaaatgtcctatcattggaagtaaatgatcataaatgtttttgcgttaagttagggtttggttttaattttcccttgaattctaatgttcctacaccttccaaatatattttaaatcttcattaaataaatcacattttaatcacacacggagcttaaaagaggtgattctatgacagatattcagtattagctagtgaaggagaacattggttgaaggtacctaaaaccacgtgcataaggaacagtttatttcttatttggtgatttactatttcaagtcatttttgtgtcaaagctataaaaatctccagtgctaaaaagtgtaagaagaaatgagctagcaaaaaaaaaaaagtcgggggaaagttaatttttaaacttgcattacttttattttcctactttctgttatttcagaatgcatacttggaatgaatccttctagagacgtccacggtatgttaaattccaagttatatttttaaataaagtacacaccttcatagatgtgtatatgattttatatctatgtatctctatgtataacttgtgatataatttaaccaaataattaaggctgtttctgctgattccaatatacttaaaagcagttctccatattgtaaatgttataccatataaaatatttcaatgaaagcttaaatgataccctcagttctacagcgtttaccataggtgcattctgatgctattaaatgcctctatacaactctctaaaaacaaaacagagcttggcttccctcacagcccagcttattacctgtgttatagcagtggtaatgcaagatttttatgagagtaaaatgtttactaagcattcctaaattttaaaaagattaattttaaaatgtcctcagcttgctacttgtgaggtacacaatgggtttatgaagtgaaagtgaaatcatcacacattaaccatagcatcccacagaaacattcagatggaggaaggatgtaatggaagaactaagggctctcctcccccctctcatagtaattagatttgaaaagtgaagtaatctcaaagccacttcagaagaaaaaaatgtttaattaaattccaatgttcaaaactggatagtgtgtatggcaggtgatttgtacatacatgttactcttcatcaaaattgttttccatccctgtgacatcaatacaaactgcagctatttggttccaaaccatagcaagatacattctattttttaaaatgtaaatggtcatttaaaatagaaataattcttttagacgtactgcatttttacaaatgtgattttggaaatatattgctcgcaaagggtaattttaagagaattgttgagattctaatcccatctttatgcatattttggggaggcttttgaaagagcaaaaaggtaaaagatttagttatcttctgagaccacctatagttctttacctaaagttgtagaagaaaaacgtcaatgcactgttactgttttccaatgaaattatttttcttccaactaaccaagcagtactttttaaatccactgcagaaatgtacatttcattcctgttgtgagccgttttcaattctcctccctccctctccccgcaacaaaatttggaaaaatctgtcacgtagcatccgcccaacgtatcgcttcgttgtattttttttttttttaattttgcattatgacaaaagtaaattctagcattactccagggaaacactgggaatgaacctggtaatgtttcctttcctttctcccttaggcaaaggaaggggaattctgtattgtcgctaaaatgagcgctcttggtggaaaggaattcctcacttcgtacacgctgtggctgtccttgaaagtgcaggctccgtaaaatgcccggccgactaaggggttccctttccccggagcccctgcctctttccattcattttagatcctcagtaaggaagggcagaggttggtctgtttcttcttttcaagagggcaccgcgctgcgcagttaacagcctgcgccgctccggggaaacccaaatgtcccgcgatcccatcgagtcaaggagcaaaagctgtgattgctatcagctttttgtcgggcttcaaactcggggtttatcggttgaaactcctagctgagcagctcccacgacgctgcctctgacggctaaactcggtgcatgcaaggctgggaccaactttccttactcgataaaggaacttgactccctcctgggagaccgcagcccgagtccgactcgcagcccccgtcgcggggtttagggttttaggcaagcggcccgagacccagaggagcctccctggacctttccgaggggcaaatcacccgagtctgctatttcccctggagtcaaaagcctacttttggagccgccacaccctcgtgctccctcccgcatctcgggggttccgggggatgcacgtgggggtggccccaggagccctgggtgggatctcggggaaatgcattggagaccaggcgaaaaggtttcccttgcccagaacttgcctctagagcgggccgcgtccgaacccgcaggcaaaggcgctgcggcccctgcgggcgggcgggcgcgcgcgatgcactcttctcagggacagagttagaaagtggacgtttgggcggggggagggggggatttacaactggaattaggcttaaaaaaatcattttaaaagaaaaatgtagtaagttttctttccgagaccccaggtccattaaaacaaaactgaactcgggtgctggcagtgcccagggggagcggaggcggagagggttgaggccgcgggccgcccgccttagccccccggaagcccgggctcctgaagcacagatagccaagagcggcccgagtcaagccccaggaacaggggcttcgggaagagaccccgaccgggccgcacagcggggaggcctggtccgagagtccccacctggccggctgcgactctatattggaacctcggaaacgcgccttggccgttccagctcaagtgggctctggggcggcttcctgtcttttatcctcgaacgctagttcttcccgggcgacccgaaggccacgaggcgggccgcacagccccgcgccgtcgggggcgttccgggagctccggggactgcgcgcggcgtccagggagggcggctgctgccccctggcgtccgccagagcccgcggcgcgtcccgacagctccgcgcagtccgggcccgcccgggaaaggcctccacgccagtcaaccccggccccctcctgcgtccgggcccgcggcaacgcccggggacagtccctgcgcggcagcggccacagcaccctagccctgggggagggaggagcgggcgtcaggggccccgtgaggtcggcgagggacccccgcgccggggagcttaattgaggggctccgcggggaccacaaagcagcccgcggtggaacggggccgggatccggggactgggttgcagccccggggtggatgagaggccccgggaggtgcagggcccggcagggagggcgtggagggactcatggtgacgggagcagcctccgctgggagggagccccgccgggcggggtcggagttggcagcgcacgccggaccgggggcggggccctccgagctccgcgaaaatgcccgcagcaccgcggggaccggcgcagggggaagcggccgcccgcacgcgaagccggggtgggttccgcacctggggccgctcgagcgcacgggggcggggagaggagcgggggccgcttccggggagccggaggggagacgcggggcccgggcaggctgtccggctgctgcgggtgccggcgctacaaggcccgggagcaagccgcgtggctgctttcaactttccttccagccgcgcgttcttggggtctttcctgactaggaaactcttcgctggccgctgacgcacgcagcaagtgagacgcgcggagggatcgagccgcggcccgggcgcagcggtaaaaaacacccattacagaaaccgacccaagggaagacgctgagagcaaacggcacgcgcggacgccgtccggcctcatgcaaggaatcagcgccgcttcgccgcagctgccagccggacggtgcaggagcgcggagtggctcccccgggccccgcggccaaatcgcacccccgccctggaagcggaggcctggccctgggcggccgcgcaggatctggggccgtccgcgggctgcagcccggttcgggagcctcgtggcggccactgcgcctgcctgcagcggctcgcggggccgggcctctccgggtgcggcgcgccggccgggtcctcctcgggccggcggggcctgctttctttttccaggtctccggaccgtggccactcgcggagccgcacaagcctgcgtgtggctgcggaaaggggtccgcacgcgggcggggccccgggccagcatgcaggcttggatgcggggcgcgggggtggcctccgactccccgcccgggctgcgtacagtagcgcgcggcgcggcggcgggggcgcgcgggccaattccaggagccggcggcggcgagccgcgccctggctgataccggaaaggcctgtgattggccgccggccgcccctatgcaaacgagctgagggaatggaattcctccggccgggcttacagtaaaagcacgttcatttccaggcactctcattcatagagccagcgggcgcgggcgggacgggcgccccgcggccggacccagccagggcaccacgctgcccggccctgcgccgccaggcacttctttccggggctcctagggacgccagaaggaagtcaacctctgctgcttctccttggcctgcgttggaccttcctttttttgttgtttttttttgtttttcccctttcttccttttgaattaactggcttcttggctggatgttttcaacttctttcctggctgcgaacttttccccaattgttttccttttacaacagggggagaaagtgctctgtggtccgaggcgagccgtgaagttgcgtgtgcgtggcagtgtgcgtggcaggatgtgcgtgcgtgtgtaacccgagccgcccgatctgtttcgatctgcgccgcggagccctccctcaaggcccgctccacctgctgcggttacgcggcgctcgtgggtgttcgtgcctcggagcagctaaccggcgggtgctgggcgacggtggaggagtatcgtctcgctgctgcccgagtcagggctgagtcacccagctgatgtagacagtggctgccttccgaagagtgcgtgtttgcatgtgtgtgactctgcggctgctcaactcccaacaaaccagaggaccagccacaaacttaaccaacatccccaaacccgagttcacagatgtgggagagctgtagaaccctgagtgtcatcgactgggccttcttatgattgttgttttaagattagctgaagatctctgaaacgctgaattttctgcactgagcgttttgacagaattcattgagagaacagagaacatgacaagtacttctagctcagcactgctccaactactgaagctgattttcaaggctacttaaaaaaatctgcagcgtacattaatggatttctgttgtgtttaaattctccacagattgtattgtaaatattttatgaagtagagcatatgtatatatttatatatacgtgcacatacattagtagcactacctttggaagtctcag

SEQ ID NO: 3364 - DNA, 6000 bp, Homo sapiens
agttttcaaaatccactcatttttgcccttgtttttgggtttaaaaaatcctggcattttcctcagaattgctgaactattaggtgtgtagatgaacttgtgttttcttgctctcctactccaatttcttagactcagacatggaaaagcttctctgggtctcaagacataatttccagggtgcgtggttccgctgggtgtgctgtctggtcagtcttaccgttgtggattccacacccccaccccactgccccaacacctattaaagctgagctgacgtaacttcaggatacatttattatttcttaccttatcattcacaattagtgcaaatgattagttctctgccttgctctttaaaaagaaaagtcttcatggagtcattttatctacttgtgaaccacaatctcgtttttttttggatgctcctttgagactatacatatttaattcctttaatatttcatcatagagcagtccttcagaacctcttattttagttgttccttttactttggcaaaaatataagactaaagaagctgcaaatcttgttttcctgcctatttaaacagcatctagaaatctgaagtaattgtctcctcttattttaaaggtttttttttaaaaaaaaaaaaacagcatactaaatattgtggcatggagttgaaagctttaggtctgcagcatttgaaatgctcaaatcctgtctttaaagaacagtatttcctctttgtgactcagtgctgttatcaatatacaaggctgatagagtaatttcaaattcacaacattatatgtagatattcaaaggaaagaaaaagagcttcatgtgactttgcttaatgggtttacctatagttgtaaatgtatactgtaagtgatccatatttgggaattatcatgtaacaattatttctaataataattgatataatctattagaacttgtgagaggtttcgatgtaaataatttacctgcctagcagagagaagggaaggagagtaagcaggggaaaatgtttctaaaatgtcctatcattggaagtaaatgatcataaatgtttttgcgttaagttagggtttggttttaattttcccttgaattctaatgttcctacaccttccaaatatattttaaatcttcattaaataaatcacattttaatcacacacggagcttaaaagaggtgattctatgacagatattcagtattagctagtgaaggagaacattggttgaaggtacctaaaaccacgtgcataaggaacagtttatttcttatttggtgatttactatttcaagtcatttttgtgtcaaagctataaaaatctccagtgctaaaaagtgtaagaagaaatgagctagcaaaaaaaaaaaagtcgggggaaagttaatttttaaacttgcattacttttattttcctactttctgttatttcagaatgcatacttggaatgaatccttctagagacgtccacggtatgttaaattccaagttatatttttaaataaagtacacaccttcatagatgtgtatatgattttatatctatgtatctctatgtataacttgtgatataatttaaccaaataattaaggctgtttctgctgattccaatatacttaaaagcagttctccatattgtaaatgttataccatataaaatatttcaatgaaagcttaaatgataccctcagttctacagcgtttaccataggtgcattctgatgctattaaatgcctctatacaactctctaaaaacaaaacagagcttggcttccctcacagcccagcttattacctgtgttatagcagtggtaatgcaagatttttatgagagtaaaatgtttactaagcattcctaaattttaaaaagattaattttaaaatgtcctcagcttgctacttgtgaggtacacaatgggtttatgaagtgaaagtgaaatcatcacacattaaccatagcatcccacagaaacattcagatggaggaaggatgtaatggaagaactaagggctctcctcccccctctcatagtaattagatttgaaaagtgaagtaatctcaaagccacttcagaagaaaaaaatgtttaattaaattccaatgttcaaaactggatagtgtgtatggcaggtgatttgtacatacatgttactcttcatcaaaattgttttccatccctgtgacatcaatacaaactgcagctatttggttccaaaccatagcaagatacattctattttttaaaatgtaaatggtcatttaaaatagaaataattcttttagacgtactgcatttttacaaatgtgattttggaaatatattgctcgcaaagggtaattttaagagaattgttgagattctaatcccatctttatgcatattttggggaggcttttgaaagagcaaaaaggtaaaagatttagttatcttctgagaccacctatagttctttacctaaagttgtagaagaaaaacgtcaatgcactgttactgttttccaatgaaattatttttcttccaactaaccaagcagtactttttaaatccactgcagaaatgtacatttcattcctgttgtgagccgttttcaattctcctccctccctctccccgcaacaaaatttggaaaaatctgtcacgtagcatccgcccaacgtatcgcttcgttgtattttttttttttttaattttgcattatgacaaaagtaaattctagcattactccagggaaacactgggaatgaacctggtaatgtttcctttcctttctcccttaggcaaaggaaggggaattctgtattgtcgctaaaatgagcgctcttggtggaaaggaattcctcacttcgtacacgctgtggctgtccttgaaagtgcaggctccgtaaaatgcccggccgactaaggggttccctttccccggagcccctgcctctttccattcattttagatcctcagtaaggaagggcagaggttggtctgtttcttcttttcaagagggcaccgcgctgcgcagttaacagcctgcgccgctccggggaaacccaaatgtcccgcgatcccatcgagtcaaggagcaaaagctgtgattgctatcagctttttgtcgggcttcaaactcggggtttatcggttgaaactcctagctgagcagctcccacgacgctgcctctgacggctaaactcggtgcatgcaaggctgggaccaactttccttactcgataaaggaacttgactccctcctgggagaccgcagcccgagtccgactcgcagcccccgtcgcggggtttagggttttaggcaagcggcccgagacccagaggagcctccctggacctttccgaggggcaaatcacccgagtctgctatttcccctggagtcaaaagcctacttttggagccgccacaccctcgtgctccctcccgcatctcgggggttccgggggatgcacgtgggggtggccccaggagccctgggtgggatctcggggaaatgcattggagaccaggcgaaaaggtttcccttgcccagaacttgcctctagagcgggccgcgtccgaacccgcaggcaaaggcgctgcggcccctgcgggcgggcgggcgcgcgcgatgcactcttctcagggacagagttagaaagtggacgtttgggcggggggagggggggatttacaactggaattaggcttaaaaaaatcattttaaaagaaaaatgtagtaagttttctttccgagaccccaggtccattaaaacaaaactgaactcgggtgctggcagtgcccagggggagcggaggcggagagggttgaggccgcgggccgcccgccttagccccccggaagcccgggctcctgaagcacagatagccaagagcggcccgagtcaagccccaggaacaggggcttcgggaagagaccccgaccgggccgcacagcggggaggcctggtccgagagtccccacctggccggctgcgactctatattggaacctcggaaacgcgccttggccgttccagctcaagtgggctctggggcggcttcctgtcttttatcctcgaacgctagttcttcccgggcgacccgaaggccacgaggcgggccgcacagccccgcgccgtcgggggcgttccgggagctccggggactgcgcgcggcgtccagggagggcggctgctgccccctggcgtccgccagagcccgcggcgcgtcccgacagctccgcgcagtccgggcccgcccgggaaaggcctccacgccagtcaaccccggccccctcctgcgtccgggcccgcggcaacgcccggggacagtccctgcgcggcagcggccacagcaccctagccctgggggagggaggagcgggcgtcaggggccccgtgaggtcggcgagggacccccgcgccggggagcttaattgaggggctccgcggggaccacaaagcagcccgcggtggaacggggccgggatccggggactgggttgcagccccggggtggatgagaggccccgggaggtgcagggcccggcagggagggcgtggagggactcatggtgacgggagcagcctccgctgggagggagccccgccgggcggggtcggagttggcagcgcacgccggaccgggggcggggccctccgagctccgcgaaaatgcccgcagcaccgcggggaccggcgcagggggaagcggccgcccgcacgcgaagccggggtgggttccgcacctggggccgctcgagcgcacgggggcggggagaggagcgggggccgcttccggggagccggaggggagacgcggggcccgggcaggctgtccggctgctgcgggtgccggcgctacaaggcccgggagcaagccgcgtggctgctttcaactttccttccagccgcgcgttcttggggtctttcctgactaggaaactcttcgctggccgctgacgcacgcagcaagtgagacgcgcggagggatcgagccgcggcccgggcgcagcggtaaaaaacacccattacagaaaccgacccaagggaagacgctgagagcaaacggcacgcgcggacgccgtccggcctcatgcaaggaatcagcgccgcttcgccgcagctgccagccggacggtgcaggagcgcggagtggctcccccgggccccgcggccaaatcgcacccccgccctggaagcggaggcctggccctgggcggccgcgcaggatctggggccgtccgcgggctgcagcccggttcgggagcctcgtggcggccactgcgcctgcctgcagcggctcgcggggccgggcctctccgggtgcggcgcgccggccgggtcctcctcgggccggcggggcctgctttctttttccaggtctccggaccgtggccactcgcggagccgcacaagcctgcgtgtggctgcggaaaggggtccgcacgcgggcggggccccgggccagcatgcaggcttggatgcggggcgcgggggtggcctccgactccccgcccgggctgcgtacagtagcgcgcggcgcggcggcgggggcgcgcgggccaattccaggagccggcggcggcgagccgcgccctggctgataccggaaaggcctgtgattggccgccggccgcccctatgcaaacgagctgagggaatggaattcctccggccgggcttacagtaaaagcacgttcatttccaggcactctcattcatagagccagcgggcgcgggcgggacgggcgccccgcggccggacccagccagggcaccacgctgcccggccctgcgccgccaggcacttctttccggggctcctagggacgccagaaggaagtcaacctctgctgcttctccttggcctgcgttggaccttcctttttttgttgtttttttttgtttttcccctttcttccttttgaattaactggcttcttggctggatgttttcaacttctttcctggctgcgaacttttccccaattgttttcctttt

SEQ ID NO: 3365 - DNA, 6000 bp, Homo sapiens
taccaacccggaatgttttccatcatttgaccaaacctcgaatgctgaacatttctaacattcaaagagggtttgtttaagttttccagttttaccctcctggtttcaaatgccaccagaagcagaagggccaaaactctgtaaggagaagctattttaaacaagctttctggcccagagcagcctgaaaggacccagatgcgtctgagagaagtagccaaacccctgggtgcctgcacaaatggagcctctggaacctgggaggcttggctgttccaaggaagcacaattcaagagtgggccctttcttttgcagcaaaggagggcatgacctcggcaaggcagtggctggagagcggggccaggcaaccctctgggagggggacagcccatggcaggactgcaaggccacctgcgacgctgcctgccacgtggacacgtgctgtgtgtctggaagaactcacaggattaatgtgtttccaaactgcagactaggtgaaaactgagagtctggtgcccccagaggaaaaagccttctgtttatatacacatggccaccagctaggcagatggagcacagggagagcctccctacattgtgtgtcaaacctcagactgtaaacttgacccaaacacggcacttgagatgagaggtccgagtgacaatccaagaaaatgctaccttagaggacgtgggccttgcctcttgtgggtttctgctgtctagaaacatccagggcttacaaaattatgtcagagcaacaaagtagaaaagtttcagaaagctcaaaggaagaaaaagacatctcaaagaatgcaaacaccatgttattatttctctactaaattccaatagatgcaaggctttcctcagcaatgtttctcaaactttaatgtgtatagaatcacccgaggaactgtaaaaatacagattctcattcagtaggcctgggatacagcccgcaatgcagagtctcaacaagttcctgggtgccatcgacactgctcacctgcagtctgcaagcagaggaggaagcagttgaaactctttcatttgaaataattctccctagctgctcttcatatcattacataacattcaagtggcaggttggtttcaatgtctgccttttttctttcttttttccttttgaaatcatatttccccaacaatacctcttcatctaggaaaggttaagaagtaaatactgaggccaggcgcggtggctcccgcctgtaatcccagcactttgggaggccgaggtgggtggatcacgaggtcagaagatcaagaccatcctggctaacacggtgaaaccccgtctctactaaagatacaaaaaattagccgggcgtggtgacgagcacctgtagtcccagctactcgggaggctgaggcaggagaatggcgtgaacctgggaggcggagcttgcagtgagctgagatcgcaccactgcactccagcctgggcgacagagcaagactgtgtctcaaaaaaaataaagtcttgggtagcttaaatttgaattgcacctttatctaaagaagtgagaggcctgtgcggaagagagatgtgtcctgtgtgggcaccatcatgagtgtccaggaaagaacatctttaatagctgggcttctagggctccctagctgtctcaaaccattggatttgccaaaagcaggttatagtcatcccatgaagctttgatgtctacgtcccaatttaaaaatcatccctgacctcactgtcagcatagcatggaagtttctggataggacatctgttagaaaacagatttagaaaataaggaaaatccacgctacatagagaaaattcagtagcattgtcctcctgggattttagactccatccaatttgggtggtccatctctgcctccattttctggccagagaatctactttataatagacatgtggagttcagagatagcatgcggcaatcatgtaatgaatatccctaacagagggtgctttgattggattggactgcacacagaagtctatacattaattacagggttatgcaggtaaacatctgtcaaccctttctagtattttcatagggccattaaaaaagacacctgagcattttctccccaccccgcccccccacccatggtggcatttagaagctgcagccaatatgagcgagaatgaaaactgtcatccaattccttggcaaagccacagtccactgcagactcttgggtacaatccccaagccagaaacccagggtctgagtcacttgcaggaactaggacagagggtgtgggtcaatacacaaacttaaagagtcctaaaccgttctagttaagttaggattaagtatttctccaggcggttcattgatgacagacgtgcccttttgtcttgggctcctagggaagtggtaaggccaagttcaccagcagctggctgaggctttacttattgtcatgacctggagggtgcccagaaaagctccaactgttgcctcaccaagctgcgaagttatgctgcggctgccgtggctgttaaccccgcccaggaaggccgtgcagggccagcgtgcaggcctttgtattctgccccctggtgccctgttgaaacctcagtcccgaagatgacagcgtatagtgaggcttcaacgagccccagccttagagtgtctttacactctaacctgtcctacaaagaccccactggaagaaatagatatctggctagagctaggcccaaagagaaaagttgagaattcaggccgttcactgcctcatccaaacccttctcctaagcatctggacacctaaggctaaaagcatctggggagtttctaaaattaaatctcccaaggatattctgtatggccccttgaattgctaagtcattattaagtgtgagtcgactctgcagtggcagctgcacattacagccctcggctcttagggcccttccagggaatattaagtgtgggagagaaaaatgaacctggtttggggttcaactcaggcttgactttattagggagggtaacaacacaggcccattatgttcattatgttcacaggggatttgcactgagaagcaatatgaaacacgcatcacatttaaagattcacgagcctcataaaagagatgtagcactattattcttttttagatgttagcagtgtcaacatgtggccagctaacttctcacaagtgtaagagaaagcggtctgttgagtttcaattcctgctttagtcaaaacaggagtaagtaaaaattgtgtctgttccttttgaaagacttgtgccatggaagctactatcgttgtgggtctttgtgtgtgtgaaattaagtggatgagggaaaaccgagggagtgttgtgggagttcagcctttctgaagtgcctgtgctggctactgcagcttagaatccaggactggcatttacaacccatcatcacacaggttctcttgaccctatgtgtcgaaatttcacgtgcgcagagtgctatggcggatgtaggcagagcagagccaaatgaataaggtagtaaatcaggaaaataagcctttcttcatcttggaactacaaaacaaaatgacgttttagttgtcagcaggtaaagccagtggggccggaaaatgaaatacgtgtgaccacagtggtttgcccacttacaaaattatcctgtttttagcatcttcaaacaggcatgtctttctaaggtagaggacgcgctatataatattcattagtcagccccaggagaagtgtctcctcctggttccccttctattgtggcatcctcatgtgctcaaagtgtagttttacctacaggtgtaaattagcctattgatttgaattgaactagagaaaggcaatacagggagctttcccaagtgacaatacaaataaacatctgcagagtaaccactgctttgtcccaaatacagaaattctctctgctttgttttcctttagcttcctaatttgtgtgtgtgtgtgtgtgtgtgtgtgtgtgtgtgtgtgtgttaagactgtactatgattttatctctttactgaaagagatacatactaaagttgtccatttagggggaataaaaccacataattttggtttcattaaaacagtccttttatttcaaaagtaaaattctttccctttcccaggctttaaaatacctgtgagttgccagcccgttgtaggggtcagactctcaccaaaacatttctttttatttatttttcccttttatagtttcacttatgccatgatagacgttaccaaggacttaactctcccggagctgatgcctagcattttaaatgatgggatccacatcctgtcggagcagcggcttgatgccagcgttgaattactattgaataagcagcaatgaaatctttatcaaaataatcagtagttccaaaaaccacaaataacaacaggagccgagttgtactaaatcagcaaagaccattgagatataataagtgactgagtcacttttttctacatccccccctcttgcaaagtctactcggctattttcttgcacagcctgggggagggcaggtggagggaaggaagggcattgctcagaaaagaaaaaaaaaaattgacatcacttaagtcacatgattggcaagaaccaattgagatgggctgtggaaaggggaacagttaaatttgtaatttgggttgtgtgaaaacttctttgggcctcataaacaaccacagaaccacaagttgggtagcctggcagtgtcagaagtctgaacccagcatagtggtcagcaggcaggacgaatcacactgaatgcaaaccacagggtttcgcagcgtggtgagcatcaccaacccacagccaaggcggcgctggctttttttttttttttaatctttaacaatttgaatatttgtttttacaaaggtgcattttttaatagggcttggggagtcccagaggtatccagcagaggggagaagaaagagagatgtagggctagaggggtgaggctgaaacagtgacctgtcttggttttcgctccgaaggtaaaagaaatcattgagtcccccgccttcagaagagggtgcattttcaggaggaagcgatggcttcagacagcatatttgagtcatttccttcgtacccacagtgcttcatgagaggtgagtacatgctggtcttgtaatatctacttttgctcagctttgcctgtaatgaaatggcagcttgtttcacctcggtgcagagatgcctcggtgcctgccagttccctgtcttgtttgtgagaggaattcaaactgaggcatatgattacaagtctattggattacttactaatcagatggaagctcttcagaaatgttttaataaatacttagttatgctgttggagtgttcagtcggtgcgtgagaactttgtcaagtgcgagtaagttgtgctggtcttgtttaaaggcttagagattatgaagcttgcacgaagctccctgggttttattttgctgtcccttgcccggaatgcctgtgtctgagttatccttaactcggcatgctgtgtggcccagaatgcagcctgccctggggcttagcaggcacatgcacagagccagccaggagggctggtgccagtgtggggcaggaggcggaggctctcagatagccttgcaccagcctggggacttcagggccaaagtggcaaggcagctgtctctataaggcagagagtacaggagactgacagacttggttaggttaaaatcatcagcatggggctgtgctgtgtttttccttgtagcctcaatgcaaagagacaaccagcatctttcaagagagaaaggaagcaaattgtggcataccgaggtctctctggaaaagggcaatagagaagtttcccgagttaagcattctcgcagcttaagtcgttagattacaggcttatgaataggaacagccagggtggaaaacctgtctccatttttgaaaccagcctcttgaa

SEQ ID NO: 3366 - DNA, 6000 bp, Homo sapiens
ccaccacgcctggcctttggtcttgttttgtttttcttccggggaagggcatcatttgggaagacaaagaggtccagagagtgggctcagctcagggctggagagggcagctgggaaccaccttctgctggctccctgcaaccctggctcagctctgcccctggacactgaacctctcttcatgcccagaactgccgaccgtattcccaggctcacaggaaagttaatatctgttctgtggtttgttgaaaagtccaaatctgactgtgtgattcaagccagtagcgtcaaactttggccggggagggttggtttttgggggaagcttggagaagtgagaagctaaatattgtgacatgagaagtttttctgttgattttaatgcactttgcatagttttccaaggctcttggcgctgggcggtggcctgattcattgtgtaacatgaggctgccatggatgaggctcaataatacttgggtgtgtggtttgtcgtctgggaacctgggtgtgcacgctctgtattttcttgccaaccagaaatcttgagcaaatgaccagctcatcaacataacatttcttcctgacccttgatgtgccagtgagttcttgaaaattactaccatgtgacagctttttggtggtctctgtgtggaggagacagaaaggaatcaattgtataaaaattggcaccacacttggcattttggcaggccctctcagaaaagtggctgttgtcgtataaaatgatctgctttgtcaagggtgggtgggaaggaacgctgagcttctagctcatattgggttgttgaaagtcaacctcctggaaaacattgttgaaatcaggaagccaagtatattatgggtatgggaagattgagatggaagttcctaagatctaggtgaaatccaagaagctggtggcagggagcaaaatctttttttttttttttttttttttatagaaaagctctttgttttgaaataattgtagattcataggaagttgcaaaaaatatacaaggatattccatgtttcctttacttccgtcacatcttgcataactgtagtatgagaggaagtcattaaatgaagccaagtgcttttgaggtagctaattgacacttctgacaatgcaatcatgatcctattatggagataacagcagcaaaaaaaagttttttgagcccctgctatttgtcaatataccgagcattgggaaggtaaacagatcagtcccggttcctccctttggagggggttacagaacgagcagggggactgacattaaataaatcattatgcagctaattcgttaattactgttgtgataagtgctataaaatggaaatatagtcaaaagaaaaaaataatttcatgaaaagagaccttaaaaatttccatgaagtttaatcatcttaaaattttctaaacattctataggagtggtaactttgaagtttgctcctactatcaactttataatcgtgtcctttttgggaataatttttccaaattttcttctttttcttttttagaactgtgaagccaactatgcagcgatgactgtacccacagatgtaagtttatgaggatattattaatatacgtcgaaaatttggctgcagaaagaaaattagacttcagaaatctgttctgcaatatcaccagcaattaaaacatgctcctgccaaggggcacgattcttgaacattggctgtgtttgatgagacgctaacatcttttcaatagcaaagcttcctgcctttagttccagagggtagatttgcaaaccacattgagaggtcaaatgcataaggttcactcatgtagttcagcaatgcaatctaatttggaatccttagggtttaagtgaagagaggaacaattagatttatgttccctgttgaactcaagatgtggtatccaggcaactcaagctgaacgcacccaagatagcgaccctacccacctccttggtaaactctgcacaggtggtggaaataatacctggataaatatcactggtcacttaggaaattttctttatatcaacatttgctgtgggaggttctcacgtctcctggcttttgccaagcaaacagtgtacttcagacaagaagcaggaaacagaggtttgtcagaaggtgctgggagtccttggccttatcagtgatgtcagccaggttattcgactgatcgccagctccagtttgtgtgagatgctgtcttgaattagaatacctgtccaagaagcacataatatttaaaagcgctgactttatgtttgtttaaaggggagcatctttgtaatgtttcattcctcattgatgtttggtgtcaatgagtctttcaaaatgcgcttagtatagaagcaagagctgcacttccattgccttattctaaataaaatggggaaagaaagccccgcaaaaatccaaagagcctcaaacgtagcttttcctccccttgtagggaaatcacaggatcagttcatgttaatcttgatgttaatccttttgttgaatttcacttttacaattattttttattttttattttttttgagacagtcttgctctgtcgcccaggctggagttcagtggctcaatcttggctcactgcaacctccacctcctgggctcaggtgattgtcctgcctcagcctcccgaatagctggaattacaggcatgcgccagcacacccggctaatttttgtatttttagtagagacagggttttaccatgttggccaggctggtctcgaactcctgacctcaggtgatccacctgcctgagcctcccaaagtgctgggattccaggcgtgagtcacagtacctggccaacttttgctataatttttaaataataatttttggtatttttttcagaatgttggagctgagatcgggagaatttgttattttcagtgaatgccagtgagcaggtgggtgtcctgttagacactggaagcctgatgtcccctaggcaggcagatgctgcgctaactcttggaggcaggccccagtcacttctgtattccccagggcctggcacataagctgtcatcagtggatgctggctgcgttgctgttgaaaacttgcagctggacgatgttggactttggagaagatatctgattttgaatcctggttctgccactcactcatctgagtccttgggcaaaccaattaacctctctgagccttgtttttgtttttgtttttcacatgtaaaatgaaaaataataggacccaccacatagagctggaaaaattaaatgagatgatatttagtgctttctatggaacctgaggtacgtgtacttgtagattgcctgtgtccccaattagagtgtaagccccatgtgcacaaggatttgtcttattcactgctgtatcccaatgcctggcacagagcaggtgctcaataactatttgtcagattaatgaatacaaatgtattaccaatttttctatgatattactgtaaaaagaaagagaacagtgtaaagattgggagaatgaagacatgagacaattatattggaaaacataaaattattggagagatatttgtgtcaatatgagttatctggatatatcagtattggacatcaattctacttttaagtatagttaatattttagttatggagtcattcatttttctggattatattttcaagattccagagagaaattgacttaccccttttaaaatctttaattgatatacatatatatatatatatatatatatatatttttttttttttttttgagacagagtttcactctgttgcccaggctgcagtggcgcaatctcagctcactacaacctctggctcccgggttcatgcaattttcctgcctcagcctcctgagtatctgggatttcaggtgcctgccaccacacccggctaattttgtttttagtggagatgggatttcaccatgttggccaggctggtctcaaactcctgacctcaagtgatccacccacctccacctcctaacatgctgggattacaggcgtgagccactgtgcccggccccatatattttaaacataattgtgtattcttatttttggctctccaccgaatatggcaatgactgtgactgtccctctcttccatgcactctcttcccctttcttatttcttgctatttttctctgcctccaagataaaatattacagtgcattaaaaatatttctgagaattaatgttgtagaggaatgtcagcttctcagggaaaagtttaaataaagtcaaaatagtgtttttccttaggggttactcacctttgtactaataattctataggcagccagtaattgacctgcccttgaaattaccagaatctggtgtcaattagtaatcaatttgggggatcaatatgtgtctaactgctgggactcaggctggcactgatgctactactttgcaaagtcacgagtggatttaaaagtgttttagggacaattcttgaacccaccaccagatgggaaaggtactccattgaagtggagtgtagcattgggtttgttcaaacaggttttgtcactttgctccttcctagactggatggttcgcatttttctggatgcaggaaagagagctattcacttgggctgtattttaacattttatgtaggaattaaagtacatgttgttacagattctgatactatatgtgctcttaaaatatccaaagggttacatattttcaacctttaagaggatgctattgacatgtaagtttgacttttttttcccctcaaagtaaactttggtttcccatttcataacttccaatcccctctcttccatgtcatcccccacgttctttgtcggatcattaacaataggttaatgattaagaacaagtgcgacagagatcaacagctctgcgttcaagtccaaactcttcccctcggcaaggcacgtgacctccctgtgcctcaggttcttgcagagtggaaatgcccacttcacagaatggctgagggtgtggatgaacggtggacgctcctgcccggcacccatgggtgctcacgacgattgtgttttactgttggctgcaatatgtcatgacttatcatgtgtgatccttgagtgaataggcaggtgagtgcaatatttctatacctctccggtacattagcatctcaaactccactaaatgataatttagttataaccccttgcttcctcctccccaccccacccccacttctgcataggtaaaataagtggttttcagtggtgagggtagaggatgagactactctgccagggaacatttggcaatgtctggagacatttttgattgggggtgggtattactgacatctactgtgtagaggccagggatgctactaaatatcctatcatgcacagaacagcccccctacaatagagaattatctggttccaaatgtcaatagtgctgaggttaagaaatactgggccaaaaaaaaaaaaaaaaaagagaaacactgggctaagtggtattcagtagaaggaaagttccctgtcctcagtctagtccattgaacttgattactttctacatatatactaatcaggacctatgctggactctggggccagtcccaaagaagaaaaggcatgaactcagaccaggacctgcaaagggtctgagattttactctacttacaagctgataagttagcttgttactgttttatggatgctggcagaagacacaagatccctgggtcagagacaaaggactttattattcatggcacagcaagctgaatgagcgtcatgttggcactggttccccttgcccctcaagtcccacaggggtaacctggatgtgccaacgtgaatgctaagcatgtagtgagtttacattttagctgatgaacactgaacttgggaatctacagctcttatggtaaacagtaagtctgctccttgtctgttactacgtttgctcttaaagtgacagaaattaa

SEQ ID NO: 3367 - DNA, 6000 bp, Homo sapiens
cacgaaactcttgagcgtttctgggttttcttaataaaatgaaaaaaaaaaagagctctatgcttgctgtagacatttaaaaaagaacaggcatttgggcatgctaaaaggtttgacacctacaagtattgtgggctgcactttttacagaacatgcctgtatttttcagatatttacaaaaatgaacaacattgcatgttacttacatatttttatattaggatataatttatgtttattacaaatttatgttttgaaaatataagtgaaccaaagaagaagaggggaaaaaacaaaaagcttctctgccattggtattataagatatagctgtcaatatttttactttgcctttttatttattttttattttttgactattacaaaaggttattggccgggcgtggtggctcacgcctgtaatcccagcactttgggaggctgaggcgagtggatcacaaggtcaagagatcgagaccatcctggccaacatggtgaaaacctgtctctactaaaaatacaaaaaattagccagggtggtggcgggcacctgtagtcccagctactcaggaggctgaggcaggagaatggcatgagcccaggaggcggagcttgcagtgagctgagatcacgccactgcactccagcctgggcgacagagtgagactcaaaaaaaaaaaaaaaaaaggttatttaacaaaaagtctaatatgaaaacatacatgacctaatttttacatatagtgaaacaggccctttggagaggggacatgggtttttctgttgaacagccattatttatactcattccaaagtttctaatatgatgatactatttccttgtattaccaccgttccaatactgttctgctgccaactagttgacatctccacacattcatctatgacaagattcataaagggatcgagtccccataatattccttggacatgtctgccaccattgcatttcatttttcaactcgggaaggttagcttcgctcatggtgtctattcctcaggttcacagatgctttggaacagaatgcacggccatccccaactgcctttttatttttaacaaaatgagtctatggatataattctcctatatactgtgattttttaactaaccaggtaaaatatcagagcagttttccatattgctaagtgttcatctacgacatcattttcctgcaatgtttttgaggaggaagggcgttccattgtagggatgtatagggcagggataaagacgtgaatgagtcatgagtgaatcttctgttgtgtccccacagatgtggaggttcagacggatctcctctctttgctctgcgcatgtattacattgagaaccatgtggctgtcattcagagtgttcttagctcctaaccttcctccccatattccatacagagaagttagtaagggaacaagaatgagaacttgttcgatctttagaaaatgggaagaaatgattttaggataaataaatactagtgtttcttttattgtgacagtgaatttatggtatatttatgttatattattttgtttctttctttggagtaaaatgtgaggagactagtggaaggttttggcagattcacaggggatgggtttgtggcagagaagcatgcaagggaaatgtgtgctttattcataggttctgctgtccacagctactgtatgggctgtgctggtctagtgtggtgattactgcatctcaaggagagtgaaaaaggaccctgccctgataggctcatggcaggacgggcctcaggtaggggccgtgtgccagattgccccctaacttggtccgcgtggtggcttggagggcatatttccctagggagaggaggtatcaggtgggaaaggcagcctggttcttaggctgctgggtggtgtagggatgaggccatttaataacatagacttggggtacaagtgaggaaagctagagtgatatctatatcttcagataatttccccataggataatatttgggaaacggtttctgcactgctatattctagttaatagatgtgccttggccgggcgtggtggttcacgtctttaatcccagcactttgggaggctgaggcgggtggatcatgaagtcaggagatcgagaccatcctggctaatatggtgaaaccccgtctctactaaaaatacaaaaaaaattagccaggtgtggtggcgggcgcctgcagtcccagctactcgggaggctgaggcaggagaatggcgtgaagctgggaggcggagcttgcagtgagccgagatcgcgccactgcactccagcctgggcgacagcaagattccgtcccaaaaaaaaaaaaaaaaaaaaaaaagatgtgccttgtcctatcaagagccaaagatttttttaaaacactttacattaaatagtcagagattaccaggcttggatgctatgatgccatttgaaacatcaagaattattctctttgaagacaacaggaatcaatcaaacattttgtcattagaaatgaggaggagtttcctttgtaaaattttggaacagaatttaccactcagtatccccaaattaactttttattagatcactttttatgtttgtatgcatttccaaaattagacgcagtaaaacttatggatcgaatattgatcaaataatagcatctgtttttctcttttttagtatccaataaataaatttgtctcttataaaacaatatttttattagttagaaaatgatggatatatgcatgcatgtatgttatacataaataaatatgggagagagagacagagattgagagagagagagcatgtgtgagagaaagcagagaaaatgatgtacattggcaccagtagacaatcagagttaaccaggcaaagggtattaggagtttggtgtattatcttgtggcttttctgtaagttggaaattatttcaaaatagagaggtaagaaatcccactcttcacagtttgatttgcattaggcaagaaccagggagttaaggccaaatcatcactgaagcattaggtcccagtagaaatgctgatctttcctgctgcagggaacaactgagggctggattagcaaccacgaggcgtgggtgaggcgggaccacacaggattttcttccgtggctatttcattagcaaagcgttcatcttatttaaagctggtgtttggtaaaggcataatcaggtgccatgtgttgtggaggccacagttaacattttacattgatgcttcttaggagagaacaaaaagcaaggacactcagggaagctgagagagcttttctcctccgcactccagaattctagtggaagctgcccagataaaacagctcaggactttgaaattttcggggaaacagaattttaatcagcctgccatcttattcattgttcagagatgaaaagagcggaaatcaacaccccctcataatgtaggtgctgagaacttaggttctgatttccacagaatgattttcttacaatatactctctttcttttcttttccttctttctttccctccctccctccctttctccttccttcctccctccttcctcccatcctccttcctttctctctctcttctgtccttcctttctccttctccattttttctcgccctcttccctccctcctcctcctcctctccttcctctccctttccccccttatctttctccttctcctccttcttttgtcctaacatgaggtgataaatcagaggtatataataaaagccagaatgacctgggctggtggacagaactctgacacatgccggcctaaagtctgagtgaaatccatttactgaacgtccagctctgcaaccaggaattgtcagatgactcaggatttagtctattgtgttcttggggtcgcctattgagaccacacctctttatgggtcctgcgttcctgtagctagattcaaagcaaaatgtttcttccaagcaatttcctgaaaatgagtaattaaagtcctgaaaccctctaaggaatgttcaggcctgcattcgctgtacttccttcgaggagaaaacagacctgtgaccctgaacttatagcttggattttagacatgtaatggggccctcacatggcatctctgggtagccaaaagttctatgaggatctgttgtctgcaacatggatgtctgtcagagtgagaccagctcactgatattccgggacatttgtagtcacttcagttatttgggttttaataaatacttgaaaacaagacttaggaaggtttatttttcctctttattttttgtgtttactgtaagcctagagtccttgcgttttcaacaactttgttgtagagcaaataaaaagtgcaggtatttggaaggagaaaatgaaactgttctggaacacttatatgaaatgttgaataaatataggttgttaaaaatcagccaggcaatggctgttactgaacatggccatctattaacatgaaataaactccacctgcaaagtttccttttaggagaaaggagctcaagtcctctgtcctagtaattctgcgaagaattgggctgcgaagggctgacacccagggcagtggggtgccctcaacgccttggctccaaggtgcttgcagcccgtgtgaagccatgcggagtcccatcacatctgcatcctgccttggtctcagtgcagtgtgtcacacggcggcacaccggtcacacctgctgtggcagtccccatcccaattgatgccttttctttttttaattaaaaaaaaaaaatctcctggctgcatatcatcaagaaaaacaacattgttttcagggtctcttatctctccactcccaaatatcctgtttctttgggctggacagccaggaccaatagaaacctcttcctgccattggctgacttcatttcccagacttagcacaatctcatccgctctaaacaacctcatcaaaactactttctggtcagagagaagcaataattattattaacatttattaacgatcaataaacttgatcgcattatggccagcactattaaggtaaggaaagggttccttttaatttgacaaaatcttgttcttgttactcttttctttggtttcctttatcaaggcagataagttagggttgggcaacacccccactgccacaatagaggacaacaagatttcctttgcactgcctagtaaatttcctttttcctactccaaccatccgcaaggcttaaaaacttcaaactcagaaaaaaattggggtttctaaattcactgttgagtgctgtggattacttttggaaaggcttttcggagcgcttctgaattttcagattctctaactatccctaacggtgcctggatgtgtgtctgagaaaaggcagcagactcggagaggttgaagggtcgggtcaaagcaaaagatgcgtttgtgaatgtcagacatttggaggctcttcagtggctccttagcatcagggatgccaggcagtcccagtggaagcgaagagatactcggcaagtggctgctggtaatgggacgcaaatgttgacttgatttgtgggacatccacgctgagaactgagtgctcacgtaactcaaatgggggtaatttggtttgttccactatatgtttatcttcaataaaatacctactgtctgtgcactgtgagtaagatttcttccagcaatggttaggtttgcggagattggaaagcaatggccggtcggttctctgtgctgtggggtgtttggtctgatgcatttccttgcctaagtttttagtagatagcatgtagagattaatgtggaggtaaatctgcacaggtacaatcctaaatatggcctgattcctggaaatgaagccaatttaatggtgactacaagtcaaggggcatgcagtcttgaatgggggtccgttcagttgttttaaaggccaccatgccttcgtgacatttgtagaaatgtgaaaaatcagcaacaaaagc

SEQ ID NO: 3368 - DNA, 6000 bp, Homo sapiens
cgcccggcccactgtgcctaattttgaaatttttttgtatagatggggttttgccatgtttctcatattgctctcgaactccttccaccttggcctcccaaagcactgggattacatgtttgagccactgtgcctggccagaggttcattttaaaaatgtgctttcccagagatgtctgataagatgaagatttcggaatgccttcatcattcacttgatggccataatgtcaagcccgctatcctggaagtccattgcaactacctggggagtttcaaatatacctgccagtgccatggtggtctccctgtcccctgagattctgattcactgggtctgagatggcacccagatgatggcaatagttttgaagctccatcatcaaagtgtatttgatgtggaggcaggccccagaacgctgctgtgtagactatagttctccacccatacaaggtagatataggatgcaaaggtaacagaacccatcccagaaaggcacacctcttgctgcagtgctgctgaagagaagcaagaagtgtgtgcataagagtttatcaaagagaagtaaattcccaagaggtttccccttaatcaatcaattagtcgctaccccaaagaatagagatgaagatgaataacccaagttcttcactggaagatcctgtgtttagtatatttgaggtcatccacctcaacagcttcagttattaaataagaaaattgaagccttaatcaagtggttatgacttgcccaaggtcatgtgggtgctaagtgctggatacctggtcacatgcattcctaataattgctggtgcattatatctgcagtggaattttcacccgtttaaattgcatcaggtcatccataatcctaacataatgatttactattttaggatacaaaagagaacttaagatattgcttttatttgcactgatgtactgttatgctagtgtatcagtctgttttcacgctgctgataaagacataccccagactgggaagaaaaagaggttggattggacttacagttccacatggctggagaggcctcagaatcatggcgagaggcgaaaggcatttcttacacgaaagcagcaagagaaaaatgaggaaaaagcaaaagcggaaacccctgataaacccatcagatcttgtgagacttattcactatcacgagaatagcacgggaaagaccggcccccatgattcaattacctccccttgcgcccctcccacaacatctgggaattctgggagatttgggtggggacacagccaaaccatatcagctagtgactttatcgatacaaaaaaatcactgagaagaaattgtctcaattttctaaaattgcaactagttttacactcatgagtaatcatgttatgataatgtacacaacaaaattgttcatgatagatttagtgtcatagtatacgaagttcaaaactgaaccgtctaattgtcagaaaagctggagcaaatctcctgttgtactctatgtaattccactttaaaaatacaaatagactctcctgacttattttgtataacctttgtcaccaaagctcattgacagatgtacaatgtgtttcatatcaacttattttgtgtgttatgcaagttgataggaattaagcattatgcaattttacggagcagtttgtggtcaccacgtgttattgagaactgctgtgtgtactaaagacttaaactgcatctgacgtagattaaaaaagtgcttcagagggtgagagtgttgcatgaaattagtttgtctggaaggataaagaacacctaaaactgacttcttaacagcaagtaataaaagataatagtgatgcttgtgtactaggttaagagactcccctaagagaagacacacatctgtcctcctgttcgctaatagtcagtgatggaaatcagggaatgagtgagggtggtgagggagagagggacccagggatgctccacttggaacccccaactgttgtgttctgacatgtattcccattgcttccatgtcttggttgcttgagtgagtgtgttctaatcatttgccatgagggaaagcagaactaggaatgggacaggacaggggcctccaatgactcctgagcttccgagctgcccgacccatttgcatgatgaaaagaaggtcccaggtgattgggtggagattgtgggggtagggctcaggtgcctggcagtggctgaagcctgagagctatctgctttctcaaaccacggccatcctcagaatggcttcaagccagatttgagctcaccaaagatgtgaatgggtcagtgtgaggaacctcactccagtaccccgtttaaaacagaatctgagacttcctcccttgtgagcatttactgtagagggatacgctgccctttccatatttaacacacgcacacgcagactgctaagccataaagtaagctcaaagacgctccgtgcaaggacaacaaaaaccagacctttcaaaatgataaccaggattttataactcataacaccatgcatgttatattaaaagtggaagactttttgaactgcaacctttacatcccaatccaatagttctttcagctttgaaatatccacaatctgaattttatagggattatttttattataggtaaagcaattaaatctccatattgagggatgaaaaccttttaaagcccttctcagaatatcaaaagaaaaggaggcttatatttaacaggtgtgacaacccaacacaggacatttcattgaaaaggagcttgacattatccagtaacaaatacttaaattaatccaaaacatcttttggataaaagggattttaaaatgaattaggtcgaccacaaaactttatataaaaagaagaccatctcatgtatgaaatactttaaaatactaattcttatggaatgtgtcaagtggtgtttttataaaaactttccttttaaatgacattttaattagaattatgatgtttgtcctgcaatacagaacgtgaagttgtctcttagttttctttcggcctctcaagttaactgaaatgatttaattcattgaaactgatttcctcctatttgacctaaatcatgggtcagactgaagggaatgctgcggccataggtagggattagattagacagcagaaagaacatcctaactataactacaagatgcaatcagttggaggagatgatgtcatatgcaaaattctaggatttgggatactgagattcttcaaggttaatgacccacattttatgaatgggatcggtatgcgtctttcatgttttaagaaattatctttctctctctctctctctctccttctgcagtgtcttttgggggaactggagatggtagtgagggagagtcacaaacaacattgtttcaaatattgggtttttactgagctcattttgaaatcatgttccttctactattaaagtgcagttcattattcttaaaacgttaaatgttattttgttcatcagcacgcatattgtttttagcactgttctatattgtgataatattcaccatatactgatgatgattgagaaacgttggcagcgtattaaaaaacttttagagtattaaaaaagagtcattggcctgtgggctactgattttattgaataggttcagaacctgtttactttaaagcattcccctaaatgttaagggttcactatggtgagacttgaaaattagtggctaattggaagatttcaaaatccagtgaaatatcttggatctggaatatttggagaataattagaaagaaaaggaaccaaaatatgcatttggtagttaaggagattcagatcgaatctttttgaaggccatgtgaactggagtatggggacttctgtgtgatttgtgagcacattcaatactaaaggaaatgcaatcgactttgcaaatgacgattcgagcacagagtggataaactgacaagaccctattactaaatacccactttgaaatatacattctgttctttgtacctcaggggacaaaaagggtgcatgcttgtcagaaatttaatctgttttcaatatttatttttattggtatcttctcttggccacctatggagaggtgggcttgtatcccaactaccatggtgtgcctgattgttcaagaaatttcctaggaatgcatttgtagtttcacgaaggctgtccatcttaacaggggaaaaacttccttggctggagtctcacattttaatgagctcattttggcatctctagggttaaagatcctctcagaacctataggtactggaaaaggcggtttctaaactcagctgctcaggtccattttatttttttcccccagcaaacaggaaatggagccctgaaactttttttttttttcctaactggaaagtgcgcggggagggggcacactcaccctgcccacatccaaccctgagcctgacccagacttgggggtctccgtgtgttttttcttccctctctttttttctattattttggcagactttttggaatgtctgggagctaagggctttgcttcatggagcagaattctgaagcaagaaaaagagaaagttatagactaaaccacagaaatgtaaacacgtctgcagctaaaataactccactttcattgaaaacactcctccctcacaatcagacttctgtgtgctatggtcaataaaactgcatgttaatagcgaccaattaatagattatgttgctcggccttaaaagttgagggagttttaattattatttttcaaattaaaggagtgcttattccctcccttcccttggggtggggggcggggggagacttagctttctttctggctgtttgctgaaattcttggctgttaaagtttggagagggagggacatgggtagttttcacttggtcggaatggggagagtgtgcaagagatcgctgcgggacaggttcctagagatcgctccgggacggtcgtgacggcccccgagggacatgagagaagaggagcggcgctcaggtaagctggattttgcggtcggaattcgcgtagaaacgaaaacttctggaaggggcttagccccgagccccggaggcggacaagctgagcctcctggctgcaccctttggaggctgctggttgcagacgccgtcgtctcccaagggcggctgtcaccgcgtgcgtcggtcagaccaggccgcggtgccctcggcatccccgcgtcccggcggctgtatccggctcctccccacgaccgaggtcccgggcaccgcgcctctccctccggacgctctgcgcgacgtcgtcccagttctcatcagcatcgagggcagtccgcggtcattttataaacgtcttagtgtcgcaaccgttttcacttttactattttcaatgtttgcaacggttttcaatgaggctggaaaaatatcacttctcgctaaaagcgaccccgagttaggaggagcgcgcacccccgcggctccccctcccacactttccctcccctgaccccctctcctcccctctggtccttcccttgctcctcgcccctccagtagtcgcgtgctgggttcctttcctgctggggccggactctctcctccggccgtcccagcctctgctcctccgcctccctcctcctcttcctcctcctccgcctcctcctcttcctcctcctcttcctcccggagccgccagccgcgtcctaaacccgagcagggcgcgtagtgtccaaacctgcccgcgcggcccgcgctcttggccccgagggcgcgcgcacggacacgcgagcacacccacacccacgcgcacacggacacgcgcgcactcgaagactcccgcgcgctcgcacccacgcgcacctggccacgcgcgtgcattcccgcccacgcgtccctgccccgcccccggcgcgcactccgggttcgcaagtcgcgcgtcggggcggccgccctgctccgcgattggcgggagccggagcc

SEQ ID NO: 3369 - DNA, 6000 bp, Homo sapiens
atgagaaacaaatttctgttgtttacaaattccccagtcaaatgtattttgtcatagcaggagaagtggactaagacatggatcaattttatggtgagttatacgtcagtaaaggtgtttctataggtgtctgtcacacacatatgcatacatagatgcacaaacacacaaatacaatgttcttttgtgacttctaaaaaagtttaatcacaaatggaagtatttacactcagccaggagaatctgtaaacatgccctttcaattccattgtcaaacaagaaagaatggtttcaaggcactgagacagagtgagtacgacatggaaacccaaccctaccttgggagcaggggctgacaacccaccactaggatgtaccctgtgtatctgtagtgctggctccctgcacacagggcaaggtcccgtccaggaccatctgcagaatttgcaaggcccagtgcaaaatgaaaatgggcctcttatgcaaaacttattacaaatttcaagatggtgaccacaaagaattaagccaagtgtttctttacgcttttaagaggtatttccttgctagaactggggcaactcccatggcgttcagtgagaatcttccagaagatgagggctggtgtcctatgccttaagagctaagagtggaggtgctggccctcctctggttcttcaacctgcaccaaaggggcatgtcccaggtggtgaccactggaatttagaggtaaaggcagcatttgcctggagcagagaacacgaggtgaggcgggatgactctacaccacagccatagataagaggtactaatagctcagtcggtctgaaagagacacacttaaagtcataaatgggaagacgtgggtggaaagtcttgcagcaattggaaagccattccaccaaagacgtgttataacttaaaaatattccaacttctgaatgatttctttatacacctgcttaagtcggtgacattattcagccttaacactttaatccaagttttattttgtcaccaaaatgtgagttaagctaacttaatcatttgctagactgactggcacaggaatgactaactcttggtttgtgtgaagactagtggttcagttttctagttagcaaaatacataagccgatgcactgaggattattcagttccatgcatactgttggaatcattttgtgattcagacaaaaacacacaactataaaatcatatatctgtacacgtctgactcagttcagacacatttatttagggattatcagttttacagaatacaacgggtcgctattactattttggttgttcagacttgcctaaagcacgtcactgtgcagtttgatatcatggtggattttcaagcggtttataccctcccagagtactgccttataagggaaaatgactgtgtcagggtggcagtgtgctggacgagggggcaggaggcctggagtgtggccccagctttgccaggaaataggcatttgaccctgggcaaggaattgatcctccctgggtctcagtttctgcatcttacaaaccagagttggtctgagccatcagctctctgaagttttttccagttttaaaatccaatgtttcattttctcgtttctgaccaccaaaggcaagaaaaacatagtcaaagacaccatggttcccattgacagcactgggattgattttataccttgttgtcaaccaaaagtgccagtgcagggcagcagtgatcagcgatgcccgcaggagaccaagacttccagggccaggggacctgctacttatttatcacacacttaatgacacgccagacactgttctaagtgcttgggagacattaacagagggaggccccgaggggcccacaggtggcctgctagggaatggctgggcgggatttgaccccaggcagtctgggcccacaggctgcccttcagaggtgaagacggtagccctagctgggtaaccatgtcttcatgcccacagggagtgcaagggacaaaggaggctgacaaggagcagaaggaattagaaaggagcattagcaacgtttttgaccaccagcagaataccctatctgccattccaaggaatctcacagaaaagactagacactggccaactcttgcataatctgggtccaccctgatggagcaggaggcagctccacggccccacatctgcctaggattcttggtagctgggccagcctgcaaatgggcaaggttggttggattcggaggtgggcggaagtgtgggttaagcttatcaagtccttgaccccaacatatatcagtgaaatagccaccactgccagacaccccagcaggccagatgcaggcggcagcttacacatgaggaaatgatttctatctctaggttcattcttttcttcctccactccttaccaaagtctcactgtgcatgtgattttaactgaactgtgcacttcacttttacttcttgagggcgggaactaactaagccttaatcatatttgtcttctcagcatctgactctgtgtttgctaagtgaatgaatgatgcacttcggaccaaatgacgtctgtttaacttgcaactggaaaccaccacaaactgcctgttgactactgatttggattttaaggtaaatacagacatgtttctaaggagacgtttttgtgtgtgttttttttcaaaggatgacttcgtaagctagctaatcatttctcataattatgtctggattctaaagaattctttttctgcattttactctctagatatttcatgttcgtaacacatatattctactgtaatatcccttttcctcctctcttctgtgaatgtccctctttcttaaggggaaagtgttaacattgctcataactcagtctgccatagcgcatctgatcactccaccctgtgcaccttctgacttttaatttccttccaacaccctcgacttttgatctccaagcacaagggctatacttttatttattaggtttaatttactgtaaagctcattgttccctgtgaatcgcacgataacagtcaatgaataatcactggcttcagccagactgctttttaattctgctgagtaactggcaagccaactagtattaaggacaaaaatgtaaggaaccctgatattgccccagaactaggataagccattttattatgaacatgtgactgccctcgtgcagaggtggatcagctacagggcaggacccagggcaagggggctgcttggggcagcctcagactctttggaaggggaaatagggaggaccagggacctgggtgggaggcaggagcttaggcttacgatgaccccagcacacaggcccagcttcctcttcccacagcctccctgccgtcttagctctgccatttggtcttccggccgggatccctttcccaaggctttcacacatttaaacccgcgaggggcaggactttttttttttttttcgtgtatatgatagttttttcaaaatgttttctataaaatcctccctgaggagagcttggaaaaagattcttaatagctagatcattttgagtccttctctaccatgtactcaacactctaacatattctgcacatttggttctatgtcatttgccatagtcttaaggacgtaggttccataatcatcccttattctgtagaggaggcccaaggttagtgagcagaggaaggttccactgtcgggaaccggtggtcttcaaactcctgtgctcctcttttgatatctttctgctcatatatgttggaaacagcccagcatgagcaaagcaccacctcctagcccccagcctgtgccagccctgcaaagaggaaatatggctccactcagggagcccatcagcgactcagggagccctggagcacctggcactcagcacccatgaacacgagggcaggcatggtgggacaaggcagtctgcttggggcaagtgagcttcgggaagtagctgagctttggggagcagctgtctatacccagcttctcagggctgtgcaagtagcctgagggagaaagaccctatattagctgaaactgcagcccagatgagtcagtattttctgctacggttttttaaaaaaatagtaacatactcatgtctccatggtaacttactatggatctgtattccatttatggaactctttcttgacctatctgtgttctctaatctgggcctgaatatacactgagaagccatcagaatcaattcagtctccaagaaataatcacttcccctatacgtgattgtttcagccgtatagattctgactgtgactcatgccacggtgatacccggagaccttcggggacccagaaacattaaggtgcaccgatatctcaattatccggataactctagacctagagtcaccatggaaacctagaaccctgagtcacagagaagctgggccattcctctcccttcccggtggtgccgcagttcttgagatgtgagcagctttcagccccgtggcctcgcctaagctggggtttcctatttcatccacaacttcaggaatctaaactttcctgcaaaatattgagcatgtgacctgagtccaaacagccatggactcaagcaccttctgataaaaacggaaaccacagtgtagggggtggttttgaccagggtttcggagtcagataaactcaggtttccaccttgaatttctcatcaatctgacgtggcaggttattcatcctaaggttcagttcccacctgtgtaaagtgggagccgcaagtcctccgagagtgacgatgatgtgcgtggagtgcccagcccagattgaagcgcggccaaggcgggtcgctatctgggcaccgctcagctccagagggcgccactcccgcggagcctgcgggatcggggcttcccgggagcagcgcgatcagcaccacgactcggggacacagccagggcccggtttctacaggaagcgcctcatttggagcctttttgtgatagaatgatcattagtcctaagcccattcagaggttcaagaatggggtcggctcaatttcagggccttattacccaagcccggctgcccttcggtgccaccagcaccactgctccgtcgctgcggaattccaaaggcaggtttggcgttagggccttggccccagagaggacgccgagcgctccacggaaagtctccgcccggctcccagggcgcacactcgcgcgcacgtggggccgaggccctgctcccggggcctcagggccagccggcgagggacccagccgagtgacagcaggaggcggagggaaggttgggccggaaggtgtcagccccgccccgcgctccctcgccgcctccgccctcctcttctctcccctcgtgcgttccctctcctctccctccgctcccccaaccctcctgctgcccccttccctctcctcccgcttctccccatcctgcctacctcccttcccctcctcttctctctcctccccttccctcccctctctcttctctcctccctcgtttcctcccctcccctccactcggccgtccctccttcctcctccctcctccctcctcctcccgctcctgaagagcgcgccgcgtgggggacggcccggttacttcctccagagactgacgagtgcggtgtcgctccagctcagagctcccggagccgcccggccagcgtccggcctccctgatcgtctctggccggcgccctcgccctcgcccggcgcgcaccgagcagccgcgggcgccgagcagccaccgtcccgaccaagcgccggccctgcccgcagcggcagggtaagagctgggcccgcagagagcgcccggcgcgcggctccagtcccatggagggtcacccggggcctgggcgggggtcgcggggggcactgacacgcagatctcggggcgctgccgggggtgcaggtgggggtggcggctgctgcgaggactctaggggcgcgcgtctgagttccgcgccggctcgttt

SEQ ID NO: 3370 - DNA, 6000 bp, Homo sapiens
tcaacctgcaccaaaggggcatgtcccaggtggtgaccactggaatttagaggtaaaggcagcatttgcctggagcagagaacacgaggtgaggcgggatgactctacaccacagccatagataagaggtactaatagctcagtcggtctgaaagagacacacttaaagtcataaatgggaagacgtgggtggaaagtcttgcagcaattggaaagccattccaccaaagacgtgttataacttaaaaatattccaacttctgaatgatttctttatacacctgcttaagtcggtgacattattcagccttaacactttaatccaagttttattttgtcaccaaaatgtgagttaagctaacttaatcatttgctagactgactggcacaggaatgactaactcttggtttgtgtgaagactagtggttcagttttctagttagcaaaatacataagccgatgcactgaggattattcagttccatgcatactgttggaatcattttgtgattcagacaaaaacacacaactataaaatcatatatctgtacacgtctgactcagttcagacacatttatttagggattatcagttttacagaatacaacgggtcgctattactattttggttgttcagacttgcctaaagcacgtcactgtgcagtttgatatcatggtggattttcaagcggtttataccctcccagagtactgccttataagggaaaatgactgtgtcagggtggcagtgtgctggacgagggggcaggaggcctggagtgtggccccagctttgccaggaaataggcatttgaccctgggcaaggaattgatcctccctgggtctcagtttctgcatcttacaaaccagagttggtctgagccatcagctctctgaagttttttccagttttaaaatccaatgtttcattttctcgtttctgaccaccaaaggcaagaaaaacatagtcaaagacaccatggttcccattgacagcactgggattgattttataccttgttgtcaaccaaaagtgccagtgcagggcagcagtgatcagcgatgcccgcaggagaccaagacttccagggccaggggacctgctacttatttatcacacacttaatgacacgccagacactgttctaagtgcttgggagacattaacagagggaggccccgaggggcccacaggtggcctgctagggaatggctgggcgggatttgaccccaggcagtctgggcccacaggctgcccttcagaggtgaagacggtagccctagctgggtaaccatgtcttcatgcccacagggagtgcaagggacaaaggaggctgacaaggagcagaaggaattagaaaggagcattagcaacgtttttgaccaccagcagaataccctatctgccattccaaggaatctcacagaaaagactagacactggccaactcttgcataatctgggtccaccctgatggagcaggaggcagctccacggccccacatctgcctaggattcttggtagctgggccagcctgcaaatgggcaaggttggttggattcggaggtgggcggaagtgtgggttaagcttatcaagtccttgaccccaacatatatcagtgaaatagccaccactgccagacaccccagcaggccagatgcaggcggcagcttacacatgaggaaatgatttctatctctaggttcattcttttcttcctccactccttaccaaagtctcactgtgcatgtgattttaactgaactgtgcacttcacttttacttcttgagggcgggaactaactaagccttaatcatatttgtcttctcagcatctgactctgtgtttgctaagtgaatgaatgatgcacttcggaccaaatgacgtctgtttaacttgcaactggaaaccaccacaaactgcctgttgactactgatttggattttaaggtaaatacagacatgtttctaaggagacgtttttgtgtgtgttttttttcaaaggatgacttcgtaagctagctaatcatttctcataattatgtctggattctaaagaattctttttctgcattttactctctagatatttcatgttcgtaacacatatattctactgtaatatcccttttcctcctctcttctgtgaatgtccctctttcttaaggggaaagtgttaacattgctcataactcagtctgccatagcgcatctgatcactccaccctgtgcaccttctgacttttaatttccttccaacaccctcgacttttgatctccaagcacaagggctatacttttatttattaggtttaatttactgtaaagctcattgttccctgtgaatcgcacgataacagtcaatgaataatcactggcttcagccagactgctttttaattctgctgagtaactggcaagccaactagtattaaggacaaaaatgtaaggaaccctgatattgccccagaactaggataagccattttattatgaacatgtgactgccctcgtgcagaggtggatcagctacagggcaggacccagggcaagggggctgcttggggcagcctcagactctttggaaggggaaatagggaggaccagggacctgggtgggaggcaggagcttaggcttacgatgaccccagcacacaggcccagcttcctcttcccacagcctccctgccgtcttagctctgccatttggtcttccggccgggatccctttcccaaggctttcacacatttaaacccgcgaggggcaggactttttttttttttttcgtgtatatgatagttttttcaaaatgttttctataaaatcctccctgaggagagcttggaaaaagattcttaatagctagatcattttgagtccttctctaccatgtactcaacactctaacatattctgcacatttggttctatgtcatttgccatagtcttaaggacgtaggttccataatcatcccttattctgtagaggaggcccaaggttagtgagcagaggaaggttccactgtcgggaaccggtggtcttcaaactcctgtgctcctcttttgatatctttctgctcatatatgttggaaacagcccagcatgagcaaagcaccacctcctagcccccagcctgtgccagccctgcaaagaggaaatatggctccactcagggagcccatcagcgactcagggagccctggagcacctggcactcagcacccatgaacacgagggcaggcatggtgggacaaggcagtctgcttggggcaagtgagcttcgggaagtagctgagctttggggagcagctgtctatacccagcttctcagggctgtgcaagtagcctgagggagaaagaccctatattagctgaaactgcagcccagatgagtcagtattttctgctacggttttttaaaaaaatagtaacatactcatgtctccatggtaacttactatggatctgtattccatttatggaactctttcttgacctatctgtgttctctaatctgggcctgaatatacactgagaagccatcagaatcaattcagtctccaagaaataatcacttcccctatacgtgattgtttcagccgtatagattctgactgtgactcatgccacggtgatacccggagaccttcggggacccagaaacattaaggtgcaccgatatctcaattatccggataactctagacctagagtcaccatggaaacctagaaccctgagtcacagagaagctgggccattcctctcccttcccggtggtgccgcagttcttgagatgtgagcagctttcagccccgtggcctcgcctaagctggggtttcctatttcatccacaacttcaggaatctaaactttcctgcaaaatattgagcatgtgacctgagtccaaacagccatggactcaagcaccttctgataaaaacggaaaccacagtgtagggggtggttttgaccagggtttcggagtcagataaactcaggtttccaccttgaatttctcatcaatctgacgtggcaggttattcatcctaaggttcagttcccacctgtgtaaagtgggagccgcaagtcctccgagagtgacgatgatgtgcgtggagtgcccagcccagattgaagcgcggccaaggcgggtcgctatctgggcaccgctcagctccagagggcgccactcccgcggagcctgcgggatcggggcttcccgggagcagcgcgatcagcaccacgactcggggacacagccagggcccggtttctacaggaagcgcctcatttggagcctttttgtgatagaatgatcattagtcctaagcccattcagaggttcaagaatggggtcggctcaatttcagggccttattacccaagcccggctgcccttcggtgccaccagcaccactgctccgtcgctgcggaattccaaaggcaggtttggcgttagggccttggccccagagaggacgccgagcgctccacggaaagtctccgcccggctcccagggcgcacactcgcgcgcacgtggggccgaggccctgctcccggggcctcagggccagccggcgagggacccagccgagtgacagcaggaggcggagggaaggttgggccggaaggtgtcagccccgccccgcgctccctcgccgcctccgccctcctcttctctcccctcgtgcgttccctctcctctccctccgctcccccaaccctcctgctgcccccttccctctcctcccgcttctccccatcctgcctacctcccttcccctcctcttctctctcctccccttccctcccctctctcttctctcctccctcgtttcctcccctcccctccactcggccgtccctccttcctcctccctcctccctcctcctcccgctcctgaagagcgcgccgcgtgggggacggcccggttacttcctccagagactgacgagtgcggtgtcgctccagctcagagctcccggagccgcccggccagcgtccggcctccctgatcgtctctggccggcgccctcgccctcgcccggcgcgcaccgagcagccgcgggcgccgagcagccaccgtcccgaccaagcgccggccctgcccgcagcggcagggtaagagctgggcccgcagagagcgcccggcgcgcggctccagtcccatggagggtcacccggggcctgggcgggggtcgcggggggcactgacacgcagatctcggggcgctgccgggggtgcaggtgggggtggcggctgctgcgaggactctaggggcgcgcgtctgagttccgcgccggctcgttttccggttatggagtggcctccggggctggcggggtcggccggggggttcctgcgtgctagggccgctgtcttcggggtcgcctagcggcgggcgcggccagggcgcgctggcttgtttcgctcgcttttgtttttaaaaggaaacgcaggcctggtagggggtcctgcccagtggatgtcccggcgaacatgatttcgcgaacgggagtgggggcacaggagagcgtgtccgaggtggcctggcgccccggctttgagggtgacttcctggagcggcgccgggcccggaggatctggggcgcccaagacacctgaaggctgcggcaccgcgggaacctgcggggcgcggggtgccatggtcacctgctcgccgcgtccagggcccgggctggggacccctcggtcgtgcgaggagagcgtggggaacctgtcggaaatgagatctggttgcgctgggctgcctttattttctcgttcctacagcatttgaatgaagaggtaactgagtgtttgcttgtgtgtgtttgggttgcgtgtgtgttatcctattttattttttacggcaggagaccttttatgttagcctgtacacaatttcagggtagcctaaaacagtagttgacgcgctagttatttagaaagtaaagaaatgagcagtcccctttggagacaggagt

SEQ ID NO: 3371 - DNA, 6000 bp, Homo sapiens
gtctccactgaggttctgcagagggctggagtgtgcggagtgctcacctgtcatttgctcgtaggggttagttactggggtaacactgactttaagagctctgccgtccgattgttctgttccaggttttggcacagagcaggcgccctatggaatgcagacacagaattaccccaaaggcggcctcctggacagcatgtgtccggcctccacacccagcgtactcagctctgagcaggagtttcagatgttccccaagtctcggctcagctccgtcagcgtcacctactgctctgtcagtcaggacttcccaggcagcaacttgaatttgctcaccaacaattctggtaagattggaagcatctttcaacaaggctgttgctttgattctgagaaccccagagccataatgaacctcttaataaatacttcctggattcagccattagagaagggggtcaaagcccatgttctaagtggatttccaacaagcatacccctaatatgtttcaggcactggcccaggtactgcaggcattgagtaaacaaaacagtccctgctcttacagccagatttctccacactttgggatatttatggaggcgatgcaggaatgtgacatttcttcttatggagatgtaacataaatacagtgcacaagtctcaggtcatgtggctggttggatttgtgtatgtatgtatacccatgtaataaccatccagatggagatagagaagtttccagtagcctggaagattccttcgtaccccttcccatcaataatgtccccccgacagaagggaacgattctgacttttatcattacggattaggttttgattttcttgaactttacatagatggaatcataaggcatgttttcttttgtgtttgtcttttactcatcatgtctgggattcatgcatgttgttggatgtagcagccatgtgttctttttcatcgctgtatagtattccattataagaattttattcattctactgttgatggaagataggatttgtgtagtatagttaccctaaggaataagcacctgagtagagagcattttgagaagtctgagtggttctacaccagcaggtgcatgattgcactggtagtggttggtgatgctatggtcgtgcccaagaccaactgtgtcctggaggaatcaaagtatgtgtttggttgtctttgccagggactcccaaagaccacgactcccctgagaacggtgcggacagcttcgagagctcagactccctcctccagtcctggaacagccagtcgtccttgctggatgtgcaacgggttccttccttcgagagcttcgaagatgactgcagccagtctctctgcctcaataagccaaccatgtctttcaaggattacatccaagagaggagtgacccagtggagcaaggcaaaccagttatacctgcagctgtgctggccggcttcacaggtgtgtgtggaactccgagagcctggccgcccagtctcctgggtcctgtcccttgcttcctttcgagccacagtaccacattcaccgagggtgtttctaagctaggtacaccagtgctctacactccatgttttatgcgtggcttgctgtatctctgaattcgacaaaagccacacttggaggaattttcatgtacacagagctccatggaatgagtgaaaattgacaggccactccctccacctgggacgttctgaggaatagttggagcaggggacatggcctgtgcagtcttcagccctgactcacccactccaagaatctcaaagaatgtaaactggcttagggaggggcagcagagccagtctcaaataatatgggcactgtttaccttttcttgcttctaaaatctatctgctcttatttttgaggtttgggtgagagctattctaggcagtggacaaatataaagctgtttttagaaacaggtatttccagtactttagcgaaaatactggggctttgttttcactgcttcgtgtatccttaaatgcgtttttgtttttgtttttttaaccatatggagccactgtggattgaaattacctaacttaaaaaaatctgataagtttaaaataaggatactgaggcattcattctttttctgtcatctaagaacaatcagccacgtaaacgtattaaaatacacggaaagagtgtgtgaaagccattatcggtttcattattgggagtttagggcctgagaagaataaacagccataacgttagtgtggttcattttaatagtaacataagtttctgtttattgactgccaactctgtagttaagtaggcatacagtctgtaggacagcctggcatgggggtggtatgaggccattttacagatggggaaattggctcacaggcagacagctatcggtgctcacacagctctggttctagaatgcctgtcccgtgctttacagcaaagctttattgataacggccattgcgtttctgaggaagagctatttggtagaaagaggttgggcttagggtcggaagatctaggctcttctcctgtttgctgtgatgggcgtgtgatccaggacaaggcacctggcctctgagccgcatcttatccctcctctttagaacagaaccacactgacacctgctttgcaaggtggtagttctaaatgtcaatcgaggacaggtggacgagaagctcttggcaaagcatgcttcaccagacagaggctgtgaggcaacgggtgtgaccccgcgtggctattgagtaaaccgggctcacattaagcaatttacacatggtcatttggcaggaaggtggcatgggatcccacgtatgacacgcctcattctgtgatgaaacaccccctcagccacccccatctctgccccactgggtgtttctagaaaaaaaccttgaaggtttttacataaggaacaattaaaccagatggggaattttaatgccaagagttggtggccctaaactttcttccagaaagaacaaacctagcaatcaaggggaagagtgtctcgcctagtgaccttattttctaggagtaggcagtgtggagcaggaactcacatttggtgccccgccccatcccgttaaagcacttagtactgtcaccaacaccttgagtgccaccctgagtgtaacatcggaaccccattcagagagttgggtctgcattcctaaatcagcatgtacaattaggatggttaaagacttgctgtattttacatctgtgaaagggtatgatccgtctccctccctctccccgcaggaagtggacctattcagctgtggcagtttctcctggagctgctatcagacaaatcctgccagtcattcatcagctggactggagacggatgggagtttaagctcgccgaccccgatgaggtatggccagagccctgggaaatctctgggcttgaaaacctgatttcctgcttgcattcaaaaactcagttctttgggcacaaaaaagggttcaccagtactgctgagaatctttccacgtgaggcatccttggctgttgggaaaatggaagtggagtcattgctttgttgataaacgtgtacagtgttttctgggtatgcttcatacaagggcgttgcacagatttcactgtcttgatcagttgtctgatcaagaggcccaagctgcaaactgaggttctctgctgaccatctgaaaatgccttaggaaggctgcccttgtccatcgggggaacaagcctcatgtggccccgagccagccttctgtccactccttagctgagcccagcagtgttgaccccagccctgcagagttagaaccaggagccctgtctaaaggagaaggccaagggcaggtgggataccaaccccgccagaaaagcgttagagagaagcccttggtctctggcactggggagcgtaatctgtcaccattcccaccccgcctccagttcccttgggagacaagcattgaggaatgagtatatcacacagctcagaatcccactcggcacctgttaacttcagtagttggaatatccagcctggagggtgggtgacaccacctttccctggtctcaggaccctcctggctctgaacccttggctcccaggaggtttcactgagctggggccagggagcagggacctcattccccagtggttctgccccttggggacacagtgcccctaccataggtactcaaaggtactcagaggtactcaaaaggtcctcctgcggaccttgtgtaggtgtcaagttctctctagagtgaacatgcctcagaatcataatcagggaggaatgtcattcactttttcttcattgacaaattgagtttaactcttttccatccatgttcaccaaaggtggcccgccggtggggaaagaggaaaaataagcccaagatgaactacgagaagctgagccggggcttacgctactattacgacaagaacatcatccacaagacgtcggggaagcgctacgtgtaccgcttcgtgtgcgacctccagaacttgctggggttcacgcccgaggaactgcacgccatcctgggcgtccagcccgacacggaggactgaggtcgccgggaccaccctgagccggccccaggctcgtggactgagtgggaagcccatcctgaccagctgctccgaggacccaggaaaggcaggattgaaaatgtccaggaaagtggccaagaagcagtggccttattgcatcccaaaccacgcctcttgaccaggctgcctcccttgtggcagcaacggcacagctaattctactcacagtgcttttaagtgaaaatggtcgagaaagaggcaccaggaagccgtcctggcgcctggcagtccgtgggacgggatggttctggctgtttgagattctcaaaggagcgagcatgtcgtggacacacacagactatttttagattttcttttgccttttgcaaccaggaacagcaaatgcaaaaactctttgagagggtaggagggtgggaaggaaacaaccatgtcatttcagaagttagtttgtatatattattataatcttataattgttctcagaatcccttaacagttgtatttaacagaaattgtatattgtaatttaaaataattatataactgtatttgaaataagaattcagacatctgaggttttatttcatttttcaatagcacatatggaattttgcaaagatttaatctgccaagggccgactaagagaagttgtaaagtatgtattatttacatttaatagacttacagggataaggcctgtggggggtaatccctgctttttgtgtttttttgtttgtttgtttgtttgtttttggggggttttcttgccttggttgtctggcaaggactttgtacatttgggagtttttatgagaaacttaaatgttattatctgggcttatatctggcctctgctttctcctttaattgtaaagtaaaagctataaagcagtatttttcttgacaaatggcatatgttttccacttctttgcatgcgtttaagtcagtttatacacaaaatggattttattttttagtttaactgtgtttctccgacagctcacctctctctgaccacccagccatttccttcctgtgctccacgttcttctgtgtgattaaaataagaatattatttttggaaatatgcaactccttttcagagatcaggagggatttatgtagcagctatttttactgcaaaagtaattcactggaaaaaaaatgtaatttgtaagaaagctttatttttatctcagctctatgtaaagttaaagttactgtacagagctgaaggacggggggcggtaggggtcttgatgaaacctcttgaacgaagcacagtttgtcccatctttgttcactcgtgtgtctcaaccatcttaatagcatgctgctcctttttgctcagtgtccacagcaagatgacgtgattcttattttcttggacacagactattctgag

SEQ ID NO: 3372 - DNA, 6000 bp, Homo sapiens
cctggattcagccattagagaagggggtcaaagcccatgttctaagtggatttccaacaagcatacccctaatatgtttcaggcactggcccaggtactgcaggcattgagtaaacaaaacagtccctgctcttacagccagatttctccacactttgggatatttatggaggcgatgcaggaatgtgacatttcttcttatggagatgtaacataaatacagtgcacaagtctcaggtcatgtggctggttggatttgtgtatgtatgtatacccatgtaataaccatccagatggagatagagaagtttccagtagcctggaagattccttcgtaccccttcccatcaataatgtccccccgacagaagggaacgattctgacttttatcattacggattaggttttgattttcttgaactttacatagatggaatcataaggcatgttttcttttgtgtttgtcttttactcatcatgtctgggattcatgcatgttgttggatgtagcagccatgtgttctttttcatcgctgtatagtattccattataagaattttattcattctactgttgatggaagataggatttgtgtagtatagttaccctaaggaataagcacctgagtagagagcattttgagaagtctgagtggttctacaccagcaggtgcatgattgcactggtagtggttggtgatgctatggtcgtgcccaagaccaactgtgtcctggaggaatcaaagtatgtgtttggttgtctttgccagggactcccaaagaccacgactcccctgagaacggtgcggacagcttcgagagctcagactccctcctccagtcctggaacagccagtcgtccttgctggatgtgcaacgggttccttccttcgagagcttcgaagatgactgcagccagtctctctgcctcaataagccaaccatgtctttcaaggattacatccaagagaggagtgacccagtggagcaaggcaaaccagttatacctgcagctgtgctggccggcttcacaggtgtgtgtggaactccgagagcctggccgcccagtctcctgggtcctgtcccttgcttcctttcgagccacagtaccacattcaccgagggtgtttctaagctaggtacaccagtgctctacactccatgttttatgcgtggcttgctgtatctctgaattcgacaaaagccacacttggaggaattttcatgtacacagagctccatggaatgagtgaaaattgacaggccactccctccacctgggacgttctgaggaatagttggagcaggggacatggcctgtgcagtcttcagccctgactcacccactccaagaatctcaaagaatgtaaactggcttagggaggggcagcagagccagtctcaaataatatgggcactgtttaccttttcttgcttctaaaatctatctgctcttatttttgaggtttgggtgagagctattctaggcagtggacaaatataaagctgtttttagaaacaggtatttccagtactttagcgaaaatactggggctttgttttcactgcttcgtgtatccttaaatgcgtttttgtttttgtttttttaaccatatggagccactgtggattgaaattacctaacttaaaaaaatctgataagtttaaaataaggatactgaggcattcattctttttctgtcatctaagaacaatcagccacgtaaacgtattaaaatacacggaaagagtgtgtgaaagccattatcggtttcattattgggagtttagggcctgagaagaataaacagccataacgttagtgtggttcattttaatagtaacataagtttctgtttattgactgccaactctgtagttaagtaggcatacagtctgtaggacagcctggcatgggggtggtatgaggccattttacagatggggaaattggctcacaggcagacagctatcggtgctcacacagctctggttctagaatgcctgtcccgtgctttacagcaaagctttattgataacggccattgcgtttctgaggaagagctatttggtagaaagaggttgggcttagggtcggaagatctaggctcttctcctgtttgctgtgatgggcgtgtgatccaggacaaggcacctggcctctgagccgcatcttatccctcctctttagaacagaaccacactgacacctgctttgcaaggtggtagttctaaatgtcaatcgaggacaggtggacgagaagctcttggcaaagcatgcttcaccagacagaggctgtgaggcaacgggtgtgaccccgcgtggctattgagtaaaccgggctcacattaagcaatttacacatggtcatttggcaggaaggtggcatgggatcccacgtatgacacgcctcattctgtgatgaaacaccccctcagccacccccatctctgccccactgggtgtttctagaaaaaaaccttgaaggtttttacataaggaacaattaaaccagatggggaattttaatgccaagagttggtggccctaaactttcttccagaaagaacaaacctagcaatcaaggggaagagtgtctcgcctagtgaccttattttctaggagtaggcagtgtggagcaggaactcacatttggtgccccgccccatcccgttaaagcacttagtactgtcaccaacaccttgagtgccaccctgagtgtaacatcggaaccccattcagagagttgggtctgcattcctaaatcagcatgtacaattaggatggttaaagacttgctgtattttacatctgtgaaagggtatgatccgtctccctccctctccccgcaggaagtggacctattcagctgtggcagtttctcctggagctgctatcagacaaatcctgccagtcattcatcagctggactggagacggatgggagtttaagctcgccgaccccgatgaggtatggccagagccctgggaaatctctgggcttgaaaacctgatttcctgcttgcattcaaaaactcagttctttgggcacaaaaaagggttcaccagtactgctgagaatctttccacgtgaggcatccttggctgttgggaaaatggaagtggagtcattgctttgttgataaacgtgtacagtgttttctgggtatgcttcatacaagggcgttgcacagatttcactgtcttgatcagttgtctgatcaagaggcccaagctgcaaactgaggttctctgctgaccatctgaaaatgccttaggaaggctgcccttgtccatcgggggaacaagcctcatgtggccccgagccagccttctgtccactccttagctgagcccagcagtgttgaccccagccctgcagagttagaaccaggagccctgtctaaaggagaaggccaagggcaggtgggataccaaccccgccagaaaagcgttagagagaagcccttggtctctggcactggggagcgtaatctgtcaccattcccaccccgcctccagttcccttgggagacaagcattgaggaatgagtatatcacacagctcagaatcccactcggcacctgttaacttcagtagttggaatatccagcctggagggtgggtgacaccacctttccctggtctcaggaccctcctggctctgaacccttggctcccaggaggtttcactgagctggggccagggagcagggacctcattccccagtggttctgccccttggggacacagtgcccctaccataggtactcaaaggtactcagaggtactcaaaaggtcctcctgcggaccttgtgtaggtgtcaagttctctctagagtgaacatgcctcagaatcataatcagggaggaatgtcattcactttttcttcattgacaaattgagtttaactcttttccatccatgttcaccaaaggtggcccgccggtggggaaagaggaaaaataagcccaagatgaactacgagaagctgagccggggcttacgctactattacgacaagaacatcatccacaagacgtcggggaagcgctacgtgtaccgcttcgtgtgcgacctccagaacttgctggggttcacgcccgaggaactgcacgccatcctgggcgtccagcccgacacggaggactgaggtcgccgggaccaccctgagccggccccaggctcgtggactgagtgggaagcccatcctgaccagctgctccgaggacccaggaaaggcaggattgaaaatgtccaggaaagtggccaagaagcagtggccttattgcatcccaaaccacgcctcttgaccaggctgcctcccttgtggcagcaacggcacagctaattctactcacagtgcttttaagtgaaaatggtcgagaaagaggcaccaggaagccgtcctggcgcctggcagtccgtgggacgggatggttctggctgtttgagattctcaaaggagcgagcatgtcgtggacacacacagactatttttagattttcttttgccttttgcaaccaggaacagcaaatgcaaaaactctttgagagggtaggagggtgggaaggaaacaaccatgtcatttcagaagttagtttgtatatattattataatcttataattgttctcagaatcccttaacagttgtatttaacagaaattgtatattgtaatttaaaataattatataactgtatttgaaataagaattcagacatctgaggttttatttcatttttcaatagcacatatggaattttgcaaagatttaatctgccaagggccgactaagagaagttgtaaagtatgtattatttacatttaatagacttacagggataaggcctgtggggggtaatccctgctttttgtgtttttttgtttgtttgtttgtttgtttttggggggttttcttgccttggttgtctggcaaggactttgtacatttgggagtttttatgagaaacttaaatgttattatctgggcttatatctggcctctgctttctcctttaattgtaaagtaaaagctataaagcagtatttttcttgacaaatggcatatgttttccacttctttgcatgcgtttaagtcagtttatacacaaaatggattttattttttagtttaactgtgtttctccgacagctcacctctctctgaccacccagccatttccttcctgtgctccacgttcttctgtgtgattaaaataagaatattatttttggaaatatgcaactccttttcagagatcaggagggatttatgtagcagctatttttactgcaaaagtaattcactggaaaaaaaatgtaatttgtaagaaagctttatttttatctcagctctatgtaaagttaaagttactgtacagagctgaaggacggggggcggtaggggtcttgatgaaacctcttgaacgaagcacagtttgtcccatctttgttcactcgtgtgtctcaaccatcttaatagcatgctgctcctttttgctcagtgtccacagcaagatgacgtgattcttattttcttggacacagactattctgaggcacagagcggggacttaagatgggaaagagaaagcatcggagccattcattcggagaaaacgttttgatcaaaatggagacttttgtagtcgtttcaaaagagcacctgagtcatgtgtattcccggcctttataaatgacccggtcaagttggtttcaaagtccgacaggcttgtctgtttactagctgcgtggccttggacgggtggctgacatctgtaaagaatcctcctgtgatgaaactgaggaatcgggtggccgggcaagctgggaagagcaaagccagagctgcgctgcctcaatacccacaaaagaccattcccagtatacataagcacaggatgtttttctcaagagggatgtatttatcacttggacatctgtttataatataaacagacatgtgactgggaacatcttgctgccaaaa

SEQ ID NO: 3373 - DNA, 6000 bp, Homo sapiens
tgtatttttagtagagatgggttttcaccatgttagccaggatagtcttgatctccttacatcgtgatccacccacctcggcctccaaaagtgctgggattacaggcatgagccactgcgcccggcctattacagcttttttaatggtttctttctgtttctctactcattgctgttttgctatctcagcatttagtaactttttttggaatgtttttgacagggtcttgctctgttgcctaggctgaggtgcagtggcacaatcaaggcttactgcagcctcgacctcctgggctcagatgatcccccaacctcagcctcctgagtagctgggacttgaacacctgggctcaagtgatctacccaccttggcctcccaaagtgctgggattacaggcatgagccaacatgcccagcctggaaagtttattttatgcttgtctcaactgtgctaaggaaaaataaaggaaagtatcttttacaaaaattttattatgacaaattccaaacatacataaaagtattatagaatataattaaccctaccctcgcatcatgtcacctggtttcaataattatcaatctcacatggccattcttgtttcacttttatctaacccacaccttattcccctctggagtatttagaagcaaaatgagagatatttggttctttttttttttttttttttgagatggtgtctcactctgtctcccaggctggagggtagtggcacaatcttggctcactgcaacctccgcctcccaggttcaagctattctcctgtctcagcctcctaagtagctgggactacaggtgagcgccaccatgctcagctaattttggtatttttagtagagacagggtttcactatgttggccagactggtcttgaactcctcacctcaagtgatctgcccacctcagccttgcaaagtgctgggattacaggtgtgaaccactgtgcccggactttacttttttctaaaaagagagtttatttaaggaaaatagagagcagagagtttatttttacaatgtttttacattgactgggtgccgtggctcactcctgtaatcccagcactttgggaggccaaggtgggcgggttgcgaggtcaggagttcaagaccagcctggccaatatgttgaaacctggtctctactaaaaaatacaaaaattagccaggtgttgtggcatgcgcctgtagtcccagctactcaggaggctgaggcaggaagaatcacttgaaccagggaggcggaggttgcagtgagccgagatcacgccactgcactctagcctgagcaacagagtgagactctgtctcgaaaaaaagaatgtttttactttttttaaaatagagatggggttttgcaatgttgtccaggctggtctctaactcctggcctcaaaggatccacctgcttcaccttcccaaaatgctgggattacaggtgtgagccactgcacctggccaagagcagatagtttatatagacagatagtacaccctgaaaagatgaggcaaagagggctgaggcaaagagggctgctgaaaagggagtgagccagcagctaatgttcaattatcatttttctctggcttcctcccatctttatccatctacattcaaaaaccatacattaagtatgtatcggctgggcgtggtggctcacacctgtaatccgagcactttgggaggccaaggcgggcagattatgaggtcaggagttcgagaccagcctggctaacatggtgaaaccctatctctactaaaaatacaaaaattagtcaggcatggtggcgcgtgcctgtaatcccaactactcaggaggctgaagcaggagaatcacttgaatccagaaggcagaggttgcagtgagccgagattgcaccactacactccagcctgggcagcagaatgagaccccatctcaaaaaaaaaaaaaagtatgtattatgtgctaggtactgggaatagaaaaaataatatatagcaggctgccctcaagatgctcagattgggatgagaaaaatatttatgaacaattacaatagaatgtgataaaaattaatttaggctgtgcccacagtgtatacatagtaatcagagagtatggtcagttttggttctgcttttagaatatgtgtttggagtcaccagagatgtgacccctaaatgcttcatgctgattattagcctactaaaggaaaaactatggagaggtgaaggacgctctgcatttagagggcagagagcgggttgctgtggctcacatctgtaatcctagctactttggaggctgaggcaggaggactacttgagcctaggaatttgagacgagagtcagcaacagagagacatgtctttaaaaacaaaacaaaacccaaaaagcctaattcagtcaaagcatgggtagaagccagattaagaaggttgagcagctgggtgggtggctcacgtctgtaatcccaacactttgggaggccaagctgggaggattacctgagcccagcagttccagatcagcttgggcaatacagtgagacctcatctctacaaaaaatttaaaaattaaaaaatcaccactaggattacaggcggtggctcacgcctgtaatcccagcactttgggaggctgaggcaggaggatcatgaggtcaggagttcaagaccagcctggcgaacatggtgaaaccctgtctctactaaaaatacaaaaattagctgggcatggtggtgcatgcctgtaatcaatcccacctacttggcaggctgaggcaggagaattgcttgaacctggacctgggaggcagaggttgcagtgagctgagatcacgccactgcactcctccagcctgggctacagagctagagtccgtatcagaataaaaaaaaaaaaaaagggctgggcaaggagcaggtgattatgaagtggtaaatctgacagtgaaaagtagttagaaaacaaagtggagatttttctctccaccctcacccacccactgagggtgtatgctcagggttttagggtatagaggtagaggcccagggaatgactgaataataataatggaagactcatatgatgcttactatgtgccaggtactattctaagcactttgcatatattaacttgtttcatacatagctgggcggggtggctcacatcttggctgagggggaggattgtttgagctcaaaagtctgagacgagcctgggcaacatggtgagatttcgtctctattaaaaatcaaaggccgggcgcggtggctcacgcctgtaatcccagcactttgggaggccgaggcgggcggatcacgaggtcaggagatcgagaccatcccggctaaaacggtgaaaccccgtctctactaaaaatacaaaaaattagccgggcgtagtggcgggcgcctgtagtcccagctacttgggaggctgaggcaggagaatggcgtgaacccgggaggcggagcttgcagtgagccgagatcccgccactgcactccagcctgggcgacagagcgagactccgtctcaaaaaaaaaaaaaaaaaaaaaaaaatcaaaaaaattagctgggcatggcagcgcgagcctgtagtcccaactactcggaaggctgaggtgggaggatcccttgagatggggaaatcaaggctgcagtgagccatgatagttccactgcactccagcctgggtgacagaaggagaacctgtctcaaaaacaaacaaaataaaacaaacaggctgggcacggtggctcacgcctgtaatcctagcactttgggaagctgaggcaggcagatcacctgaggtcaggagtttgagaccagcctggccaacatggtgaaaccccgtttctactaaaaatacaaaaattagcagggcatggcggcggacagctgtaatcccagctactcgggaggctgaggcaggagaatcgcttgaacccgggaggcggaggttgcagtgagccgagatcgcgcccctgcactccaacctggtgacagagcgagactccgtcgaaagaaggaaaggaaagggaaagggaaaggaaagggaaagggaaaggaaaggaagagagagagagagagaaagaaaagaaaagaaaaaagaaaagaaagaaagaaagaaagaaagaaagaaagaaagaaagaaagaaagaaaacaaacaaaaacaaatagggattaataaataggcagaagcaggcataatccggggcaggggaagcctcggggccacgcccgagaggcatttgtattttactttcagcagttcagagcccatgatagccaggttacccacttgtggacttccttgaccacttaattgagtcaatctaaccctcaccttctctctcctctcactccatttagcgggtcacgtagccactagggcttccttagcctatcaggccacctggggactgagtcattcagtcagtcacctatctggtggtcacatctgcccctgggctcatccttttactgggccacctcggcccatcgggacctgtcagtccttgacctccctcaggcccctaggctggccaggtcgcctcagtgccacgcctccctggcccgcgattcagcctgcacgttacgctttgttcccagaagcaggttttcgaaacgcggttccctctcggctccagctgttttcctgccagcgctgggagacccggcagccgcagcgcccccagcggcgcgcagcggcccaggaagagagtgcctaccgccggcgcctcttcagcctcctcctggaacgcgggagcgggcgcgaccagcgcccaccctgatcgtcgcgacggtgctcctgattggctgcgctgtgtgacgtaacgggagggccccggcggccgccgggagccggggcccagcgcgtgcgcagacggagcgcgctgagcggagggggaggtggctgccgcttctcccgcgtccgccattttgttgctgtggctattgggaacaagctgggcaaaagcaccccggaggcgcgacgctccttcgagttcggtgcctcgtgtgacggcgggggtcggtgaagacccgtcgagctgcggcgccggcgcgttccaggccgggagtcactggaggcacccctgggacgccgagcagcccgagaaccccggggtggcctccgctgcggctcgggtttgcctgccccgaccccccggctctgccgtgcattcccgggcggctctctccgtgtggcggccccggagcaggcgggcggcgtcggaggatgctgcgggcccggagccgagaggaaagtgctggcccagccctctgagcgctcctcgaggtgtgcgagaggcccttcctcggccccaaagccgtctgccgggctaaggcgtgcagagcaggcgaggacagccgccgcccctaccgccgcagagtccccggtccaacaccatgtcctccgccaggttcgactcctcggaccgctccgcctggtatatggggccggtgtctcgccaggaggcgcagacccggctccagggccagcgccacggtatgttcctcgtccgcgattcttccacctgccctggggactatgtgctgtcggtgtccgagaactcgcgggtctcccactacatcatcaactcgctgcccaaccgccgttttaagatcggggaccaggaatttgaccatttgccggccctgctggagttttacaagatccactacctggacaccaccaccctcatcgagcctgcgcccaggtacgcgagagccctccccgaccgcggaggaaggtcgagaaccgggtctgtcgaagagtgcttgtataggggggtggggcgcgcttgaacccatattccccgcattctgaaccaaattattttccagaaggccttcctaacagaaagctagtgtcaggatctgggtcactggataagaggatgcgttttttttttttccctctcacgaggctgtttctcaatgtgaagaggatgcgttttgaatgtttaacggtggttgcat

SEQ ID NO: 3374 - DNA, 6000 bp, Homo sapiens
aaaaaaaaaacagattgatctgccctccacagtgagtgcttctttgagctggatccgtgtaccatgaacccagaggaagagcaccacaccagaatagggagtgatgagggaaacggcaagatggctgccaagctaccagccattttaggatctgagcacaagcactgtttggtagagccatggaagaagctggtccatagccaggcctgtaactggacagcaggctgcataacagccaggatatctttactgtgttgagatagaaaacagcatgaagaatgatgatggtgttttagcatgtggaaactcctgcaaggccacaatgaggcactaatggtcaaggggccaccagaagtctctcagccattctcttcctaggctgctctttgacctacttctgctggtccaggttccctctgtctaagcagtagctccttgaatcctgtgctctgcagcattgagttaatagtgtttttctgccacttgctgcttttatgtgttttctgtctctctctcttttttttttttttcaatagaagctaggtctcactatgtcacccaggctggtcttgaacatgtggcctcaagtgatcctcccaccttggcttcccaaagtgctgggattacaggtgtgagccactgcgcccagctacaccaagtgcagtgacacgattttggctcactgcaacctccacctcccaggttcaagtgattctcctgcgtcagcctcccgagtagttggaatttgggattacaggcatctgccaccacgcctggtgatttttgtatttttcagtagagatgaggttttgccgtgttggccatgctggtctcgaactcctgacctcaggtgatccatctgccttggcctcccaaagtgttgggattacagatgtgagccactgcgcctaggctttttcttttcttttcttttcttttttctttttttcatttttttttttttttttttttgagacagggtcttgctctgtcacccaggctggagtgcagtagtgtgatcacagcttactgcacccctgcaacctctgcctcctgcgcttaaacgatcttcgcacctcattctcccaagtagctgggactgcaggtgcatgccaccacgcctggctcatttttgtattttagagacagggtttcactgtgttgcccaggctggtcttgaactcctgggctcaagtgatccacccacttcagcttcccaaagtgctgggattacaggtgtgagccactgcgcccggccactttgtgcttttcacactatgttattatctgacaaagattcattgtgtatcccactcaaaagacagaagttttttaaggatacgaactgacctgcccattttccatggagtagatgttcagtaaatttatttaattgattaggtaggatcatgtagaaagtatcctgttgaagaccgccagactcacaagttaattggaaggcgtgaggtgtgagtgttcttggcagctttcaatccttagcctcatctttaatcttcccgtagtcttctttggctgcttagtatccatcacagtcatttattagaccccgttttcagcctgttcctcattggttttgagaggacccttgttggtgacaaggttggaaatcctctgatatatacagtgttgtgcttctcagtgctaattccagctcttcccttcgtgcatccaaagggtatgatcattagagggggcgtggggttgggggatgggttctattcaggaatctctactcaagtaacaatcatttaattactgcaagaacctttcaaagttggaaggaaactgagacttggagaacttaagcagtttgctacagtcatgtagtttctaaaagtggcagaaccaggacatttgtttggtgtcctgcatgctccaaagttcatggcacggaccattggactgtgccataaaaaccttatgcctgtttttattttgagatgtagtcttgctgcgttgcgccggctggtctcaaactcctgggctcaagcagtcctcccacctcagtctgccaaggacctggaactagaggcatgtaccacgatgcctggttctatatgtgtttaagcagacaaaagcttatttcttattgtcttagatcttaggtgggtcttatattcaagtagcgtttttatggacctaagtacacaatacagaaccttagattagtgctctgctgaacagagtaacaccctgtctacaatgactaccacctgaaggtctttttttaaaatacacctttttgtgtaatttgactttaaccattctcagaatcatgtgttcatttctatcctgttggggttagtggccaaaatagaaggttggtgtggggtggggagctgctttgtgctcaaaagctgtttctgtgtgtgtgtgtgttttgatttttgtttttttgagacagggtctcactcggttgcccagtctggggtgccgtggcactatcacggctcactgcagcctcagcctcatgggctcaagccatcctctcacttcagcctcctgagtagttgggactgcagtcatgtaccaccacacccggctaatttttctattttttagaagagatgaggtttcaccatgttgcccaggctggtctcgaactcctgacctcaagtaatcccaggagttcaaggttacaatgagctgtaatcgggccactgcattccagcctgggcgacagaccccgtctataaaaaattaaaaaataatgtgcatggtggtgcacgcctgtagtcacagctattcaagaggtggaggtggaaggatcacttgagcccaggcgttagaggttacattgagcagggatctcaccactacactccagcatggctaacagagtgagaccctgtgtctaaataataatgtatgggccctttggataaggtagtgtttgtgatttaatgtaaactgtctttttcttgttgcagagaaatgctaactttgtcttcttcatccatacaggttggtgacatcgtgaaagtcacaaggatgaatataaatggccagtgggaaggcgaagtgaacgggcgcaaagggcttttcccctttacgcacgtcaaaatctttgaccctcaaaacccagatgaaaacgagtgattgctgttgccctgtttcctgctgctttgttgttctgcctgtcctagtctcctttgaagtgggaaagcattttctctcataggcaagtcacactgcattgccgaagtccagctttctgcagactggcagtcgcacacacatttggaatgcacacagcggctgcctcctgatgtttgtatcatagtcgtattgtcaaagagtagccgattttagagttcttttggatcataaactggaaatactgatggaagcacacaagtggagagaagttgacatggaaagggtcttccttctcattgctgcccgtttgtacatgggactgattctgttgtgttcaccagagaaagcttgaggccatggcgagatactgcatgtttgctgttccacaaagcagtggcttagctgccatcttgcttttctttggacaacaggaagtgaaccttaaggaagagagaattctgttctaaaactccaaaatctggcttttttttttcttttgttttggtttggttttggaaaactaattaattagacttgtgtgggggtttttttttgttttgttttgtttgttttgttttgtttttttgagacggtgtctcgctgcatcacccaggctggagtgcagtggcgcaatctcgccttcctgcagtctccgcctcctgagttcaagcgattctcctgcctcagcctcccaagtagctgggactgcaggcgcgcacaccacgcccagctaatttttgtatttttagtagagacggggtttcatcatgttgaccaggctggtctcaaactcctgacttcaggtgatccacccgccttcagcctcccaacgtgctgggattacagccgtgagccgccgcgcctggcctagacttgtgtgttctaaacaggttaagtagcaggttgggtttttatgatagtgcaaggaatgactcatgcctctgagcttctaaactgaagctgctgtaactaaaggaatctgaaaagaacaaccctgaagcagaggcctttattgtcttggttgccagtagtaccttgttttgccatgtagcagacaacacacaaaataatgcagttgtggtgtgccatgctatgtgcacagccccttggattactttgttttaaaaagcatcagagttgggggtactttagggaaacctttgcttaccttgttttgccagtgataagagcagtgggttggagggcacttggccagttttctgttcagcttttcagtgaatgtacccctttaaggttcagacttaaacttccttaaaaagtggcgttgttcatagaatcgttggactcattaatgaatcgttcaactccactcactgaagcccagacctccgtgcccaggcccaatctcgtcaggctgccagagaaagttggtgctgctcatactggtctcacagtctaagtaagtgtctgtgatgctcccaagcaaaggaaatgcaagctctggaaattcgttaatgtatttgatgtcttagtgttttagtgactagggagaccattaactagtttatcattaaccacttatcagtgtattgatgttaaagcatttccctgttagctaaaagaggcctgttcatacaagccaactggtatatacgtgtggttcatccatcatctgctgcacatagcagactagaattctgggaaccctgtgcaattcagtctgctctcccttgtggaccctggtaaagaaaagcctcagctcatagtgaacacagcagacctagaaatgtagcagcagcctactgagtagctttcatttactgatcatctgctgtgactgtggccctgtctggaggttcctaggttttgagatttagagcaatgcattctggagacagaaccagcagaacagccatttttcaatttttctttaaatcagtattccatcaggcagataactgctgtattcatgaatcttgagagtgttcctgagacagaattaatggtcatttgggaaaactatcgccatggcttcccatctgtggttttcctctaaaagccttggagattagcccttccttgccagtgagaacggtgaccgcctcctgctctgcacggtctgcggcagttgccgcttctggttaggtgtgtcaggttggcttattttgggttcaggcctggcgtagcacccacaagtggcagacatatcacaagagtccccagactctgcctagaaacagtgtttgccctttggccagtgacgtggttcatcccggcccatgttgagccatgagtggagtttccaacagagggaggaatgtgtgccttgttcaaggagggcacgacccttaggcctttttcaaccagatttagctgaagggcttgacacctttgaattacagcagttgactcagagtgcaagaagtctggccattttggaaagcaaggtttcctttcagccctgtctactgaccaataccccgactcaccttgtgtggcgcacttcagaatcagatatacctagagtatacctgtggtttggttttataattaatcagctcgttacttcagcccatgaaaatggcatccagggctgccaggagattcagagctcaaaacaaggcgagcttgagttctgcactccagatatgtgccaaaactagtaaaacttaacggacttacaaccttgtcagtttttttaatgaggcagggatactctgtttttcacactaaacatatgaatgcagcactgctgcctcagctcagcttcgtgcctgggttccccactggtctgggaagactgttgtgctccatagagcagtgcacatctgacccagagggtgggtgttcataactgctacttgctctgctctaccatgtttaaagaaatatttggatgttaaattaactcactatggt

SEQ ID NO: 3375 - DNA, 6000 bp, Homo sapiens
ctgacctcaggtgatccatctgccttggcctcccaaagtgttgggattacagatgtgagccactgcgcctaggctttttcttttcttttcttttcttttttctttttttcatttttttttttttttttttttgagacagggtcttgctctgtcacccaggctggagtgcagtagtgtgatcacagcttactgcacccctgcaacctctgcctcctgcgcttaaacgatcttcgcacctcattctcccaagtagctgggactgcaggtgcatgccaccacgcctggctcatttttgtattttagagacagggtttcactgtgttgcccaggctggtcttgaactcctgggctcaagtgatccacccacttcagcttcccaaagtgctgggattacaggtgtgagccactgcgcccggccactttgtgcttttcacactatgttattatctgacaaagattcattgtgtatcccactcaaaagacagaagttttttaaggatacgaactgacctgcccattttccatggagtagatgttcagtaaatttatttaattgattaggtaggatcatgtagaaagtatcctgttgaagaccgccagactcacaagttaattggaaggcgtgaggtgtgagtgttcttggcagctttcaatccttagcctcatctttaatcttcccgtagtcttctttggctgcttagtatccatcacagtcatttattagaccccgttttcagcctgttcctcattggttttgagaggacccttgttggtgacaaggttggaaatcctctgatatatacagtgttgtgcttctcagtgctaattccagctcttcccttcgtgcatccaaagggtatgatcattagagggggcgtggggttgggggatgggttctattcaggaatctctactcaagtaacaatcatttaattactgcaagaacctttcaaagttggaaggaaactgagacttggagaacttaagcagtttgctacagtcatgtagtttctaaaagtggcagaaccaggacatttgtttggtgtcctgcatgctccaaagttcatggcacggaccattggactgtgccataaaaaccttatgcctgtttttattttgagatgtagtcttgctgcgttgcgccggctggtctcaaactcctgggctcaagcagtcctcccacctcagtctgccaaggacctggaactagaggcatgtaccacgatgcctggttctatatgtgtttaagcagacaaaagcttatttcttattgtcttagatcttaggtgggtcttatattcaagtagcgtttttatggacctaagtacacaatacagaaccttagattagtgctctgctgaacagagtaacaccctgtctacaatgactaccacctgaaggtctttttttaaaatacacctttttgtgtaatttgactttaaccattctcagaatcatgtgttcatttctatcctgttggggttagtggccaaaatagaaggttggtgtggggtggggagctgctttgtgctcaaaagctgtttctgtgtgtgtgtgtgttttgatttttgtttttttgagacagggtctcactcggttgcccagtctggggtgccgtggcactatcacggctcactgcagcctcagcctcatgggctcaagccatcctctcacttcagcctcctgagtagttgggactgcagtcatgtaccaccacacccggctaatttttctattttttagaagagatgaggtttcaccatgttgcccaggctggtctcgaactcctgacctcaagtaatcccaggagttcaaggttacaatgagctgtaatcgggccactgcattccagcctgggcgacagaccccgtctataaaaaattaaaaaataatgtgcatggtggtgcacgcctgtagtcacagctattcaagaggtggaggtggaaggatcacttgagcccaggcgttagaggttacattgagcagggatctcaccactacactccagcatggctaacagagtgagaccctgtgtctaaataataatgtatgggccctttggataaggtagtgtttgtgatttaatgtaaactgtctttttcttgttgcagagaaatgctaactttgtcttcttcatccatacaggttggtgacatcgtgaaagtcacaaggatgaatataaatggccagtgggaaggcgaagtgaacgggcgcaaagggcttttcccctttacgcacgtcaaaatctttgaccctcaaaacccagatgaaaacgagtgattgctgttgccctgtttcctgctgctttgttgttctgcctgtcctagtctcctttgaagtgggaaagcattttctctcataggcaagtcacactgcattgccgaagtccagctttctgcagactggcagtcgcacacacatttggaatgcacacagcggctgcctcctgatgtttgtatcatagtcgtattgtcaaagagtagccgattttagagttcttttggatcataaactggaaatactgatggaagcacacaagtggagagaagttgacatggaaagggtcttccttctcattgctgcccgtttgtacatgggactgattctgttgtgttcaccagagaaagcttgaggccatggcgagatactgcatgtttgctgttccacaaagcagtggcttagctgccatcttgcttttctttggacaacaggaagtgaaccttaaggaagagagaattctgttctaaaactccaaaatctggcttttttttttcttttgttttggtttggttttggaaaactaattaattagacttgtgtgggggtttttttttgttttgttttgtttgttttgttttgtttttttgagacggtgtctcgctgcatcacccaggctggagtgcagtggcgcaatctcgccttcctgcagtctccgcctcctgagttcaagcgattctcctgcctcagcctcccaagtagctgggactgcaggcgcgcacaccacgcccagctaatttttgtatttttagtagagacggggtttcatcatgttgaccaggctggtctcaaactcctgacttcaggtgatccacccgccttcagcctcccaacgtgctgggattacagccgtgagccgccgcgcctggcctagacttgtgtgttctaaacaggttaagtagcaggttgggtttttatgatagtgcaaggaatgactcatgcctctgagcttctaaactgaagctgctgtaactaaaggaatctgaaaagaacaaccctgaagcagaggcctttattgtcttggttgccagtagtaccttgttttgccatgtagcagacaacacacaaaataatgcagttgtggtgtgccatgctatgtgcacagccccttggattactttgttttaaaaagcatcagagttgggggtactttagggaaacctttgcttaccttgttttgccagtgataagagcagtgggttggagggcacttggccagttttctgttcagcttttcagtgaatgtacccctttaaggttcagacttaaacttccttaaaaagtggcgttgttcatagaatcgttggactcattaatgaatcgttcaactccactcactgaagcccagacctccgtgcccaggcccaatctcgtcaggctgccagagaaagttggtgctgctcatactggtctcacagtctaagtaagtgtctgtgatgctcccaagcaaaggaaatgcaagctctggaaattcgttaatgtatttgatgtcttagtgttttagtgactagggagaccattaactagtttatcattaaccacttatcagtgtattgatgttaaagcatttccctgttagctaaaagaggcctgttcatacaagccaactggtatatacgtgtggttcatccatcatctgctgcacatagcagactagaattctgggaaccctgtgcaattcagtctgctctcccttgtggaccctggtaaagaaaagcctcagctcatagtgaacacagcagacctagaaatgtagcagcagcctactgagtagctttcatttactgatcatctgctgtgactgtggccctgtctggaggttcctaggttttgagatttagagcaatgcattctggagacagaaccagcagaacagccatttttcaatttttctttaaatcagtattccatcaggcagataactgctgtattcatgaatcttgagagtgttcctgagacagaattaatggtcatttgggaaaactatcgccatggcttcccatctgtggttttcctctaaaagccttggagattagcccttccttgccagtgagaacggtgaccgcctcctgctctgcacggtctgcggcagttgccgcttctggttaggtgtgtcaggttggcttattttgggttcaggcctggcgtagcacccacaagtggcagacatatcacaagagtccccagactctgcctagaaacagtgtttgccctttggccagtgacgtggttcatcccggcccatgttgagccatgagtggagtttccaacagagggaggaatgtgtgccttgttcaaggagggcacgacccttaggcctttttcaaccagatttagctgaagggcttgacacctttgaattacagcagttgactcagagtgcaagaagtctggccattttggaaagcaaggtttcctttcagccctgtctactgaccaataccccgactcaccttgtgtggcgcacttcagaatcagatatacctagagtatacctgtggtttggttttataattaatcagctcgttacttcagcccatgaaaatggcatccagggctgccaggagattcagagctcaaaacaaggcgagcttgagttctgcactccagatatgtgccaaaactagtaaaacttaacggacttacaaccttgtcagtttttttaatgaggcagggatactctgtttttcacactaaacatatgaatgcagcactgctgcctcagctcagcttcgtgcctgggttccccactggtctgggaagactgttgtgctccatagagcagtgcacatctgacccagagggtgggtgttcataactgctacttgctctgctctaccatgtttaaagaaatatttggatgttaaattaactcactatggtttttcacctgggaaggaaacaaattacgtactagagggcattgactggttaaaaacttgtgtatcccgggaaggacctgcggtacaggagtcagccatgtctgtgctgtgtggaaccacctgatgacatggttaacgaggaagacgatgtgttgaccggctgccgtttgaggactttggtcacccagactagacaccttctgtgctcatgtttggaaagctgaaagggaaggacagctgtgccctcctgggagctcatgtgtccctggcgctgtgctagctttcctttacagctgtttacagacaaggcaggcctgaggcagatggccactgctcttgtgatgtttgctcagaggaatatgaacattttatttttgaaaagggatgatgtggttttttgccaggtgtttataattaatcctttaatattatggttattaacctcttaaacatgaatgaattcttgattgttttaacacagtacctaagactaatgctttctgtggacaccactgagctctgcctcaactccaccctctgcgaccggaggactatgcccctagtaactgctgtcggtgtggacgctgtgctggttctgttttctaaaggagcagaaggacaggtctctgagacaggatcgttgtccctacaggaggaacagtggccttgcttcttagacggtcttcactgtgtgttttaaaacaacaacaacaacaacaacaacaacataaaactcttttgacctgtaacttaaagatcataaacttcaggcaataatattttctgtgtaagcttttaaaattatttttggggatcatagcttgttttattttgtgctata

SEQ ID NO: 3376 - DNA, 6000 bp, Homo sapiens
agcaaactgaggctgagagcaatgaagagatttgctcaaagtcccagtgaaggtaagtaagtagcagcccaaactgcaaactccagagccctcccacacaatagtgcttcacagaagaaaccactgatactttcatctggatcttcagtcaaaggcattaaaggacaaaacaaaccaaacaagcaaactccaagttggtcactctgtttagtgcttaccttgtgccagcaataagtagtatccaattcaactaccccataaggagggggctggtattatccacattttacaaatgaggaaactgaggttctggccaaggagcttactggaggccatgaaactggtaagactagaagccagtgttcaaatctgggtctagctcattcactgccaggaacccatattcagatgcttctgacacatccatgaaaaggaattaatgttaaaaggtgatttatggccacgcgcagtggctcacgcctgtaatcccagcactttgggaggcccgaggcaggcggatcacaaggtcaagagatcgagaccatcctggccaacatggtgaaaccccgtctctactaaaaatacaaaaattagctgggcgtgatggcgcatgcctgtagtcccagctactcgggaggctgaggcaggagaatcgcttgaatcagggaggcggaggttccagtaagccaagatcgcgccactgcactccagcctggcgacaaagcaagactccgtctcaaaaaaaaaaaaaaaaaaaaaagtgattaacttttattgccgacacacacacacactttcagcaactatgggcagtgtaggttagtagttaagaactggctccagattcaggcctgggtgaccttggcaagttacttcctctatctgtgtctttctgcagcttcaaaggggagatgataacagtacctccttccctgcctcccagagttgtcatattaacgaatacacgtaagcctggcataccagggcttcagctatgttggctgtggttattattacggttattatcatggttagtagaatggacaggccacaggcctgtaggaatctactccagtaaaaggtaagccagatgctcacgcgggacaccagatgacaacggtagaagtgggggccggactgggagggacgtggccatgtttgagttgagctcccctcacaggaacggtgggtgctggagacaggggcctgccttcttctaagcggcgtgggctgggagagtccggccggagacaaaagaccgtgattttgagtgtggggacacggccccgtgtgaatgggactgggtgggtcactgggcccccctgtccccgggcccctagcccaccaccgccgcctcacctgcctccgcagccctttctgcttccagtagcccgcgccactggccaacctattcagttgccaggcgacatcgttgccaggcgactccagcagcgtccgcggcgccgcggtcgacataatcagcacccactgcgcaggcgcaaacagcccaaggctgcggccggctgcaaagcgggaacaatcatttacagggttgctgtggagaccaaaggcagctcagctttgttcaaagtacagaagggaaaggaagtgacttatttacgcccttctctgtactgggtactttgcatgcctctgatcctcagagtaaattcataaggtggtaacatctagtttagagacaagaacctcagagaagttcagtcgtttctcccaatttttttttttgacggagtttcgctctttcacgcaggctggagtgcagtggcgcgatcttgactcactgcaacctccgctccactccgcgccaccgcacccaacccgggtgcaagtgattctcctgcctaagcctcccaagtagctgggattataggcggccgccatcacacccagctaatttttgtatttttagtagagacagggtttcgccatgttggccaggctggtctcgaactcctgacctcagatgatccacccgcctcggcctcccaaaatgctaggattacaggcgtgagccactgcgctcagccagtttcccccaaattacataggcctgatctcaagactgcctagccctgcccatgccccttgctcttcaggctgaccgcctggtaatgacaaaggttagcctctgcagtggacccaacacactgctggccagcgtagctgttctcaaaagcaagccagacccagccaccacctgcataaaaccctccatggctccccactagtctcagggctgagtccaaactcctagcctagtgctccagtccctgggtgatggcctcctccagccatgccagactctctcttaacccctcaaatgccacctcgctcatgaagcctgagcgctctgtaacactaattattacctctttatccttcaggatgcaacttggtgaacacttcttccatgaaaccttccttctccctgaaggagtgaagtatgggccatcccaaaatatgctggattggtatattgaccattttgagtggacaacattggaaaaatagtggcctcagaaagggctaactgggccaggtgcagtggctcatacctgtaatcctagcactttgggaggctgaagggggagggttgcttgagcccaagagtttgaggttacagtgagatatgatcacactactacaccccagcctgggtgacagagtgagacctcaactctaaaataaataaataaataaataaataaataaataaataaatagatataattttaaaaaaagatacaagaaaaggcaaacagatatgcttctttctgcattcagcaagccataaagattcctctaggagcggtaccctcactgtaccagggcaagaaaatagcccttgtcacctgagactaagaattggggactgcaatggacctgaataaatatacttaaccctgtcttccactaagtttatgcccctcatattatctcctagtgaatcccctagaatttactgccctagccagatcccctttgtcctgccatttcttctcaaatttgtcatcctttgtctaaaaagtataaaagcatcttgctttggccacttctctagacttcactctggtaaagatccccatgcgcatgtaaaactaataacacttgtatgcttttctcttgctaatctgcccagtgtcagtttggtttctagatctaggcaaagagcccacttaagagctaaaggaggattggggccaggtgtgctggcttacgcctgtaatcccaacactttgggaagccaaggccggcggatcacatgaggccaggagttcaaaaccagcctggcacacatggcaaaaccccatctctactaaaaaaatttaaaaattagccaagcatggttggtgcgcacctgtggtcccagctactcgggaggctgaggcaggagaatcgcttgagccgggaggcggagattgcagtgagccgagatcacactactgcactccagcctgggcgacagagtgagactccatctcaaaaaaaaaaaaaaaaaaaaaaaaaaaacagctaaaggaggagttcagggtgatctctagctcctgccaaatccccaaatccaaattagtaagtgaccccacagcttaatcttcccttctcctaaatcccattggcacactcccttcccctaattctctatttacttctctgcttcccgcagtggactccaatttccctgagggtggacaccatgtccgttctctttccttgtctccccagtgctaggcatataccaggaagctttcagtacatgtaggacaaatgaatagttaatggacttgaatcaagctttacagtataaaagcactttcaccatctcaggtgatccattgaaatagatagttgcgtttattttatagttgagtaaactgaggtgcggaaggtggaacaactcacctaagttcaccccctaagcctcaaccttagcagtgaaactcactaaaagacattaaacagagccaggtgtggtggcccttgcctgtagtcccaaggactggggaggctgaggcgggaggattccttgagcctaggagttcgagtccagcctggacaacatagcaagactccatctctttaaaaaaaaaaaaaaaagacatcaaacaccagcctccagcacacttagctttgaattgaagatgactgagttagatctgtgtaccaaggcttccatattgtgatgcagaaaagttaaggagctgaattaagtaggttctcaaactgaaccccggacttcgaagctggttccacggttttataagggccacaagaggccatctagcccaaaacagctaactttccaaaccgaaactagttcagaggaaatcactgactcaggtcagctttttattaaggaaattaattttgtaccgtgagctctagaagccaggcatatgatattcagacagcactggattcagaactatgcagactaaggtcagtagatggtaggcaggtctatcttctgcagctgcagggtgcttgactccaattaaacatcaataccacatcaggagctcttatgccataaccgcccaacctctcccagccgagctgatcaccagaacctgcgcgaatctctccacggtcagccccacccagggctcaggctccgcccccgggcctccatagccccgcccaccgcccacccatccagcaccgcccttgttgtcatggtgatctccggctctccagggtgtccaggagtctctctgctgccagccccgcccagactccaggcaggttctcgttgctatggtgatcgccggtgcaagctggatgcttggacgcgccgctgccagtccaacgcagaccccgcccacgacgtcgacgattcgtgtagcccgcaggtcccgcgtggctctcgttgccatggtgatcgccgccgctggctcaggcggaccaggccgcgcggagccccagctttcacagccatcgctggtgagtcagctcgcccactctgtccgaccctcccggtcacccaaccccgtgctggcacatcccgaggccagggccgcgagggcacagcgtccgcgcccacttcccgcccctataacttgaaagcggcctgcggccccggggcgtcctcatttccggagcgcaaactctgggccaggcccgcgctggttgtggaggagagccaggtcagatgcgggaagacaaccggactccgccaggaccaccccagcccagcctggagaggagtccggacagaaaaaggagacagaggggctgttgaggaggctcgaggagtcagaggcctggtgaagtgagggttttcagggaaaaggcctagttggctgaaagttaaggcccccaggcccacctagagccttcgtcctttgcagactgggagcaggagacccctccccactctacttccactgcctgagctgtgccatgcctcacagcccagtaaggtaagctcagaggggagctcctccttggtagacacctgtcaaggggagacccaggtcttctgactcccaggcagggtggggcaggcctggttcccccataccatgctgcctgctgtatgcagattgagagaaatggcctctgccccatattcctgacagagagggaagcctggatctggttttatttataattcttgagacaaggtcttactctatcacccaggctggagtgcagtggcaccttcacggttcactgcacccttgacctcccaggctcaagcattcctcccaccttcctcccaagtagctgggactgcaggcacaggccaccatgccctgctaatttttttggtttttttttgtagagactgaggtttcactttgttgcccaggctggtctcaacctcctgggcccaagtgatcctcccaccttggcctcccaaagtgctgggattacaggcatgagccactgcacccagcctggatctgatgaaaagttaggtggaaactcatgggtgaatccccaggtatttgcacagctccttaactgtctttctcc

SEQ ID NO: 3377 - DNA, 6000 bp, Homo sapiens
gagagcgactcagagccagggccgcaaggtgggcctggcacagagctcccaagtccacagggagatgaggtgatgggcgagtcagccgggccccccgggtggaatcagcaactctggtttccagacaagtttgtctttctcgaagcccatcctgggggaatgcagccagccccaagctaagccggatgaagcaggaaggagaaggcagtccctgcatcctggacaagggtgagtgtggcccacatctcaacagccacatcctcgtcttgctgttgggatggacagatggacaactccgggccgcaccctccaccccaaccccaggcctcaggacctgcctgcacactgcccacgcgccatccaggtaaagtgcttagagagcgacagggaaaggtgcaaagtgagtgaaaagtaccataattagtaccatcatcttgtcggaggaacttggaggccggcagcccgctcagggtttgagaagaagccagaacactgctctgagcagctgccccaactctgctgcctccttccctcccctgctctcagactggagggcgtttctccactcgcctggccccagcacaaaggaagagatcgggttccctgcctgggagcccagacatgggtgggagtgggatgggggtggagcaggagggcccacagcttcctggtctgagtcccaggcatctgcagcctccctctcctcctcttgggagcaatgggcagctgatccccccagtctaccccaccttcctggggtctggcccagccaggccccccgcaccgtctatgggtgtccgggccacaggaggagcttccctgctgtgtcggagcatgctgggtgcaggggcagggttgttccagggcgctatttcagaggcagcatggggacacagaaacaaggacagggtgggccacaaggactgtcttgcccactgctccagggggcacaatatctgccaggaacagtgcgcctcacaacacaatgctggggcgcccaagaacagtgtgaaccagccccctggaatcaagacagaaaggcacccggcctctccacaaattggcccagcccctgcagcctggaccctgacaccctaaagcaagtcacagtaggggatgggggggggtggagcaaggccccccactcccactcaggcctccccattctctcagatccgacccttctctgagcttcacccgtaaggcttattccacttgtaacattgtcgacttccagaccaggccctgctaagccctggccctggcgcttgtgtcgggagccatcatcatattttgttgagtagggaccagggaaaggggaattaacttggccactgaaagcaccaataagttaatataaataggatatcataataaatagaaatcatgccaggtcagacgcacagcacgcttggagctcagggttccctgagaccctgaccctaagttctgctgttcccttgccctggggaccagagacggcctccagtccccctcaagtacctctgtgtgacctcacaaggcctcccagggcctcagatgtgagctgctactctgagctaccccagccccttcttacagacctttacccagaggaagagcctgggtccctcagaacctctgcacctgacttagcaacctgcccctgccctacccacctccacaaacccctgctgcaggtccagccatcagaccctggccatcccaggctgcagggaagatcacggggaagagaacgaagaacctaccaaagctttccaggcctctcctcctcccagtgtcttccttcccaggcctgaaggtggcttctctgcctccccaagagcctgaatgccaagtgacctccttctggaaacttctgccagattgttcctatgcccaagttctctgatcatcctcaaaagaagacagccttccatcccagaggcccctctctatcttccactcatcaaacttctaggggacaaggagtcctttgggatcctagcccctctggcccacctaagtcccaacctaaggggcagcaaaggcacagatggtgataatttgctgggggctggtccactcccctgggccctgctgtctcaccctgtggtcagggctcttgtagatgacttgtgtagtttgttcactgcacaaagtgagcaaggggccaaagggacaagtagaggcagaagtccagcccacgctccccagtccacaatctcccagaggaaggggcaccttcttctagctccctccctatggaagtttccactctgctcagcttcatcacagcccagcccagagtggagtggactggccaggcaccctcggggtctgccagcagcccccatttgggtttagcgatgccctgggccccagccacccttggacaggcccccacatctggacccaactcctgagatccctcggttcacagcacacttcaagacctcctgctagaaggcctgggccaacacggcgatgatctgcttatacttccccaggagttgacagcccagcttcttcttctggaagacatccttacccgaggtgtcagggccgtaggtcacgtccacatggcccacgtggtacttgctgcacaggcggcacagcacgttgctaaggaggcctcgcaggatgtcggcggtggcgttgagcttgctgtggaggctgagggcactggggttgaggatcttctggtcccgggtgatgttgcccagggaggtgccaaggtacacgactatgcggtacagctccaccagcttggccttctccgtgccgttggcgtggaagggcgggaagtccgtcacgttggggccacatagcttgtccaggttgttggggaacggctccccctgggctgtgtactgaggggcagaagggaggtgacgtgggagtcaggggtcagtgtcccagccctgccgccaaccctttgggcaagctcttgcgtctgtttccccatctagcgcatgaggacccaactccttgccctgtaagcatctggaattgtcatgagagccaaaactaattgtaatgtgagtgcccttgctaaagatcaaagactgagccatgcacgcagtcatcattatcatcatcatcatcatcaccaccctaaggggacagaagggaaaactcggtgtctagccctagctggggcaccacacacaagtacttccatccctgcactcacaatgttccgggacgcccctccatgcccagcacccacagcccactgcctctcaaccgcatctccctggtgcctcacgcccatttcccctccatccctcgctccctgcagcaggacaatcacaagataagaagtgccaggtccccacctttgcactcagttctccccttgctaactgggcaccctggggaagcttccctggggaagcttgggcaggaagtggcgggagtctgggggtggtttaatcaagccctctccccattctctccttccagccccaaaaggtcccctcaacccagatcaggacagcccctaatgatatttacaagccccctccctgccatctcctgtcagtatcccaggggtaacttacatagagaataaagagggcattggcactgccattgagctgtgccagttggctcctgatctggttcatgaggttgttgtgacatgggtggcgtatggcacaggtggcgttgacaggggtgatggggagggggctccccgccccatgtttccagtgcagaaccaacagcaggggcacaactcctggggacagtcaggaagaagccatgagtagaaaggcaggaaagggtggcctggggtcatggcacaccggatgggggtccaacaatggccgcatgggagaggactcctggttccccctcaccacctgcagctgtcttcctggggcctagtcttcactctgtcactgcgtgtgtttctctgtctccctttctctaccttagttctccctgctctcttctgggatgacgtaaagatgagggcaagacacaagccatttccacccaaagggtgcagggtccaggagagactcccagccatcccaccctttccctcaggaaggcaaaggtcctaaggccccctggccctctggctggaaggcaccaggccccaggcccagcaggcaccaggagaaaggagacccctctcttcccacctcccgtggtggcccaggttcctcagcagcgcttcccactcactggcccattgcagcccaaatctccgaagccaggcacccatgggggccacggggcatgggggagtggggaggagtcctcggttgaccctcatctccctcccaaacctgccacttgattctggctccctgggccaattgcccccaattctgcccccgcccccatcatcctctatctcttccttccctagtgtcccctatctcactcaagctcaccccatttctgcctggctgtccccactctccatccccaaatcatcattcaaaactctctgttcccccagctccggacagcccctgactccatgccttctcccgactcatccgctgtcccttgtcccaggggttcccctccctcctaacacacacacaccggctcagggagggagaggaaatggtgcaccaggagagagaaaaggcaaaaggtcataggcagtcgggtgggcggggaggaaggaaagtgaaaggtgacaggagagctgggagctgtcccgacatgtcctggtttgcccctcccccaggggggcctgttctcccgactccccccaggcccccttagacgcttttccagggctctgcagaagggcacctgaagatggtgggggccggggtcagcgggcgagtgaggctggagacctcccccggatcccccatgctggaacagcggggacaggggcctcctcaagttcacttctcctgggtcccctgttcgtcccagcatcccaaggcagtgctgaggccccggggtggctgcgggaggggggccacacccctatatctcacctagcgcagaccacacgcttccagacaccagcagatggaggcggcacctgctcccgtcccaggccggagtttgcaagctgctcgccgcccgcgcccctccctgggagcagcccgggaccgcggttggaaaggagaaagcggaaagaaagaaagaaaagaaaaagagagagggagagtgaatctgggagaaagcgcagagggaagagcagccagcgagtgtccggagcgaggaggaggaggaggagaaggagagggggaagaagaggaggaggaggaaggctcggcgccccctccctcgccgccaacctgccgcggggcgtgcggtgcttgggaccatgtgcccgcgctcgctccgggccgccacccagcgcctccggtggctgcgcgggcgccccaagtgttcgtgtgtctgcggcgggtgggcgtccggctcgcgctgccaagcgccccaagttgccgccgcgccccgcagcggggacgcgaagccggcgcggggcgggtgtatttacctgccgccaagaccttcattatgggctgcacttcagagggccttggaggaaacctcagatgccggcagttttcagaggttcatgctcaaatggggaatttgcctgatttatatactggagcctgtgttgtaagacagaaacagctatatttagccgggatccccagtccaggaagttgtttgaggtgcatcataggaaattatgaatggaagaaagtgagagtgaaggggggggacgagtgaggggggagggtggggagaacagactttttccctcttctaagaatttgattgataaaattataatgaagccttcgacaaaacgccctgtggttttcctgcctggcttgtcccgggagttgtctgaagatgggcatcgccaggagggggcccctggccgagtcagcaggggtcccagcagtgggcgccccagacggccctgactcacctgggtttggggaggtagcgagtctggactagcagatggagactggcccctgtgccccctggttggggggctttaggggggcagtg

SEQ ID NO: 3378 - DNA, 6000 bp, Homo sapiens
gagccacctcctgccctgactctcggactccagtgtgctgaccatgggacccagccctaacccaagcccctgactcggtctggagtttgagctccttctgcggccacaaccagatcttattagaagggctgccatgtgttagacgtttatccgcatttcccaagaaacatccccatgatggccccacgaggctgttatgacagcatcctcatttgcagaggggaaaccgagggtatgagaaaggaagcccgttgtcccgggccacatagctggttgttggggcaggagggatttgaacccacaccactggggtgagaacagtggaggcacggtccgctggtggcatcacactctcactcctcaagcattgaagagtgcggtgctcttgcctttttggccaggatgcccaattggctgggctgtgcccggcattcctgagcttcaccatctcctctggccactcctcaccagccctgagcctgggacccaccctctggccccccgcttccttcctaggcccacctgagggctctgctcattttccaggtaccagggccagaggggatggggaaggaaggagggaggccagcctgggcagccgggggtgcccggagcgctgtttctgggtcgctggtcttggggaattccccaatgcccggagagctgcttacctggtgagtaactgctgctggctgcccacacagaatgcctgactgtgaagggacctcccatctcacccctgcccatgccactgacatgctgccctctctcctgagagccccagggtccaggaaagagacagacaggcagggggctggcccccacccccgcatcccccccccaaccccggggctttgcagggggcggctggtgattcaagcccctcagagctgagtttgtctccttccttctcacatggggcctgggggtgaatcagcttctgggggcggtaaggccaggtcagctgctgtcctcagatcaggcttggggtgggggtggtgaggggccaggaagggggctctgggggagtgagcacactgccctgccagccccctcccacaacctgtctgatttatctggggcacccttgaagctggaggctacgtgggtatcttgcctcaatttaccatcagcagaggcttgagaggtcttgctcctgcccagccttccccgctcagcaccctggcatggacccaagtttccccatctgtcaaatgaacccctgcttcacagggaggtcagcacaatgggtgatgatatgcagacaggtggcttgctgggtgcccagaaccatgctgagccctgagccctcacagcagacccacaaaggcggtaccattattcccattttatagttgaagaaactgaggccaggaggtggtagtcccttccccaaagtcactcagctcataactggcagagccaaacctccaacctggttgtgaatgaggccagagtccattcttcaaaccttcaggcctctccatctcctttccacaagagagttggcactgacagtttttggaaactataaaatgctttctcaaaaaatacttaacctctattcatgtcagagtatagccctgagccaggtgctgtctagagcacaagtgagtctcagaccccattcaaactctcaaaggttgaggaataagactcatccccacttgaaacacgagcaggcaggacatggccgatgtgagctggtcggggccatgggaggcaggggaggcttcctggaggaaggcgacccgagcactcctgccatgcccttcgccctctcagagcaagaggtgctgcagggattgttgtggcctgcaagacagaagccccggttccagacctggctctgttattaactctttatgtgagccccacatagttatcttcacctctctgagcctcaatttccccatctggaaaataagcagctgtgatatcccaggagagacttgtggatggggggtaacaatcagcagaagacgagcagctgggtagctgcacgtgctagagggtgcactcccttcctggagagcagtgatgggttggatggcacagccacctggagacagcactcctgggttctggcctagtaacctctgctcaatgtcagggggtcccatgtggccgggactgtcccgctcaccctgagaccggtcaaatccccagcaggccccatctgcaggagcaggacaggctgtggatgaagtcacagctggaaggggccaagccggggctgccactccagggtggggcctggggtcgtgaccctgggagccggcagccaagaagggagggtgccttccatgagggagccggccgggggcggggaacacacacacacagcatagagagggagggaagaaaacaaactcccagagaccaaagtgggcctggagcgtagcctgggcggctgattcctgggggccgcagccacgttgcaggcggcacacggacttgcggctccgagaccctgcccagccttccctccagaggcccagagcaggtggtgcctggacatggacaggagggggaggctgggcctggggcgccgaggggcccagagcacttggggagcacaaaccaagtcaggtaccgtgagaggaggggaaactgaggcactggaggggccagtcagggctggggttaaggggccttagtgtcagtgtcttctagaccctgtcctcacttcctgtttcctgtggggtggggctgagattaaacagcgattgggggtggattatagggctgatgtggggtctggcttgccagaaggcatgcaagggcctgggggtccgcttggaaggatgcaggggagactgggcagaatggtagatgtaggggcagctgcagaactcttgagcctaatgagagactcaggccgggcgacgggggtttgatgggtggaggccacagtgagcccctggtcacatggatttggggtccatgtcaggagagccaggctgagtcaggtggcaggggtctgggtgatgtgggatgggactggggactggtccagagctcacgtgctctgagtggtcaggtccttgtgcaggagatgctgggggaggtgtaagaagaagggttgagctggggtgtcctgggatgtggggttacctgagccaggccagggcaggtgagtctcctagtagtgtacgctgaccccagagcaagtgtataggagcagtaagtgccaagtggggccctccatggtccctcaaagaagagacaaggtgtggggtgagaggcaggaaggaggaaggagagccagttcgggaagtgccagctgggatgggcagttttatcacctcacatccgaggccctgctgggagagaatggggggcaagagcgtagataaagcagggtgtgtgtgtggtggggaacggcagcaggcaccagggctcgtcctggcacgatgaaggaggaacccgtggctgggcaggtctgggatgtggcaagaggcaggaactgggggcatggaggatgggcgagggggcggtgggggcccgggcgaggctgcaagagctccctggccttggaaaaccaactcacacaccttgatctcaggtcagggtcaggcggaagggctgggaaggggccacaggggactaaatcatctcctggtactgggggtcccctggcagctttagggacggcatggccccagacgcgtggccatgctgtctggccggcattcccgcatctcatagggtgtatttattttcacttttctgttgcatttcttggaggtgtccctgtgctcattttgcccggctccccactgctcctttctgcccttcctcattcacaaatcgcctggcctcagaagacgccagaacatgtgacactgccttagagcctctagaagcactttttggggacctccatcattctctgaggctgggctcaaaggggcttccaaggcaggtctggaagggaccagccacttctcagtttccccaaccatcaatcagcacccggaggaggaaactggggtacgatttcgccaagcctctctcagtcctgcttcagaatggaaatgctggaccgccttcccagaagcaccttcccagagtgtcccgacagaactgagtcagtcacccctacccccatgtcttcctagccccttccccagcctcacaggtacagtggtcagcagggcgagtgcactggtggtgtctggaggcctgaccctctggggccctgggcaacgtgttcccctcggagccccttggggcccagtggcaatgtgcagattggaggaggctacctctggggtggcttccagcgcccatgttcagttccactttatgaccgtctaaagtccacgccggccccggcccctcctcctggagcctccttctcagccaagccctagccctcctcctcccactgcccccctaaagccccccaaccagggggcacaggggccagtctccatctgctagtccagactcgctacctccccaaacccaggtgagtcagggccgtctggggcgcccactgctgggacccctgctgactcggccaggggccccctcctggcgatgcccatcttcagacaactcccgggacaagccaggcaggaaaaccacagggcgttttgtcgaaggcttcattataattttatcaatcaaattcttagaagagggaaaaagtctgttctccccaccctcccccctcactcgtccccccccttcactctcactttcttccattcataatttcctatgatgcacctcaaacaacttcctggactggggatcccggctaaatatagctgtttctgtcttacaacacaggctccagtatataaatcaggcaaattccccatttgagcatgaacctctgaaaactgccggcatctgaggtttcctccaaggccctctgaagtgcagcccataatgaaggtcttggcggcaggtaaatacacccgccccgcgccggcttcgcgtccccgctgcggggcgcggcggcaacttggggcgcttggcagcgcgagccggacgcccacccgccgcagacacacgaacacttggggcgcccgcgcagccaccggaggcgctgggtggcggcccggagcgagcgcgggcacatggtcccaagcaccgcacgccccgcggcaggttggcggcgagggagggggcgccgagccttcctcctcctcctcttcttccccctctccttctcctcctcctcctcctcgctccggacactcgctggctgctcttccctctgcgctttctcccagattcactctccctctctctttttcttttctttctttctttccgctttctcctttccaaccgcggtcccgggctgctcccagggaggggcgcgggcggcgagcagcttgcaaactccggcctgggacgggagcaggtgccgcctccatctgctggtgtctggaagcgtgtggtctgcgctaggtgagatataggggtgtggcccccctcccgcagccaccccggggcctcagcactgccttgggatgctgggacgaacaggggacccaggagaagtgaacttgaggaggcccctgtccccgctgttccagcatgggggatccgggggaggtctccagcctcactcgcccgctgaccccggcccccaccatcttcaggtgcccttctgcagagccctggaaaagcgtctaagggggcctggggggagtcgggagaacaggcccccctgggggaggggcaaaccaggacatgtcgggacagctcccagctctcctgtcacctttcactttccttcctccccgcccacccgactgcctatgaccttttgccttttctctctcctggtgcaccatttcctctccctccctgagccggtgtgtgtgtgttaggagggaggggaacccctgggacaagggacagcggatgagtcgggagaaggcatggagtcaggggctgtccggagctgggggaacagagagttttgaatgatgatttggggatggagagtggggacagccaggcagaaatggg
